(19) United States
(12) Patent Application Publication
(10) Pub. No.: US 2025/0197859 A1
(43) Pub. Date: Jun. 19, 2025

(54) COMPOSITIONS AND METHODS FOR THE TREATMENT OF ANGIOPOIETIN LIKE 7 (ANGPTL7) RELATED DISEASES

(71) Applicant: Empirico Inc., San Diego, CA (US)

(72) Inventors: Omri GOTTESMAN, San Diego, CA (US); Shannon BRUSE, San Diego, CA (US); Paul BUSKE, Middleton, CA (US); Brian CAJES, San Diego, CA (US); David LEWIS, Madison, WI (US); David ROZEMA, Cross Plains, WI (US)

(21) Appl. No.: 18/848,846

(22) PCT Filed: Mar. 27, 2023
(86) PCT No.: PCT/US2023/064997

§ 371 Date: Sep. 19, 2024

Related U.S. Application Data
(60) Provisional application No. 63/324,554, filed on Mar. 28, 2022.
(60) Provisional application No. 63/385,938, filed on Dec. 2, 2022.

(51) Int. Cl. C12N 15/113; A61P 27/06; C12N 15/85

(52) U.S. Cl. CPC C12N 15/113; A61P 27/06; C12N 15/85; C12N 2310/11; C12N 2310/14; C12N 2310/312; C12N 2310/315; C12N 2310/321; C12N 2310/322; C12N 2310/351

(57) ABSTRACT

Provided herein are compositions comprising an oligonucleotide that targets ANGPTL7. In some embodiments, the oligonucleotide includes modified nucleotides. In some embodiments, the oligonucleotide may be used to reduce intraocular pressure in a subject's eye.

### CROSS REFERENCE

[0001] This application is a U.S. National Phase of International Application No. PCT/US2023/064997, filed Mar. 27, 2023, which claims the benefit of U.S. Provisional Application No. 63/324,554, filed Mar. 28, 2022 and U.S. Provisional Application No. 63/385,938, filed Dec. 2, 2022, which are incorporated herein by reference in their entirety.

### SEQUENCE LISTING

[0002] The present application is being filed along with a Sequence Listing in electronic format. The Sequence Listing is provided as a file entitled “54462-740_831_SL.xml,” created Oct. 9, 2024, which is 22,123,899 bytes in size. The information in the electronic format of the Sequence Listing is incorporated by reference in its entirety.

### BACKGROUND

[0003] Eye disorders are abundant and affect a wide variety of people. Improved therapeutics are needed for treating these disorders.

### SUMMARY

[0004] Glaucoma is a heterogenous group of diseases, affecting more than 70 million people worldwide, that is characterized by optic nerve damage resulting in a progressive loss of retinal ganglion cells, leading to loss of vision. The different subtypes of glaucoma are generally stratified by the iridocorneal angle, with open-angle glaucoma accounting for approximately 75% of cases. Though the pathophysiology of glaucoma remains poorly understood, a primary causal feature and risk factor is elevated intraocular pressure (IOP). IOP is determined by a balance between aqueous humor secretion from the ciliary body and its drainage through the trabecular meshwork and uveoscleral outflow pathways. Reducing IOP is the only strategy that has been proven to prevent the development or slow the progression of glaucoma and consequently, treatment of glaucoma has been focused on lowering IOP to target levels by increasing aqueous outflow or decreasing aqueous production. Several classes of IOP-lowering medications are used, including prostaglandin analogues, beta-adrenergic blockers, alpha-adrenergic agonists, carbonic anhydrase inhibitors and most-recently rho kinase inhibitors. Surgical methods, such as laser trabeculoplasty to improve drainage of aqueous humor through the trabecular meshwork, are also employed. Despite the availability of medical and surgical therapies for glaucoma, it is the leading cause of irreversible blindness worldwide, and there remains a need for novel therapeutic strategies that may further reduce the risk of the significant morbidity and reduction in quality of life associated with loss of vision. The compositions and methods described herein may be used to address this need.

[0005] Disclosed herein, in certain aspects is a composition comprising a small interfering RNA (siRNA) that targets Angiopoietin-like 7 (ANGPTL7) and when administered to a cell decreases expression of ANGPTL7, wherein the siRNA comprises a sense strand and an antisense strand; wherein (i) or (ii): (i) the sense strand comprises a modification pattern selected from the group consisting of: modification pattern 17S: 5′-nnnnnnNfnNfnnnnnnnnnnsnsn-3′ (SEQ ID NO: 11711), modification pattern 18S: 5′-nnnnnnnNfNfNfNfnnnnnnnnsnsn-3′ (SEQ ID NO: 11712), modification pattern 19S: 5′-nnnnNfnnnNfnNfnnnnnnnnsnsn-3′ (SEQ ID NO: 11713), modification pattern 20S: 5′-nnnnnnnNfNfnNfnnnnnnnnsnsn-3′ (SEQ ID NO: 11714), modification pattern 21S: 5′-nnnnnnNfNfNfNfNfnnnnnnnnsnsn-3′ (SEQ ID NO: 11715), modification pattern 22S: 5′-nnnnNfnNfNfNfNfnnnnnnnnnsnsn-3′ (SEQ ID NO: 11716), modification pattern 23S: 5′-nnnnnNfNfNfNfnNfnnnnnnnnsnsn-3′ (SEQ ID NO: 11717), modification pattern 24S: 5′-nnnnnNfNfNfNfnnnnnnnnnnsnsn-3′ (SEQ ID NO: 11718), modification pattern 25S: 5′-nnnnNfNfNfNfNfnnnnnnnnnnsnsn-3′ (SEQ ID NO: 11719), modification pattern 26S: 5′-nnnnnnnnNfNfnnnnnnnnnsnsn-3′ (SEQ ID NO: 11720), modification pattern 27S: 5′-nnnnnnNfNfNfNfnnnnnnnnnsnsn-3′ (SEQ ID NO: 11721), modification pattern 28S: 5′-nnnnNfNfnnNfnNfnnnnnnnnsnsn-3′ (SEQ ID NO: 11722), modification pattern 29S: 5′-nnnnNfnNfnNfnNfnnnnnnnnsnsn-3′ (SEQ ID NO: 11723), modification pattern 30S: 5′-nnnnnNfnnNfnNfnnnnnnnnsnsn-3′ (SEQ ID NO: 11724), modification pattern 31S: 5′-nnnnnNfNfnNfnnnnnnnnnnsnsn-3′ (SEQ ID NO: 11725), modification pattern 32S: 5′-nnnnnnNfnNfNfnnnnnnnnnsnsn-3′ (SEQ ID NO: 11726), modification pattern 33S: 5′-nNfnNfnNfnNfNfnnnnnNfnNfNfnsnsn-3′ (SEQ ID NO: 11727), modification pattern 34S: 5′-snnnnnNfNfNfNfnNfnnnnnnnnsnsn-3′ (SEQ ID NO: 11728), modification pattern 35S: 5′-snnnnnNfNfNfNfnnnnnnnnnnsnsn-3′ (SEQ ID NO: 11729), modification pattern 36S: 5′-snnnnNfNfNfNfNfnnnnnnnnnnsnsn-3′ (SEQ ID NO: 11730), modification pattern 37S: 5′-snnnnnnnnNfNfnnnnnnnnnsnsn-3′ (SEQ ID NO: 11731), modification pattern 38S: 5′-snnnnNfNfnnNfnNfnnnnnnnnsnsn-3′ (SEQ ID NO: 11732), modification pattern 39S: 5′-snnnnnNfnnNfnNfnnnnnnnnsnsn-3′ (SEQ ID NO: 11733), modification pattern 40S: 5′-snnnnnnNfnNfNfnnnnnnnnnsnsn-3′ (SEQ ID NO: 11734), modification pattern 41S: 5′-snNfnNfnNfnNfNfnnnnnNfnNfNfnsnsn-3′ (SEQ ID NO: 11735), modification pattern 42S: 5′-NfsnNfnNfnNfNfNfnNfnNfnNfnNfnNfsnsn-3′ (SEQ ID NO: 11736), modification pattern 43S: 5′-NfsnNfnNfnNfnNfnNfnNfnNfnNfnNfsnsn-3′ (SEQ ID NO: 11737), modification pattern 44S: 5′-NfnNfnNfnNfnNfnNfnNfnNfnNfnNfsnsn-3′ (SEQ ID NO: 11738), modification pattern 45S: 5′-nnnnnNfnNfNfnnnnnnnnnnsnsn-3′ (SEQ ID NO: 11781), modification pattern 46S: 5′-nnnnNfnnNfNfnnnnnnnnnnsnsn-3′ (SEQ ID NO: 11782), modification pattern 47S: 5′-nnnnNfnNfnNfnnnnnnnnnnsnsn-3′ (SEQ ID NO: 11783), modification pattern 48S: 5′-nnnnNfNfnnNfnnnnnnnnnnsnsn-3′ (SEQ ID NO: 11784), modification pattern 49S: 5′-nnnnNfNfnNfNfnnnnnnnnnnsnsn-3′ (SEQ ID NO: 11785), and modification pattern 50S: 5′ NfnNfnNfnNfNfNfnNfnNfnNfnNfnNfsnsn-3′ (SEQ ID NO: 11788) or (ii) the antisense strand comprises modification pattern 11AS: 5′-nsnsnNfnNfnNfnNfnNfnNfnNfnNfnsnsn-3′ (SEQ ID NO: 11739) or 12AS: 5′-nsNfsnnnnNfnnNfnNfnNfnNfnNfnsnsn-3′; and wherein “Nf” is a 2′-fluoro-modified nucleoside, “n” is a 2′-O-methyl modified nucleoside, and “s” is a phosphorothioate linkage. In some embodiments, the sense strand comprises a 5′ hydrophobic moiety. In some embodiments, the 5′ hydrophobic moiety comprises a phenyl or cyclohexyl linker connected to a 5′ end of the sense strand and connected to a lipid or hydrocarbon.

[0006] Disclosed herein, in certain aspects, is a composition comprising a small interfering RNA (siRNA) that targets Angiopoietin-like 7 (ANGPTL7) and when administered to a cell decreases expression of ANGPTL7, wherein the siRNA comprises an antisense strand and a sense strand comprising a 5′ hydrophobic moiety comprising a phenyl or cyclohexyl linker connected to a 5′ end of the sense strand and connected to a lipid or hydrocarbon. In some embodiments, the lipid or hydrocarbon, and the end of the sense are connected to the phenyl or cyclohexyl linker in the 1,4; 1,3; or 1,2 substitution pattern (e.g. the para, meta, or ortho phenyl configuration). In some embodiments, the lipid or hydrocarbon, and the end of the sense are connected to the phenyl or cyclohexyl linker in the 1,4 substitution pattern (e.g. the para phenyl configuration). In some embodiments, the 5′ hydrophobic moiety comprises any one of the following structures:

[chemical structure]

wherein the dotted line indicates a covalent connection to the end of the 5′ end of the sense strand, n is 1-3, and R is an alkyl group containing 4-18 carbons. In some embodiments, the 5′ hydrophobic moiety comprises a hydrophobic moiety in Table 1. In some embodiments, the 5′ hydrophobic moiety comprises phenyl para C12. Disclosed herein, in certain aspects is a composition comprising a small interfering RNA (siRNA) that targets Angiopoietin-like 7 (ANGPTL7) and when administered to a cell decreases expression of ANGPTL7, wherein the siRNA comprises an antisense strand, a sense strand, and a hydrophobic moiety comprising stearyl conjugated to a 5′ end of the sense strand. In some embodiments, the antisense strand comprises a 5′ vinyl phosphonate. In some embodiments, the sense strand comprises any one of modification patterns 24S, 25S, 31S, 33S, or 45S-50S. In some embodiments, the sense strand comprises modification pattern 24S. In some embodiments, the sense strand comprises modification pattern 25S. In some embodiments, the sense strand comprises modification pattern 31S. In some embodiments, the sense strand comprises modification pattern 33S. In some embodiments, the sense strand comprises modification pattern 45S. In some embodiments, the sense strand comprises modification pattern 46S. In some embodiments, the sense strand comprises modification pattern 47S. In some embodiments, the sense strand comprises modification pattern 48S. In some embodiments, the sense strand comprises modification pattern 49S. In some embodiments, the sense strand comprises modification pattern 50S. In some embodiments, the antisense strand comprises modification pattern 1AS: 5′-nsNfsnNfnNfnNfnNfnnnNfnNfnNfnsnsn-3′ (SEQ ID NO: 11386). In some embodiments, the antisense strand comprises modification pattern 6AS: 5′-nsNfsnNfnNfnNfnNfnNfnNfnNfnNfnsnsn-3′ (SEQ ID NO: 11399). In some embodiments, the antisense strand comprises modification pattern 11AS. In some embodiments, the antisense strand comprises modification pattern 12AS. In some embodiments, the sense strand comprises the nucleoside sequence of any one of SEQ ID NOs: 11643-11676 or 11755-11767, or a sequence thereof having 1 or 2 nucleoside substitutions, additions, or deletions relative to any of SEQ ID NOs: 11643-11676 or 11755-11767. In some embodiments, the sense strand comprises the nucleoside sequence of any one of SEQ ID NOs: 11643-11676 or 11755-11767. In some embodiments, the sense strand comprises the nucleoside sequence of any one of SEQ ID NOs: 11664, 11674 or 11676, or a sequence thereof having 1 or 2 nucleoside substitutions, additions, or deletions relative to any of SEQ ID NOs: 11664, 11674 or 11676. In some embodiments, the sense strand comprises the nucleoside sequence of any one of SEQ ID NOs: 11664, 11674 or 11676. In some embodiments, the sense strand comprises the nucleoside sequence of SEQ ID NO: 11664, or a sequence thereof having 1 or 2 nucleoside substitutions, additions, or deletions relative to SEQ ID NO: 11664. In some embodiments, the sense strand comprises the nucleoside sequence of SEQ ID NO: 11664. In some embodiments, the sense strand comprises the nucleoside sequence of SEQ ID NO: 11674, or a sequence thereof having 1 or 2 nucleoside substitutions, additions, or deletions relative to SEQ ID NO: 11674. In some embodiments, the sense strand comprises the nucleoside sequence of SEQ ID NO: 11674. In some embodiments, the sense strand comprises the nucleoside sequence of SEQ ID NO: 11676, or a sequence thereof having 1 or 2 nucleoside substitutions, additions, or deletions relative to SEQ ID NO: 11676. In some embodiments, the sense strand comprises the nucleoside sequence of SEQ ID NO: 11676. In some embodiments, the antisense strand comprises the nucleoside sequence of any one of SEQ ID NOs: 11677-11710 or 11768-11780, or a sequence thereof having 1 or 2 nucleoside substitutions, additions, or deletions relative to any of SEQ ID NOs: 11677-11710 or 11768-11780. In some embodiments, the antisense strand comprises the nucleoside sequence of any one of SEQ ID NOs: 11677-11710 or 11768-11780. In some embodiments, the antisense strand comprises the nucleoside sequence of any one of SEQ ID NOs: 11698, 11708 or 11710, or a sequence thereof having 1 or 2 nucleoside substitutions, additions, or deletions relative to any of SEQ ID NOs: 11698, 11708 or 11710. In some embodiments, the antisense strand comprises the nucleoside sequence of any one of SEQ ID NOs: 11698, 11708 or 11710. In some embodiments, the antisense strand comprises the nucleoside sequence of SEQ ID NO: 11698, or a sequence thereof having 1 or 2 nucleoside substitutions, additions, or deletions relative to SEQ ID NO: 11698. In some embodiments, the antisense strand comprises the nucleoside sequence of SEQ ID NO: 11698. In some embodiments, the antisense strand comprises the nucleoside sequence of SEQ ID NO: 11708, or a sequence thereof having 1 or 2 nucleoside substitutions, additions, or deletions relative to SEQ ID NO: 11708. In some embodiments, the antisense strand comprises the nucleoside sequence of SEQ ID NO: 11708. In some embodiments, the antisense strand comprises the nucleoside sequence of SEQ ID NO: 11710, or a sequence thereof having 1 or 2 nucleoside substitutions, additions, or deletions relative to SEQ ID NO: 11710. In some embodiments, the antisense strand comprises the nucleoside sequence of SEQ ID NO: 11710.

[0007] Disclosed herein, in certain aspects is a composition comprising a small interfering RNA (siRNA) that targets Angiopoietin-like 7 (ANGPTL7) and when administered to a cell decreases expression of ANGPTL7, wherein the siRNA comprises a sense strand and an antisense strand; and wherein (i) or (ii): (i) wherein the sense strand comprises 5′-[ETL3]aUfaUfgUfaCfCfaaggaUfgUfUfasusu-3′ (SEQ ID NO: 11583), 5′-[ETL3]aauuaUfCfUfUfgagucuacaasusu-3′ (SEQ ID NO: 11593), 5′-[ETL12]aauuaUfCfUfUfgagucuacaasusu-3′ (SEQ ID NO: 11594), or 5′-[ETL3]acacAfAfAfAfAfuuguucggcasusu-3′ (SEQ ID NO: 11595), or a sequence thereof having 1 or 2 nucleoside substitutions, additions, or deletions relative to any of SEQ ID NOs: 11583 or 11593-11595, or (ii) or wherein the antisense strand comprises the nucleotide sequence of any one of 5′-VPusAfsaCfaUfcCfuUfgguAfcAfuAfususu-3′ (SEQ ID NO: 11630), 5′-VPusUfsgUfaGfaCfuCfaAfgAfuAfaUfususu-3′ (SEQ ID NO: 11640), 5′-VPusGfscCfgAfaCfaAfuUfuUfuGfuGfususu-3′ (SEQ ID NO: 11642), or 5′-VPusUfsguagAfcuCfaAfgAfuAfaUfususu-3′(SEQ ID NO: 11803), or a sequence thereof having 1 or 2 nucleoside substitutions, additions, or deletions relative to any of SEQ ID NOs: 11630 or 11640-11642; wherein “Af,” “Cf,” “Gf,” and “Uf” are 2′-fluoro-modified nucleosides, “a,” “c,” “g,” and “u” are 2′-O-methyl modified nucleosides, “s” is a phosphorothioate linkage, “VP” is vinyl phosphonate, “[ETL3]” is stearyl, and “[ETL12]” is phenyl para C12. In some embodiments, the sense strand comprises the nucleotide sequence of any one of SEQ ID NOs: 11583 or 11593-11595. In some embodiments, the antisense strand comprises the nucleotide sequence of any one of SEQ ID NOs: 11630 or 11640-11642.

[0008] In some embodiments, disclosed herein is a pharmaceutical composition comprising the composition described herein and a pharmaceutically acceptable carrier. In some embodiments, described herein is a method of decreasing expression of Angiopoietin-like 7 (ANGPTL7), comprising administering the composition described herein to a cell, thereby decreasing expression of ANGPTL7 in the cell. In some embodiments, administering the pharmaceutical composition to the cell comprises administering the composition or pharmaceutical composition to a subject comprising the cell. In some embodiments, disclosed herein is a method of treating an ocular disorder, comprising administering to a subject in need thereof a therapeutically effective amount of the pharmaceutical composition described herein, thereby treating the ocular disorder in the subject. In some embodiments, the ocular disorder comprises a glaucoma. In some embodiments, the composition decreases intraocular pressure in an eye of the subject relative to a baseline intraocular pressure measurement obtained from the subject prior to administering the composition to the subject. In some embodiments, the composition decreases the intraocular pressure by at least 10% relative to the baseline intraocular pressure measurement.

### BRIEF DESCRIPTION OF THE DRAWINGS

[0009] FIGS. 1A-1D show an empty plasmid construct (FIG. 1A) used in accordance with some embodiments, GFP tagged plasmid construct (FIG. 1B), a representative ANGPTL7 pre-mRNA encoding construct (FIG. 1C) and a representative ANGPTL7 CDS encoding construct (FIG. 1D).

[0010] FIG. 2 shows fluorescent microscopy images of HEK293 cells transfected with a pcDNA3.1(+) GFP vector.

[0011] FIG. 3 shows results of qPCR measuring ANGPTL7 mRNA expression in HEK293 cells transfected with the WT and Q175H pre-mRNA expression constructs.

[0012] FIG. 4 shows results of qPCR measuring ANGPTL7 mRNA expression in HEK293 cells transfected with the WT, Q175H, R140H and R177Ter pre-mRNA expression constructs.

[0013] FIG. 5 includes an image of a western blot of ANGPTL7 in HEK293 cells transfected with the WT, Q175H, R140H and R177Ter pre-mRNA expression constructs.

[0014] FIG. 6 includes results of an ELISA assay measuring ANGPTL7 protein expression in HEK293 cells transfected with the WT, Q175H, R140H and R177Ter pre-mRNA expression constructs.

[0015] FIG. 7 shows the ratio of secreted vs. intracellular protein (as measured by ELISA) in HEK293 cells transfected with the WT, Q175H, R140H and R177Ter pre-mRNA expression constructs.

[0016] FIG. 8 includes an image of a western blot of ANGPTL7 in HEK293 cells transfected with the WT, Q175H, R140H and R177Ter CDS expression constructs.

[0017] FIG. 9 is an example of a GalNAc ligand.

[0018] FIG. 10 is an example of a GalNAc ligand.

### DETAILED DESCRIPTION

[0019] Large-scale human genetic data provides a mechanism for improving the success rate of pharmaceutical discovery and development by leveraging experiments of nature.

[0020] A Genome Wide Association Study (GWAS) is an experimental design to detect associations between genetic variants and traits in a population sample. The purpose is to better understand the biology of disease and to develop treatments based on this understanding. GWAS can utilize genotyping and/or sequencing data and often involves evaluation of millions of genetic variants that are relatively evenly distributed across the genome. The most common GWAS design is the case-control study, which involves comparing variant frequencies in cases versus controls. If a variant has a significantly different frequency in cases versus controls, that variant is said to be associated with disease. The commonly reported association statistics for GWAS are p-values, as a measure of statistical significance and odds ratios (OR) or beta coefficients (beta), as a measure of effect size. Researchers often assume an additive genetic model and calculate an allelic odds ratio, which is the increased (or decreased) risk of disease conferred by each additional copy of an allele (compared to carrying no copies of that allele). An additional and important concept in design and interpretation of GWAS is that of linkage disequilibrium, which is the non-random association of alleles. The presence of linkage disequilibrium can obfuscate which is the “causal” variant.

[0021] Functional annotation of variants and/or wet lab experimentation can identify the causal genetic variant identified via GWAS, and in many cases, this has led to the identification of disease-causing genes. In particular, understanding the functional effect of a causal genetic variant (e.g. loss or gain of protein function, increase or decrease in gene expression) allows that variant to be used as a proxy for therapeutic modulation of the target gene and to gain an insight into the potential therapeutic efficacy and safety of a therapeutic that modulates that target.

[0022] Identification of such gene-disease associations has provided fundamental insights into disease biology and is rapidly becoming an essential means of identifying novel therapeutic targets for the pharmaceutical industry. In order to translate the therapeutic insights derived from human genetics, disease biology in patients must be exogenously ‘programmed’ into replicating the observation from human genetics. Today, the potential options for therapeutic modalities that could be brought to bear in translating therapeutic targets identified via human genetics into novel medicines are greater than ever before. These include well established therapeutic modalities such as small molecules and monoclonal antibodies, maturing modalities such as oligonucleotides and emerging modalities such as gene therapy and gene editing. The choice of therapeutic modality depends on several factors including the location of the target (e.g. intracellular, extracellular or secreted), the relevant tissue (e.g. lung, liver) and the relevant indication.

[0023] Glaucoma is the leading cause of irreversible blindness in the world, with an approximate 1-2% prevalence worldwide in individuals >40 years of age. There are several subtypes of glaucoma, but two subtypes are dominant: primary open angle glaucoma (POAG) and primary angle closure glaucoma (PACG). POAG accounts for about 90% of glaucoma cases in the US and the majority of these cases occur in the context of ocular hypertension (OHT). In some populations (i.e. Asian populations) the majority of glaucoma occurs in the context of normal intraocular pressure (normal-tension glaucoma, NTG).

[0024] Glaucoma is generally characterized by blocked outflow of the aqueous humor through the conventional outflow pathway. The conventional outflow pathway is comprised of the trabecular meshwork (TM) and Schlemm's canal at the base of the cornea. There is also a non-conventional outflow pathway which involves uveoscleral drainage and accounts for a fraction of the aqueous humor outflow from the anterior compartment of the eye. Blockage of the TM/Schlemm's canal (conventional pathway) restricts aqueous humor outflow leading to increased pressure in the anterior chamber which translates to increased pressure in the posterior chamber and optic nerve degeneration and damage.

[0025] Treatments for glaucoma aim to lower intraocular pressure (IOP) to target levels (generally a 20-50% reduction in IOP). Despite normal IOP, treatment of NTG also revolves around lowering IOP. Several classes of IOP-lowering medication are used, including prostaglandin analogues (typically the first-line therapy), beta-adrenergic blockers, alpha-adrenergic agonists, and carbonic anhydrase inhibitors. These drugs are often ineffective and surgical methods (trabeculoplasty/trabeculotomy) are employed. However, the beneficial effects of trabeculoplasty/trabeculotomy decrease over time such that there is an approximate 10% failure rate per year.

[0026] Angiopoietin-like proteins (ANGPTLs) are a family of eight proteins with structural and functional similarities to angiopoietins, comprised of an N-terminal coiled-coil domain which mediates homo-oligomerization and a C-terminal fibrinogen domain. ANGPTLs are widely expressed in the liver, vasculature and hematopoietic systems, and serve important roles in inflammation, lipid metabolism, angiogenesis and extracellular matrix (ECM) formation.

[0027] ANGPTL7 was originally discovered in human corneal cDNA libraries and named cornea-derived transcript 6 (CDT6). Immunohistochemistry reveals ANGPTL7 staining in multiple tissues in the eye. ANGPTL7 is overexpressed in the aqueous humor of patients with glaucoma and is upregulated by glaucomatous conditions such as TGFβ and dexamethasone exposure.

[0028] The terminology used herein is for the purpose of describing particular embodiments only and is not intended to be limiting. As used herein, the singular forms “a”, “an” and “the” are intended to include the plural forms as well, unless the context clearly indicates otherwise. Furthermore, to the extent that the terms “including”, “includes”, “having”, “has”, “with”, or variants thereof are used in either the detailed description and or the claims, such terms are intended to be inclusive in a manner similar to the term “comprising.”

[0029] The term “about” or “approximately” means within an acceptable error range for the particular value as determined by one of ordinary skill in the art, which will depend in part on how the value is measured or determined, i.e., the limitations of the measurement system. For example, “about” can mean within 1 or more than 1 standard deviation, per the practice in the art. In some cases, “about” can mean a range of up to 20%, up to 10%, up to 5%, and up to 1% of a given value. In some cases, particularly with respect to biological systems or processes, the term can mean within an order of magnitude, e.g., within 5-fold, or within 2-fold, of a value. Where particular values are described in the application and claims, unless otherwise stated the term “about” meaning within an acceptable error range for the particular value should be assumed.

[0030] In some embodiments, the term “mRNA” means the presently known mRNA transcript(s) of a targeted gene, and any further transcripts which may be elucidated.

[0031] In some embodiments, “dsRNA”, “siRNA”, and “siRNA agent” are used interchangeably as agents that can mediate silencing of a target RNA, e.g., mRNA, e.g., a transcript of a gene that encodes a protein. In some cases, the target RNA is ANGPTL7. Such mRNA may also be referred to herein as mRNA to be silenced. Such a gene is also referred to as a target gene. In some cases, the RNA to be silenced is an endogenous gene or a pathogen gene. In addition, RNAs other than mRNA, e.g., tRNAs, and viral RNAs, can also be targeted.

[0032] In some embodiments, the phrase “mediates RNAi” refers to the ability to silence, in a sequence specific manner, a target RNA. While not wishing to be bound by theory, it is believed that silencing uses the RNAi machinery or process and a guide RNA, e.g., an siRNA agent.

[0033] In some embodiments, “specifically hybridizable” and “complementary” are terms which are used to indicate a sufficient degree of complementarity such that stable and specific binding occurs between a compound described herein and a target RNA molecule.

[0034] Specific binding may require a sufficient degree of complementarity to avoid non-specific binding of the oligomeric compound to non-target sequences under conditions in which specific binding is desired, i.e., under physiological conditions in the case of assays or therapeutic treatment, or in the case of in vitro assays, under conditions in which the assays are performed. The non-target sequences may differ by at least 5 nucleotides.

[0035] In some embodiments, a dsRNA agent is “sufficiently complementary” to a target RNA, e.g., a target mRNA, such that the dsRNA agent silences production of protein encoded by the target mRNA. In some embodiments, the dsRNA agent is “exactly complementary” to a target RNA, e.g., the target RNA and the dsRNA duplex agent anneal, for example to form a hybrid made exclusively of Watson-Crick base pairs in the region of exact complementarity. A “sufficiently complementary” target RNA can include an internal region (e.g., of at least 10 nucleotides) that is exactly complementary to a target RNA. Moreover, in some embodiments, the dsRNA agent specifically discriminates a single-nucleotide difference. In this case, the dsRNA agent only mediates RNAi if exact complementary is found in the region (e.g., within 7 nucleotides of) the single-nucleotide difference.

[0036] In some embodiments, the term “oligonucleotide” refers to a nucleic acid molecule (RNA or DNA) for example of length less than 100, 200, 300, or 400 nucleotides.

[0037] In some embodiments, the term “oligonucleotide” refers to an oligomer or polymer of ribonucleic acid (RNA) or deoxyribonucleic acid (DNA) or mimetics thereof. The term “oligonucleotide”, also includes linear or circular oligomers of natural and/or modified monomers or linkages, including deoxyribonucleosides, ribonucleosides, substituted and alpha-anomeric forms thereof, peptide nucleic acids (PNA), locked nucleic acids (LNA), phosphorothioate, methylphosphonate, and the like. Oligonucleotides are capable of specifically binding to a target polynucleotide by way of a regular pattern of monomer-to-monomer interactions, such as Watson-Crick type of base pairing, Hoogsteen or reverse Hoogsteen types of base pairing, or the like.

[0038] In some embodiments, the oligonucleotide is “chimeric”, that is, composed of different regions. “Chimeric” oligonucleotides contain two or more chemical regions, for example, DNA region(s), RNA region(s), PNA region(s), etc. Each chemical region is made up of at least one monomer unit, i.e., a nucleotide in the case of an oligonucleotides compound. These oligonucleotides typically comprise at least one region wherein the oligonucleotide is modified in order to exhibit one or more desired properties. The desired properties of the oligonucleotide include, but are not limited, for example, to increased resistance to nuclease degradation, increased cellular uptake, and/or increased binding affinity for the target nucleic acid. Different regions of the oligonucleotide may therefore have different properties. Chimeric oligonucleotides can be formed as mixed structures of two or more oligonucleotides, modified oligonucleotides, oligonucleosides and/or oligonucleotide analogs.

[0039] The oligonucleotide can comprise or be composed of regions that can be linked in “register”, that is, when the monomers are linked consecutively, as in native DNA, or linked via spacers. The spacers are intended to constitute a covalent “bridge” between the regions and have, in some cases, a length not exceeding about 100 carbon atoms. The spacers may carry different functionalities, for example, having positive or negative charge, carry special nucleic acid binding properties (intercalators, groove binders, toxins, fluorophores etc.), being lipophilic, inducing special secondary structures like, for example, alanine containing peptides that induce alpha-helices.

[0040] In some embodiments, “ANGPTL7” and “angiopoietin like 7” are inclusive of all family members, mutants, alleles, fragments, species, coding and noncoding sequences, sense and antisense polynucleotide strands, etc. of the ANGPTL7 transcript (NM_021146; SEQ ID NO: 11085). In some embodiments, “ANGPTL7” and “angiopoietin like 7” are used interchangeably in the present application.

[0041] In some embodiments, “oligonucleotide specific for” or “oligonucleotide which targets” refers to an oligonucleotide having a sequence (i) capable of forming a stable complex with a portion of the targeted gene, or (ii) capable of forming a stable duplex with a portion of a mRNA transcript of the targeted gene. Stability of the complexes and duplexes can be determined by theoretical calculations and/or in vitro assays.

[0042] In some embodiments, the term “target nucleic acid” encompasses DNA, RNA (including pre-mRNA and mRNA) transcribed from such DNA, and also cDNA derived from such RNA, coding, noncoding sequences, sense and antisense polynucleotides. The specific hybridization of an oligomeric compound with its target nucleic acid interferes with the normal function of the nucleic acid. This modulation of function of a target nucleic acid by compounds, which specifically hybridize to it, is generally referred to as “antisense”. The functions of DNA that are modulated include, for example, replication and transcription. The functions of RNA that are modulated, include all vital functions such as, for example, translocation of the RNA to the site of protein translation, translation of protein from the RNA, splicing of the RNA to yield one or more mRNA species, and catalytic activity which may be engaged in or facilitated by the RNA. The overall effect of such interference with target nucleic acid function is modulation of the expression of an encoded product or oligonucleotides.

[0043] RNA interference “RNAi” is mediated by double stranded RNA (dsRNA) molecules that have sequence-specific homology to their “target” nucleic acid sequences. In certain embodiments, the mediators are 5-25 nucleotide “small interfering” RNA duplexes (siRNAs). The siRNAs are derived from the processing of dsRNA by an RNase enzyme known as Dicer. siRNA duplex products are recruited into a multi-protein siRNA complex termed RISC (RNA Induced Silencing Complex). Without wishing to be bound by any particular theory, a RISC is then believed to be guided to a target nucleic acid (suitably mRNA), where the siRNA duplex interacts in a sequence-specific way to mediate cleavage in a catalytic fashion. Small interfering RNAs can be synthesized and used. Small interfering RNAs for use in the methods herein suitably comprise between about 1 to about 50 nucleotides (nt). In examples of non-limiting embodiments, siRNAs can comprise about 5 to about 40 nt, about 5 to about 30 nt, about 10 to about 30 nt, about 15 to about 25 nt, or about 20-25 nucleotides.

[0044] In some embodiments, selection of appropriate oligonucleotides is facilitated by using computer programs that automatically align nucleic acid sequences and indicate regions of identity or homology. Such programs are used to compare nucleic acid sequences obtained, for example, by searching databases such as GenBank or by sequencing PCR products. Comparison of nucleic acid sequences from a range of species allows the selection of nucleic acid sequences that display an appropriate degree of identity between species. In the case of genes that have not been sequenced, Southern blots are performed to allow a determination of the degree of identity between genes in target species and other species. By performing Southern blots at varying degrees of stringency, as is well known in the art, it is possible to obtain an approximate measure of identity. These procedures allow the selection of oligonucleotides that exhibit a high degree of complementarity to target nucleic acid sequences in a subject to be controlled and a lower degree of complementarity to corresponding nucleic acid sequences in other species. One skilled in the art will realize that there is considerable latitude in selecting appropriate regions of genes.

[0045] In some embodiments, “enzymatic RNA” is meant as an RNA molecule with enzymatic activity. Enzymatic nucleic acids (ribozymes) act by first binding to a target RNA. Such binding occurs through the target binding portion of an enzymatic nucleic acid which is held in close proximity to an enzymatic portion of the molecule that acts to cleave the target RNA. Thus, the enzymatic nucleic acid first recognizes and then binds a target RNA through base pairing, and once bound to the correct site, acts enzymatically to cut the target RNA.

[0046] In some embodiments, “decoy RNA” is meant as an RNA molecule that mimics the natural binding domain for a ligand. The decoy RNA therefore competes with natural binding targets for the binding of a specific ligand. For example, over-expression of HIV trans-activation response (TAR) RNA can act as a “decoy” and efficiently binds HIV tat protein, thereby preventing it from binding to TAR sequences encoded in the HIV RNA. This is meant to be a specific example. Those in the art will recognize that this is but one example, and some embodiments can be readily generated using techniques generally known in the art.

[0047] In some embodiments, “monomers” typically indicate monomers linked by phosphodiester bonds or analogs thereof to form oligonucleotides ranging in size from a few monomeric units, e.g., from about 3-4, to about several hundreds of monomeric units. Analogs of phosphodiester linkages include: phosphorothioate, phosphorodithioate, methylphosphornates, phosphoroselenoate, phosphoramidate, and the like, as more fully described below.

[0048] In some embodiments, “nucleotide” covers naturally occurring nucleotides as well as non-naturally occurring nucleotides. It should be clear to the person skilled in the art that various nucleotides which previously have been considered “non-naturally occurring” have subsequently been found in nature. Thus, “nucleotides” includes not only the known purine and pyrimidine heterocycles-containing molecules, but also heterocyclic analogues and tautomers thereof. Illustrative examples of other types of nucleotides are molecules containing adenine, guanine, thymine, cytosine, uracil, purine, xanthine, \hat{ }aminopurine, 8-oxo-N6-memyladenine, 7-deazaxanthine, 7-deazaguanine, N4,N4-ethanocytosin, N6,N6-ethano-2,6-diaminopurine, 5-methylcytosine, 5-(C3-C6)-alkynylcytosine, 5-fluorouracil, 5-bromouracil, pseudoisocytosine, 2-hydroxy-5-memyl-4-triazolopvridin, isocytosine, isoguanin, inosine and the “non-naturally occurring” nucleotides described in Benner et al., U.S. Pat. No. 5,432,272. The term “nucleotide” is intended to cover every and all of these examples as well as analogues and tautomers thereof. Especially interesting nucleotides are those containing adenine, guanine, thymine, cytosine, and uracil, which are considered as the naturally occurring nucleotides in relation to therapeutic and diagnostic application in humans. Nucleotides include the natural 2′-deoxy and 2′-hydroxyl sugars, as well as their analogs.

[0049] In some embodiments, “analogs” in reference to nucleotides includes synthetic nucleotides having modified base moieties and/or modified sugar moieties. Such analogs include synthetic nucleotides designed to enhance binding properties, e.g., duplex or triplex stability, specificity, or the like.

[0050] In some embodiments, “hybridization” means the pairing of at least substantially complementary strands of oligomeric compounds. One mechanism of pairing involves hydrogen bonding, which may be Watson-Crick, Hoogsteen or reversed Hoogsteen hydrogen bonding, between complementary nucleoside or nucleotide bases (nucleotides) of the strands of oligomeric compounds. For example, adenine and thymine are complementary nucleotides which pair through the formation of hydrogen bonds. Hybridization can occur under varying circumstances.

[0051] In some embodiments, a compound of the disclosure is “specifically hybridizable” when binding of the compound to the target nucleic acid interferes with the normal function of the target nucleic acid to cause a modulation of function and/or activity, and there is a sufficient degree of complementarity to avoid non-specific binding of the compound to non-target nucleic acid sequences under conditions in which specific binding is desired, i.e., under physiological conditions in the case of in vivo assays or therapeutic treatment, and under conditions in which assays are performed in the case of in vitro assays.

[0052] In some embodiments, “stringent hybridization conditions” or “stringent conditions” refers to conditions under which a compound will hybridize to its target sequence, but to a minimal number of other sequences. Stringent conditions are sequence-dependent and will be different in different circumstances and “stringent conditions” under which oligomeric compounds hybridize to a target sequence are determined by the nature and composition of the oligomeric compounds and the assays in which they are being investigated. In some cases, stringent hybridization conditions comprise low concentrations (<0.15M) of salts with inorganic cations such as Na+ or K+ (i.e., low ionic strength), temperature higher than about 20° C. to 25° C. and below the Tm of the oligomeric compound/target sequence complex, and the presence of denaturants such as formamide, dimethylformamide, dimethyl sulfoxide, or the detergent sodium dodecyl sulfate (SDS). For example, the hybridization rate decreases 1.1% for each 1% formamide. An example of a high stringency hybridization condition is 0.1× sodium chloride-sodium citrate buffer (SSC)/0.1% (w/v) SDS at 60° C. for 30 minutes.

[0053] In some embodiments, “complementary” refers to the capacity for precise pairing between two nucleotides on one or two oligomeric strands. For example, if a nucleobase at a certain position of a compound is capable of hydrogen bonding with a nucleobase at a certain position of a target nucleic acid, said target nucleic acid being a DNA, RNA, or oligonucleotide molecule, then the position of hydrogen bonding between the oligonucleotide and the target nucleic acid may be considered to be a complementary position. The oligomeric compound and the further DNA, RNA, or oligonucleotide molecule are complementary to each other when a sufficient number of complementary positions in each molecule are occupied by nucleotides which can hydrogen bond with each other. Thus, “specifically hybridizable” and “complementary” are terms which may be used to indicate a sufficient degree of precise pairing or complementarity over a sufficient number of nucleotides such that stable and specific binding occurs between the oligomeric compound and a target nucleic acid.

[0054] The sequence of an oligomeric compound need not be 100% complementary to that of its target nucleic acid to be specifically hybridizable. Moreover, an oligonucleotide may hybridize over one or more segments such that intervening or adjacent segments are not involved in the hybridization event (e.g., a loop structure, mismatch or hairpin structure). In some embodiments, oligomeric compounds disclosed herein comprise at least about 70%, or at least about 75%, or at least about 80%, or at least about 85%, or at least about 90%, or at least about 95%, or at least about 99% sequence complementarity to a target region within the target nucleic acid sequence to which they are targeted. For example, a compound in which 18 of 20 nucleotides of the compound are complementary to a target region, and would therefore specifically hybridize, would represent 90 percent complementarity. In this example, the remaining noncomplementary nucleotides may be clustered or interspersed with complementary nucleotides and need not be contiguous to each other or to complementary nucleotides. As such, a compound which is 18 nucleotides in length having 4 (four) noncomplementary nucleotides which are flanked by two regions of complete complementarity with the target nucleic acid would have 77.8% overall complementarity with the target nucleic acid and would thus fall within the scope of the present disclosure. Percent complementarity of a compound with a region of a target nucleic acid can be determined routinely using BLAST programs (basic local alignment search tools) and PowerBLAST programs known in the art. Percent homology, sequence identity or complementarity, can be determined by, for example, the Gap program (Wisconsin Sequence Analysis Package, Version 8 for Unix, Genetics Computer Group, University Research Park, Madison Wis.), using default settings, which uses the algorithm of Smith and Waterman.

[0055] In some embodiments, the term “Thermal Melting Point (Tm)” refers to the temperature, under defined ionic strength, pH, and nucleic acid concentration, at which 50% of the oligonucleotides complementary to the target sequence hybridize to the target sequence at equilibrium. Typically, stringent conditions will be those in which the salt concentration is at least about 0.01 to 1.0 M Na ion concentration (or other salts) at pH 7.0 to 8.3 and the temperature is at least about 30° C. for short oligonucleotides (e.g., 10 to 50 nucleotide). Stringent conditions may also be achieved with the addition of destabilizing agents such as formamide.

[0056] In some embodiments, “modulation” means either an increase (stimulation) or a decrease (inhibition) in the expression of a gene.

[0057] In some embodiments, the term “variant”, when used in the context of a polynucleotide sequence, may encompass a polynucleotide sequence related to a wild type gene. This definition may also include, for example, “allelic,” “splice,” “species,” or “polymorphic” variants. A splice variant may have significant identity to a reference molecule, but will generally have a greater or lesser number of polynucleotides due to alternate splicing of exons during mRNA processing. The corresponding polypeptide may possess additional functional domains or an absence of domains. Species variants are polynucleotide sequences that vary from one species to another. Of particular utility are variants of wild type gene products. Variants may result from at least one mutation in the nucleic acid sequence and may result in altered mRNAs or in polypeptides whose structure or function may or may not be altered. Any given natural or recombinant gene may have none, one, or many allelic forms. Common mutational changes that give rise to variants are generally ascribed to natural deletions, additions, or substitutions of nucleotides. Each of these types of changes may occur alone, or in combination with the others, one or more times in a given sequence.

[0058] The resulting polypeptides generally will have significant amino acid identity relative to each other. A polymorphic variant is a variation in the polynucleotide sequence of a particular gene between individuals of a given species. Polymorphic variants also may encompass “single nucleotide polymorphisms” (SNPs,) or single base mutations in which the polynucleotide sequence varies by one base. The presence of SNPs may be indicative of, for example, a certain population with a propensity for a disease state, that is susceptibility versus resistance.

[0059] Derivative polynucleotides include nucleic acids subjected to chemical modification, for example, replacement of hydrogen by an alkyl, acyl, or amino group. Derivatives, e.g., derivative oligonucleotides, may comprise non-naturally-occurring portions, such as altered sugar moieties or inter-sugar linkages. Exemplary among these are phosphorothioate and other sulfur containing species which are known in the art. Derivative nucleic acids may also contain labels, including radionucleotides, enzymes, fluorescent agents, chemiluminescent agents, chromogenic agents, substrates, co factors, inhibitors, magnetic particles, and the like.

[0060] The term “C_{x-y}” or “Cₓ-C_{y}” when used in conjunction with a chemical moiety, such as alkyl, alkenyl, or alkynyl is meant to include groups that contain from x to y carbons in the chain. For example, the term “C₁₋₆alkyl” refers to substituted or unsubstituted saturated hydrocarbon groups, including straight-chain alkyl and branched-chain alkyl groups that contain from 1 to 6 carbons.

[0061] The terms “C_{x-y}alkenyl” and “C_{x-y}alkynyl” refer to substituted or unsubstituted unsaturated aliphatic groups analogous in length and possible substitution to the alkyls described above, but that contain at least one double or triple bond, respectively.

[0062] The term “carbocycle” as used herein refers to a saturated, unsaturated or aromatic ring in which each atom of the ring is carbon. Carbocycle includes 3- to 10-membered monocyclic rings, 5- to 12-membered bicyclic rings, 5- to 12-membered spiro bicycles, and 5- to 12-membered bridged rings. Each ring of a bicyclic carbocycle may be selected from saturated, unsaturated, and aromatic rings. In an exemplary embodiment, an aromatic ring, e.g., phenyl, may be fused to a saturated or unsaturated ring, e.g., cyclohexane, cyclopentane, or cyclohexene. A bicyclic carbocycle includes any combination of saturated, unsaturated and aromatic bicyclic rings, as valence permits. A bicyclic carbocycle further includes spiro bicyclic rings such as spiropentane. A bicyclic carbocycle includes any combination of ring sizes such as 3-3 spiro ring systems, 4-4 spiro ring systems, 4-5 fused ring systems, 5-5 fused ring systems, 5-6 fused ring systems, 6-6 fused ring systems, 5-7 fused ring systems, 6-7 fused ring systems, 5-8 fused ring systems, and 6-8 fused ring systems. Exemplary carbocycles include cyclopentyl, cyclohexyl, cyclohexenyl, adamantyl, phenyl, indanyl, naphthyl, and bicyclo[1.1.1]pentanyl.

[0063] The term “aryl” refers to an aromatic monocyclic or aromatic multicyclic hydrocarbon ring system. The aromatic monocyclic or aromatic multicyclic hydrocarbon ring system contains only hydrogen and carbon and from five to eighteen carbon atoms, where at least one of the rings in the ring system is aromatic, i.e., it contains a cyclic, delocalized (4n+2) π-electron system in accordance with the Hückel theory. The ring system from which aryl groups are derived include, but are not limited to, groups such as benzene, fluorene, indane, indene, tetralin and naphthalene.

[0064] The term “cycloalkyl” refers to a saturated ring in which each atom of the ring is carbon. Cycloalkyl may include monocyclic and polycyclic rings such as 3- to 10-membered monocyclic rings, 5- to 12-membered bicyclic rings, 5- to 12-membered spiro bicycles, and 5- to 12-membered bridged rings. In certain embodiments, a cycloalkyl comprises three to ten carbon atoms. In other embodiments, a cycloalkyl comprises five to seven carbon atoms. The cycloalkyl may be attached to the rest of the molecule by a single bond. Examples of monocyclic cycloalkyls include, e.g., cyclopropyl, cyclobutyl, cyclopentyl, cyclohexyl, cycloheptyl, and cyclooctyl. Polycyclic cycloalkyl radicals include, for example, adamantyl, spiropentane, norbornyl (i.e., bicyclo[2.2.1]heptanyl), decalinyl, 7,7 dimethyl bicyclo[2.2.1]heptanyl, bicyclo[1.1.1]pentanyl, and the like.

[0065] The term “cycloalkenyl” refers to a saturated ring in which each atom of the ring is carbon and there is at least one double bond between two ring carbons. Cycloalkenyl may include monocyclic and polycyclic rings such as 3- to 10-membered monocyclic rings, 6- to 12-membered bicyclic rings, and 5- to 12-membered bridged rings. In other embodiments, a cycloalkenyl comprises five to seven carbon atoms. The cycloalkenyl may be attached to the rest of the molecule by a single bond. Examples of monocyclic cycloalkenyls include, e.g., cyclopentenyl, cyclohexenyl, cycloheptenyl, and cyclooctenyl.

[0066] The term “halo” or, alternatively, “halogen” or “halide,” means fluoro, chloro, bromo or iodo. In some embodiments, halo is fluoro, chloro, or bromo.

[0067] The term “haloalkyl” refers to an alkyl radical, as defined above, that is substituted by one or more halo radicals, for example, trifluoromethyl, dichloromethyl, bromomethyl, 2,2,2-trifluoroethyl, 1-chloromethyl-2-fluoroethyl, and the like. In some embodiments, the alkyl part of the haloalkyl radical is optionally further substituted as described herein.

[0068] The term “heterocycle” as used herein refers to a saturated, unsaturated or aromatic ring comprising one or more heteroatoms. Exemplary heteroatoms include N, O, Si, P, B, and S atoms. Heterocycles include 3- to 10-membered monocyclic rings, 6- to 12-membered bicyclic rings, 5- to 12-membered spiro bicycles, and 5- to 12-membered bridged rings. A bicyclic heterocycle includes any combination of saturated, unsaturated and aromatic bicyclic rings, as valence permits. In an exemplary embodiment, an aromatic ring, e.g., pyridyl, may be fused to a saturated or unsaturated ring, e.g., cyclohexane, cyclopentane, morpholine, piperidine or cyclohexene. A bicyclic heterocycle includes any combination of ring sizes such as 4-5 fused ring systems, 5-5 fused ring systems, 5-6 fused ring systems, 6-6 fused ring systems, 5-7 fused ring systems, 6-7 fused ring systems, 5-8 fused ring systems, and 6-8 fused ring systems. A bicyclic heterocycle further includes spiro bicyclic rings, e.g., 5 to 12-membered spiro bicycles, such as 2-oxa-6-azaspiro[3.3]heptane.

[0069] The term “heteroaryl” refers to a radical derived from a 5 to 18 membered aromatic ring radical that comprises two to seventeen carbon atoms and from one to six heteroatoms selected from nitrogen, oxygen and sulfur. As used herein, the heteroaryl radical is a monocyclic, bicyclic, tricyclic or tetracyclic ring system, wherein at least one of the rings in the ring system is aromatic, i.e., it contains a cyclic, delocalized (4n+2) π-electron system in accordance with the Hückel theory. Heteroaryl includes fused or bridged ring systems. The heteroatom(s) in the heteroaryl radical is optionally oxidized. One or more nitrogen atoms, if present, are optionally quaternized. The heteroaryl is attached to the rest of the molecule through any atom of the ring(s). Examples of heteroaryls include, but are not limited to, azepinyl, acridinyl, benzimidazolyl, benzindolyl, 1,3-benzodioxolyl, benzofuranyl, benzoxazolyl, benzo[d]thiazolyl, benzothiadiazolyl, benzo[b][1,4]dioxepinyl, benzo[b][1,4]oxazinyl, 1,4-benzodioxanyl, benzonaphthofuranyl, benzoxazolyl, benzodioxolyl, benzodioxinyl, benzopyranyl, benzopyranonyl, benzofuranyl, benzofuranonyl, benzothienyl (benzothiophenyl), benzothieno[3,2-d]pyrimidinyl, benzotriazolyl, benzo[4,6]imidazo[1,2-a]pyridinyl, carbazolyl, cinnolinyl, cyclopenta[d]pyrimidinyl, 6,7-dihydro-5H-cyclopenta[4,5]thieno[2,3-d]pyrimidinyl, 5,6-dihydrobenzo[h]quinazolinyl, 5,6-dihydrobenzo[h]cinnolinyl, 6,7-dihydro-5H-benzo[6,7]cyclohepta[1,2-c]pyridazinyl, dibenzofuranyl, dibenzothiophenyl, furanyl, furanonyl, furo[3,2-c]pyridinyl, 5,6,7,8,9,10-hexahydrocycloocta[d]pyrimidinyl, 5,6,7,8,9,10-hexahydrocycloocta[d]pyridazinyl, 5,6,7,8,9,10-hexahydrocycloocta[d]pyridinyl, isothiazolyl, imidazolyl, indazolyl, indolyl, indazolyl, isoindolyl, indolinyl, isoindolinyl, isoquinolyl, indolizinyl, isoxazolyl, 5,8-methano-5,6,7,8-tetrahydroquinazolinyl, naphthyridinyl, 1,6-naphthyridinonyl, oxadiazolyl, 2-oxoazepinyl, oxazolyl, oxiranyl, 5,6,6a,7,8,9,10,10a-octahydrobenzo[h]quinazolinyl, 1-phenyl-1H-pyrrolyl, phenazinyl, phenothiazinyl, phenoxazinyl, phthalazinyl, pteridinyl, purinyl, pyrrolyl, pyrazolyl, pyrazolo[3,4-d]pyrimidinyl, pyridinyl, pyrido[3,2-d]pyrimidinyl, pyrido[3,4-d]pyrimidinyl, pyrazinyl, pyrimidinyl, pyridazinyl, pyrrolyl, quinazolinyl, quinoxalinyl, quinolinyl, isoquinolinyl, tetrahydroquinolinyl, 5,6,7,8-tetrahydroquinazolinyl, 5,6,7,8-tetrahydrobenzo[4,5]thieno[2,3-d]pyrimidinyl, 6,7,8,9-tetrahydro-5H-cyclohepta[4,5]thieno[2,3-d]pyrimidinyl, 5,6,7,8-tetrahydropyrido[4,5-c]pyridazinyl, thiazolyl, thiadiazolyl, triazolyl, tetrazolyl, triazinyl, thieno[2,3-d]pyrimidinyl, thieno[3,2-d]pyrimidinyl, thieno[2,3-c]pyridinyl, and thiophenyl (i.e. thienyl).

[0070] The term “heterocycloalkyl” refers to a saturated ring with carbon atoms and at least one heteroatom. Exemplary heteroatoms include N, O, Si, P, B, and S atoms. Heterocycloalkyl may include monocyclic and polycyclic rings such as 3- to 10-membered monocyclic rings, 6- to 12-membered bicyclic rings, 5- to 12-membered spiro bicycles, and 5- to 12-membered bridged rings. The heteroatoms in the heterocycloalkyl radical are optionally oxidized. One or more nitrogen atoms, if present, are optionally quaternized. The heterocycloalkyl is attached to the rest of the molecule through any atom of the heterocycloalkyl, valence permitting, such as any carbon or nitrogen atoms of the heterocycloalkyl. Examples of heterocycloalkyl radicals include, but are not limited to, dioxolanyl, thienyl[1,3]dithianyl, decahydroisoquinolyl, imidazolinyl, imidazolidinyl, isothiazolidinyl, isoxazolidinyl, morpholinyl, octahydroindolyl, octahydroisoindolyl, 2-oxopiperazinyl, 2-oxopiperidinyl, 2-oxopyrrolidinyl, oxazolidinyl, piperidinyl, piperazinyl, 4-piperidonyl, pyrrolidinyl, pyrazolidinyl, quinuclidinyl, thiazolidinyl, tetrahydrofuryl, trithianyl, tetrahydropyranyl, thiomorpholinyl, thiamorpholinyl, 1-oxo-thiomorpholinyl, 2-oxa-6-azaspiro[3.3]heptane, and 1,1-dioxo-thiomorpholinyl.

[0071] The term “heterocycloalkenyl” refers to an unsaturated ring with carbon atoms and at least one heteroatom and there is at least one double bond between two ring carbons. Heterocycloalkenyl does not include heteroaryl rings. Exemplary heteroatoms include N, O, Si, P, B, and S atoms. Heterocycloalkenyl may include monocyclic and polycyclic rings such as 3- to 10-membered monocyclic rings, 6- to 12-membered bicyclic rings, and 5- to 12-membered bridged rings. In other embodiments, a heterocycloalkenyl comprises five to seven ring atoms. The heterocycloalkenyl may be attached to the rest of the molecule by a single bond. Examples of monocyclic cycloalkenyls include, e.g., pyrroline (dihydropyrrole), pyrazoline (dihydropyrazole), imidazoline (dihydroimidazole), triazoline (dihydrotriazole), dihydrofuran, dihydrothiophene, oxazoline (dihydrooxazole), isoxazoline (dihydroisoxazole), thiazoline (dihydrothiazole), isothiazoline (dihydroisothiazole), oxadiazoline (dihydrooxadiazole), thiadiazoline (dihydrothiadiazole), dihydropyridine, tetrahydropyridine, dihydropyridazine, tetrahydropyridazine, dihydropyrimidine, tetrahydropyrimidine, dihydropyrazine, tetrahydropyrazine, pyran, dihydropyran, thiopyran, dihydrothiopyran, dioxine, dihydrodioxine, oxazine, dihydrooxazine, thiazine, and dihydrothiazine.

[0072] The term “substituted” refers to moieties having substituents replacing a hydrogen on one or more carbons or substitutable heteroatoms, e.g., an NH or NH₂ of a compound. It will be understood that “substitution” or “substituted with” includes the implicit proviso that such substitution is in accordance with permitted valence of the substituted atom and the substituent, and that the substitution results in a stable compound, i.e., a compound which does not spontaneously undergo transformation such as by rearrangement, cyclization, elimination, etc. In certain embodiments, substituted refers to moieties having substituents replacing two hydrogen atoms on the same carbon atom, such as substituting the two hydrogen atoms on a single carbon with an oxo, imino or thioxo group. As used herein, the term “substituted” is contemplated to include all permissible substituents of organic compounds. In a broad aspect, the permissible substituents include acyclic and cyclic, branched and unbranched, carbocyclic and heterocyclic, aromatic and non-aromatic substituents of organic compounds. The permissible substituents can be one or more and the same or different for appropriate organic compounds.

[0073] In some embodiments, substituents may include any substituents described herein, for example: halogen, hydroxy, oxo (═O), thioxo (═S), cyano (—CN), nitro (—NO₂), imino (═N—H), oximo (═N—OH), hydrazino (═N—NH₂), —R^{b}—OR^{a}, —R^{b}—OC(O)—R^{a}, —R^{b}—OC(O)—OR^{a}, —R^{b}—OC(O)—N(R^{a})₂, —R^{b}—N(R^{a})₂, —R^{b}—C(O)R^{a}, —R^{b}—C(O)OR^{a}, —R^{b}—C(O)N(R^{a})₂, —R^{b}—O—R^{c}—C(O)N(R^{a})₂, —R^{b}—N(R^{a})C(O)OR^{a}, —R^{b}—N(R^{a})C(O)R^{a}, —R^{b}—N(R^{a})S(O)ₜR^{a} (where t is 1 or 2), —R^{b}—S(O)ₜR^{a} (where t is 1 or 2), —R^{b}—S(O)ₜOR^{a} (where t is 1 or 2), and —R^{b}—S(O)ₜN(R^{a})₂ (where t is 1 or 2); and alkyl, alkenyl, alkynyl, aryl, aralkyl, aralkenyl, aralkynyl, cycloalkyl, cycloalkylalkyl, heterocycloalkyl, heterocycloalkylalkyl, heteroaryl, and heteroarylalkyl, any of which may be optionally substituted by alkyl, alkenyl, alkynyl, halogen, haloalkyl, haloalkenyl, haloalkynyl, oxo (═O), thioxo (═S), cyano (—CN), nitro (—NO₂), imino (═N—H), oximo (═N—OH), hydrazine (═N—NH₂), —R^{b}—OR^{a}, —R^{b}—OC(O)—R^{a}, —R^{b}—OC(O)—OR^{a}, —R^{b}—OC(O)—N(R^{a})₂, —R^{b}—N(R^{a})₂, —R^{b}—C(O)R^{a}, —R^{b}—C(O)OR^{a}, —R^{b}—C(O)N(R^{a})₂, —R^{b}—O—R^{c}—C(O)N(R^{a})₂, —R^{b}—N(R^{a})C(O)OR^{a}, —R^{b}—N(R^{a})C(O)R^{a}, —R^{b}—N(R^{a})S(O)ₜR^{a} (where t is 1 or 2), —R^{b}—S(O)ₜR^{a} (where t is 1 or 2), —R^{b}—S(O)ₜOR^{a} (where t is 1 or 2) and —R^{b}—S(O)ₜN(R^{a})₂ (where t is 1 or 2); wherein each R^{a} is independently selected from hydrogen, alkyl, cycloalkyl, cycloalkylalkyl, aryl, aralkyl, heterocycloalkyl, heterocycloalkylalkyl, heteroaryl, or heteroarylalkyl, wherein each R^{a}, valence permitting, may be optionally substituted with alkyl, alkenyl, alkynyl, halogen, haloalkyl, haloalkenyl, haloalkynyl, oxo (═O), thioxo (═S), cyano (—CN), nitro (—NO₂), imino (═N—H), oximo (═N—OH), hydrazine (═N—NH₂), —R^{b}—OR^{a}, —R^{b}—OC(O)—R^{a}, —R^{b}—OC(O)—OR^{a}, —R^{b}—OC(O)—N(R^{a})₂, —R^{b}—N(R^{a})₂, —R^{b}—C(O)R^{a}, —R^{b}—C(O)OR^{a}, —R^{b}—C(O)N(R^{a})₂, —R^{b}—O—R^{c}—C(O)N(R^{a})₂, —R^{b}—N(R^{a})C(O)OR^{a}, —R^{b}—N(R^{a})C(O)R^{a}, —R^{b}—N(R^{a})S(O)ₜR^{a} (where t is 1 or 2), —R^{b}—S(O)ₜR^{a} (where t is 1 or 2), —R^{b}—S(O)ₜOR^{a} (where t is 1 or 2) and —R^{b}—S(O)ₜN(R^{a})₂ (where t is 1 or 2); and wherein each R^{b} is independently selected from a direct bond or a straight or branched alkylene, alkenylene, or alkynylene chain, and each R^{c} is a straight or branched alkylene, alkenylene or alkynylene chain.

[0074] Double bonds to oxygen atoms, such as oxo groups, are represented herein as both “═O” and “(O)”. Double bonds to nitrogen atoms are represented as both “═NR” and “(NR)”. Double bonds to sulfur atoms are represented as both “═S” and “(S)”.

[0075] In some embodiments, a “derivative” polypeptide or peptide is one that is modified, for example, by glycosylation, pegylation, phosphorylation, sulfation, reduction/alkylation, acylation, chemical coupling, or mild formalin treatment. A derivative may also be modified to contain a detectable label, either directly or indirectly, including, but not limited to, a radioisotope, fluorescent, and enzyme label.

[0076] As used herein, the term “animal” or “patient” is meant to include, for example, humans, sheep, elks, deer, mule deer, minks, mammals, monkeys, horses, cattle, pigs, goats, dogs, cats, rats, mice, birds, chickens, reptiles, fish, insects and arachnids.

[0077] “Mammal” covers warm blooded mammals that are typically under medical care (e.g., humans and domesticated animals). Examples include feline, canine, equine, bovine, or primate, or just human.

[0078] “Treating” or “treatment” includes the treatment of a disease-state in a mammal, and includes: (a) preventing the disease-state from occurring in a mammal, in particular, when such mammal is predisposed to the disease-state but has not yet been diagnosed as having it; (b) inhibiting the disease-state, e.g., arresting it development; and/or (c) relieving the disease-state, e.g., causing regression of the disease state until a desired endpoint is reached. Treating also includes the amelioration of a symptom of a disease (e.g., lessen pain or discomfort), wherein such amelioration may or may not be directly affecting the disease (e.g., cause, transmission, expression, etc.). The term “treatment” is intended to encompass also prophylaxis, therapy and cure. The patient receiving this treatment is any animal in need, including primates, in particular humans, and other mammals such as equines, cattle, swine and sheep; and poultry and pets in general.

[0079] All genes, gene names, and gene products disclosed herein are intended to correspond to homologs from any species for which the compositions and methods disclosed herein are applicable. Thus, the terms include, but are not limited to genes and gene products from humans and mice. It is understood that when a gene or gene product from a particular species is disclosed, this disclosure is intended to be exemplary only, and is not to be interpreted as a limitation unless the context in which it appears clearly indicates. Thus, for example, for the genes disclosed herein, which in some embodiments relate to mammalian nucleic acid and amino acid sequences are intended to encompass homologous and/or orthologous genes and gene products from other animals including, but not limited to other mammals, fish, amphibians, reptiles, and birds. In some embodiments, the genes or nucleic acid sequences are human.

[0080] In some embodiments, the term “halo” refers to any radical of fluorine, chlorine, bromine or iodine. In some embodiments, the term “alkyl” refers to saturated and unsaturated non-aromatic hydrocarbon chains that may be a straight chain or branched chain, containing the indicated number of carbon atoms (these include without limitation propyl, allyl, or propargyl), which may be optionally inserted with N, O, or S. For example, C₁-C₁₀ indicates that the group may have from 1 to 10 (inclusive) carbon atoms in it. The term “alkoxy” refers to an —O-alkyl radical. In some embodiments, the term “alkylene” refers to a divalent alkyl (i.e., —R—). The term “alkylenedioxo” refers to a divalent species of the structure -0-R-0-, in which R represents an alkylene. The term “aminoalkyl” refers to an alkyl substituted with an amino. In some embodiments, the term “mercapto” refers to an —SH radical. The term “thioalkoxy” refers to an —S-alkyl radical.

[0081] In some embodiments, the term “aryl” refers to a 6-carbon monocyclic or 10-carbon bicyclic aromatic ring system wherein 0, 1, 2, 3, or 4 atoms of each ring may be substituted by a substituent. Examples of aryl groups include phenyl, naphthyl and the like. In some embodiments, the term “arylalkyl” or the term “aralkyl” refers to alkyl substituted with an aryl. In some embodiments, the term “arylalkoxy” refers to an alkoxy substituted with aryl.

[0082] In some embodiments, the term “cycloalkyl” as employed herein includes saturated and partially unsaturated cyclic hydrocarbon groups having 3 to 12 carbons, for example, 3 to 8 carbons, and, for example, 3 to 6 carbons, wherein the cycloalkyl group additionally may be optionally substituted. Cycloalkyl groups include, without limitation, cyclopropyl, cyclobutyl, cyclopentyl, cyclopentenyl, cyclohexyl, cyclohexenyl, cycloheptyl, and cyclooctyl.

[0083] In some embodiments, the term “heteroaryl” refers to an aromatic 5-8 membered monocyclic, 8-12 membered bicyclic, or 1 1-14 membered tricyclic ring system having 1-3 heteroatoms if monocyclic, 1-6 heteroatoms if bicyclic, or 1-9 heteroatoms if tricyclic, said heteroatoms selected from O, N, or S (e.g., carbon atoms and 1-3, 1-6, or 1-9 heteroatoms of N, O, or S if monocyclic, bicyclic, or tricyclic, respectively), wherein 0, 1, 2, 3, or 4 atoms of each ring may be substituted by a substituent. Examples of heteroaryl groups include pyridyl, furyl or furanyl, imidazolyl, benzimidazolyl, pyrimidinyl, thiophenyl or thienyl, quinolinyl, indolyl, thiazolyl, and the like. In some embodiments, the term “heteroarylalkyl” or the term “heteroaralkyl” refers to an alkyl substituted with a heteroaryl. In some embodiments, the term “heteroarylalkoxy” refers to an alkoxy substituted with heteroaryl.

[0084] In some embodiments, the term “heterocyclyl” refers to a nonaromatic 5-8 membered monocyclic, 8-12 membered bicyclic, or 11-14 membered tricyclic ring system having 1-3 heteroatoms if monocyclic, 1-6 heteroatoms if bicyclic, or 1-9 heteroatoms if tricyclic, said heteroatoms selected from O, N, or S (e.g., carbon atoms and 1-3, 1-6, or 1-9 heteroatoms of N, O, or S if monocyclic, bicyclic, or tricyclic, respectively), wherein 0, 1, 2 or 3 atoms of each ring may be substituted by a substituent. Examples of heterocyclyl groups include trizolyl, tetrazolyl, piperazinyl, pyrrolidinyl, dioxanyl, morpholinyl, tetrahydrofuranyl, and the like.

[0085] In some embodiments, the term “oxo” refers to an oxygen atom, which forms a carbonyl when attached to carbon, an N-oxide when attached to nitrogen, and a sulfoxide or sulfone when attached to sulfur.

[0086] In some embodiments, the term “acyl” refers to an alkylcarbonyl, cycloalkylcarbonyl, arylcarbonyl, heterocyclylcarbonyl, or heteroarylcarbonyl substituent, any of which may be further substituted by substituents.

[0087] In some embodiments, the term “substituted” refers to the replacement of one or more hydrogen radicals in a given structure with the radical of a specified substituent including, but not limited to: halo, alkyl, alkenyl, alkynyl, aryl, heterocyclyl, thiol, alkylthio, arylthio, alkylthioalkyl, arylthioalkyl, alkylsulfonyl, alkylsulfonylalkyl, arylsulfonylalkyl, alkoxy, aryloxy, aralkoxy, aminocarbonyl, alkylamino carbonyl, arylaminocarbonyl, alkoxycarbonyl, aryloxycarbonyl, haloalkyl, amino, trifluoromethyl, cyano, nitro, alkylamino, arylamino, alkylaminoalkyl, arylaminoalkyl, aminoalkylamino, hydroxy, alkoxyalkyl, carboxyalkyl, alkoxycarbonylalkyl, aminocarbonylalkyl, acyl, aralkoxycarbonyl, carboxylic acid, sulfonic acid, sulfonyl, phosphonic acid, aryl, heteroaryl, heterocyclic, and aliphatic. It is understood that the substituent can be further substituted.

[0088] Some embodiments refer to nucleic acid sequence information. In some embodiments, any uracil (U) may be interchanged with any thymine (T), and vice versa. For example, in an siRNA with a nucleic acid sequence comprising one or more Us, in some embodiments any of the Us may be replaced with Ts. Similarly, in an siRNA with a nucleic acid sequence comprising one or more Ts, in some embodiments any of the Ts may be replaced with Us. In some embodiments, an oligonucleotide such as an siRNA disclosed herein comprises or consists of RNA. In some embodiments, the oligonucleotide may comprise or consist of DNA. To any extent that the sequence listing contradicts the disclosure in the specification, the specification takes precedent.

[0089] Some embodiments refer to a particular nucleic acid sequence comprising modified nucleic acids. In some embodiments, an oligonucleotide described herein comprises or consists of a nucleic acid sequence comprising an unmodified version of the nucleic acid sequence comprising modified nucleic acids. In some embodiments, an oligonucleotide described herein comprises or consists of a nucleic acid sequence comprising the nucleic acid sequence comprising modified nucleic acids, but with any one or more additional modifications or different modifications.

### Oligonucleotide Compounds and Compositions

[0090] In some embodiments, provided herein are oligonucleotide compounds that target a nucleic acid sequence of angiopoietin-like 7 (ANGPTL7), including, without limitation, sense and/or antisense noncoding and/or coding sequences associated with ANGPTL7. In some embodiments, the target nucleic acid molecule is not limited to ANGPTL7 polynucleotides alone but extends to any of the isoforms, receptors, homologs, non-coding regions and the like of ANGPTL7.

[0091] In some embodiments, provided is a composition comprising one or more dsRNA agents targeted to a first nucleic acid and one or more additional compounds targeted to a second nucleic acid target. For example, the first target may be a particular sequence of angiopoietin-like 7 (ANGPTL7), and the second target may be a region from another nucleotide sequence. In some embodiments, compositions may contain two or more dsRNA compounds targeted to different regions of the same ANGPTL7 nucleic acid target. Numerous examples of dsRNA compounds are illustrated herein, and others may be selected from among suitable compounds known in the art. Two or more combined compounds may be used together or sequentially.

[0092] In some embodiments, a composition is provided that includes a plurality of dsRNA agent species. In some embodiments, the dsRNA agent species has sequences that are non-overlapping and non-adjacent to another species with respect to a naturally occurring target sequence. In some embodiments, the plurality of dsRNA agent species is specific for different naturally occurring target genes. In some embodiments, the dsRNA agent is allele specific.

[0093] The disclosure provides methods, compositions, and kits, for administration and delivery of dsRNA agents described herein.

### Compositions

[0094] Disclosed herein, in some embodiments, are compositions comprising an oligonucleotide. In some embodiments, the composition comprises an oligonucleotide that targets ANGPTL7. In some embodiments, the composition consists of an oligonucleotide that targets ANGPTL7. In some embodiments, a composition described herein is used in a method of treating a disorder in a subject in need thereof. Some embodiments relate to a composition comprising an oligonucleotide for use in a method of treating a disorder as described herein. Some embodiments relate to use of a composition comprising an oligonucleotide, in a method of treating a disorder as described herein. The composition (e.g. oligonucleotide composition) may comprise or consist of a dsRNA agent described herein. The composition (e.g. oligonucleotide composition) may comprise or consist of an siRNA described herein.

[0095] In some embodiments, the composition comprises an oligonucleotide that targets ANGPTL7 and when administered to a subject in an effective amount decreases ANGPTL7 mRNA levels in a cell or tissue. In some embodiments, the cell is an ANGPTL7. In some embodiments, the tissue is ANGPTL7 tissue. In some embodiments, the ANGPTL7 mRNA levels are decreased by about 2.5% or more, about 5% or more, or about 7.5% or more, as compared to prior to administration. In some embodiments, the ANGPTL7 mRNA levels are decreased by about 10% or more, as compared to prior to administration. In some embodiments, the ANGPTL7 mRNA levels are decreased by about 20% or more, about 30% or more, about 40% or more, about 50% or more, about 60% or more, about 70% or more, about 80% or more, about 90% or more, or about 100% or more as compared to prior to administration. In some embodiments, the ANGPTL7 mRNA levels are decreased by about 200% or more, about 300% or more, about 400% or more, about 500% or more, about 600% or more, about 700% or more, about 800% or more, about 900% or more, or about 1000% or more, as compared to prior to administration. In some embodiments, the ANGPTL7 mRNA levels are decreased by no more than about 2.5%, no more than about 5%, or no more than about 7.5%, as compared to prior to administration. In some embodiments, the ANGPTL7 mRNA levels are decreased by no more than about 10%, as compared to prior to administration. In some embodiments, the ANGPTL7 mRNA levels are decreased by no more than about 20%, no more than about 30%, no more than about 40%, no more than about 50%, no more than about 60%, no more than about 70%, no more than about 80%, no more than about 90%, or no more than about 100% as compared to prior to administration. In some embodiments, the ANGPTL7 mRNA levels are decreased by no more than about 200%, no more than about 300%, no more than about 400%, no more than about 500%, no more than about 600%, no more than about 700%, no more than about 800%, no more than about 900%, or no more than about 1000%, as compared to prior to administration. In some embodiments, the ANGPTL7 mRNA levels are decreased by 2.5%, 5%, 7.5%, 10%, 20%, 30%, 40%, 50%, 60%, 70%, 80%, 90%, 100%, 200% 300%, 400%, 500%, 600%, 700%, 800%, 900%, 1000%, or by a range defined by any of the two aforementioned percentages.

[0096] In some embodiments, the composition comprises an oligonucleotide that targets ANGPTL7 and when administered to a subject in an effective amount decreases circulating ANGPTL7 protein levels. In some embodiments, the ANGPTL7 protein levels are decreased by about 2.5% or more, about 5% or more, or about 7.5% or more, as compared to prior to administration. In some embodiments, the ANGPTL7 protein levels are decreased by about 10% or more, as compared to prior to administration. In some embodiments, the ANGPTL7 protein levels are decreased by about 20% or more, about 30% or more, about 40% or more, about 50% or more, about 60% or more, about 70% or more, about 80% or more, about 90% or more, or about 100% or more as compared to prior to administration. In some embodiments, the ANGPTL7 protein levels are decreased by about 200% or more, about 300% or more, about 400% or more, about 500% or more, about 600% or more, about 700% or more, about 800% or more, about 900% or more, or about 1000% or more, as compared to prior to administration. In some embodiments, the ANGPTL7 protein levels are decreased by no more than about 2.5%, no more than about 5%, or no more than about 7.5%, as compared to prior to administration. In some embodiments, the ANGPTL7 protein levels are decreased by no more than about 10%, as compared to prior to administration. In some embodiments, the ANGPTL7 protein levels are decreased by no more than about 20%, no more than about 30%, no more than about 40%, no more than about 50%, no more than about 60%, no more than about 70%, no more than about 80%, no more than about 90%, or no more than about 100% as compared to prior to administration. In some embodiments, the ANGPTL7 protein levels are decreased by no more than about 200%, no more than about 300%, no more than about 400%, no more than about 500%, no more than about 600%, no more than about 700%, no more than about 800%, no more than about 900%, or no more than about 1000%, as compared to prior to administration. In some embodiments, the ANGPTL7 protein levels are decreased by 2.5%, 5%, 7.5%, 10%, 20%, 30%, 40%, 50%, 60%, 70%, 80%, 90%, 100%, 200% 300%, 400%, 500%, 600%, 700%, 800%, 900%, 1000%, or by a range defined by any of the two aforementioned percentages.

[0097] In some embodiments, the composition comprises an oligonucleotide that targets ANGPTL7 and when administered to a subject in an effective amount decreases a symptom of glaucoma. In some embodiments, the glaucoma symptom is decreased by about 2.5% or more, about 5% or more, or about 7.5% or more, as compared to prior to administration. In some embodiments, the glaucoma symptom is decreased by about 10% or more, as compared to prior to administration. In some embodiments, the glaucoma symptom is decreased by about 20% or more, about 30% or more, about 40% or more, about 50% or more, about 60% or more, about 70% or more, about 80% or more, about 90% or more, or about 100% or more as compared to prior to administration. In some embodiments, the glaucoma symptom is decreased by no more than about 2.5%, no more than about 5%, or no more than about 7.5%, as compared to prior to administration. In some embodiments, the glaucoma symptom is decreased by no more than about 10%, as compared to prior to administration. In some embodiments, the glaucoma symptom is decreased by no more than about 20%, no more than about 30%, no more than about 40%, no more than about 50%, no more than about 60%, no more than about 70%, no more than about 80%, no more than about 90%, or no more than about 100% as compared to prior to administration. In some embodiments, the glaucoma symptom is decreased by 2.5%, 5%, 7.5%, 10%, 20%, 30%, 40%, 50%, 60%, 70%, 80%, 90%, or 100%, or by a range defined by any of the two aforementioned percentages. In some embodiments, the glaucoma symptom is incidence of glaucoma, or of a glaucoma subtype. In some embodiments, the glaucoma symptom is severity of glaucoma, or of a glaucoma subtype. Examples of glaucoma subtypes include non-specific glaucoma, primary open angle glaucoma (POAG), and primary angle closure glaucoma (PACG).

[0098] In some embodiments, the composition comprises an oligonucleotide that targets ANGPTL7 and when administered to a subject in an effective amount decreases intraocular pressure. In some embodiments, the intraocular pressure is decreased by about 2.5% or more, about 5% or more, or about 7.5% or more, as compared to prior to administration. In some embodiments, the intraocular pressure is decreased by about 10% or more, as compared to prior to administration. In some embodiments, the intraocular pressure is decreased by about 20% or more, about 30% or more, about 40% or more, about 50% or more, about 60% or more, about 70% or more, about 80% or more, about 90% or more, or about 100% or more as compared to prior to administration. In some embodiments, the intraocular pressure is decreased by no more than about 2.5%, no more than about 5%, or no more than about 7.5%, as compared to prior to administration. In some embodiments, the intraocular pressure is decreased by no more than about 10%, as compared to prior to administration. In some embodiments, the intraocular pressure is decreased by no more than about 20%, no more than about 30%, no more than about 40%, no more than about 50%, no more than about 60%, no more than about 70%, no more than about 80%, no more than about 90%, or no more than about 100% as compared to prior to administration. In some embodiments, the intraocular pressure is decreased by 2.5%, 5%, 7.5%, 10%, 20%, 30%, 40%, 50%, 60%, 70%, 80%, 90%, or 100%, or by a range defined by any of the two aforementioned percentages.

### Modification Patterns

[0099] In some embodiments, the composition comprises an oligonucleotide that inhibits the expression of ANGPTL7, wherein the oligonucleotide comprises a modification comprising a modified nucleoside and/or a modified internucleoside linkage, and/or (ii) the composition comprises a pharmaceutically acceptable carrier. In some embodiments, the oligonucleotide comprises a modification comprising a modified nucleoside and/or a modified internucleoside linkage. In some embodiments, the oligonucleotide comprises a modified internucleoside linkage. In some embodiments, the modified internucleoside linkage comprises alkylphosphonate, phosphorothioate, methylphosphonate, phosphorodithioate, alkylphosphonothioate, phosphoramidate, carbamate, carbonate, phosphate triester, acetamidate, or carboxymethyl ester, or a combination thereof. In some embodiments, the modified internucleoside linkage comprises one or more phosphorothioate linkages. Benefits of the modified internucleoside linkage may include decreased toxicity or improved pharmacokinetics. The composition (e.g. oligonucleotide composition) may comprise or consist of a dsRNA agent described herein. The composition (e.g. oligonucleotide composition) may comprise or consist of an siRNA described herein.

[0100] In some embodiments, the composition comprises an oligonucleotide that inhibits the expression of ANGPTL7, wherein the oligonucleotide comprises a modified internucleoside linkage, wherein the oligonucleotide comprises 1, 2, 3, 4, 5, 6, 7, 8, 9, 10, 11, 12, 13, 14, 15, 16, 17, 18, 19, or 20 modified internucleoside linkages, or a range of modified internucleoside linkages defined by any two of the aforementioned numbers. In some embodiments, the oligonucleotide comprises no more than 18 modified internucleoside linkages. In some embodiments, the oligonucleotide comprises no more than 20 modified internucleoside linkages. In some embodiments, the oligonucleotide comprises 2 or more modified internucleoside linkages, 3 or more modified internucleoside linkages, 4 or more modified internucleoside linkages, 5 or more modified internucleoside linkages, 6 or more modified internucleoside linkages, 7 or more modified internucleoside linkages, 8 or more modified internucleoside linkages, 9 or more modified internucleoside linkages, 10 or more modified internucleoside linkages, 11 or more modified internucleoside linkages, 12 or more modified internucleoside linkages, 13 or more modified internucleoside linkages, 14 or more modified internucleoside linkages, 15 or more modified internucleoside linkages, 16 or more modified internucleoside linkages, 17 or more modified internucleoside linkages, 18 or more modified internucleoside linkages, 19 or more modified internucleoside linkages, or 20 or more modified internucleoside linkages.

[0101] In some embodiments, the composition comprises an oligonucleotide that inhibits the expression of ANGPTL7, wherein the oligonucleotide comprises the modified nucleoside. In some embodiments, the modified nucleoside comprises a locked nucleic acid (LNA), hexitol nucleic acid (HLA), cyclohexene nucleic acid (CeNA), 2′-methoxyethyl, 2′-O-alkyl, 2′-O-allyl, 2′-fluoro, or 2′-deoxy, or a combination thereof. In some embodiments, the modified nucleoside comprises a LNA. In some embodiments, the modified nucleoside comprises a 2′,4′ constrained ethyl nucleic acid. In some embodiments, the modified nucleoside comprises HLA. In some embodiments, the modified nucleoside comprises CeNA. In some embodiments, the modified nucleoside comprises a 2′-methoxyethyl group. In some embodiments, the modified nucleoside comprises a 2′-O-alkyl group. In some embodiments, the modified nucleoside comprises a 2′-O-allyl group. In some embodiments, the modified nucleoside comprises a 2′-fluoro group. In some embodiments, the modified nucleoside comprises a 2′-deoxy group. In some embodiments, the modified nucleoside comprises a 2′-O-methyl nucleoside, 2′-deoxyfluoro nucleoside, 2′-O—N-methylacetamido (2′-O—NMA) nucleoside, a 2′-O-dimethylaminoethoxyethyl (2′-O-DMAEOE) nucleoside, 2′-O-aminopropyl (2′-O-AP) nucleoside, or 2′-ara-F, or a combination thereof. In some embodiments, the modified nucleoside comprises a 2′-O-methyl nucleoside. In some embodiments, the modified nucleoside comprises a 2′-deoxyfluoro nucleoside. In some embodiments, the modified nucleoside comprises a 2′-O—NMA nucleoside. In some embodiments, the modified nucleoside comprises a 2′-O-DMAEOE nucleoside. In some embodiments, the modified nucleoside comprises a 2′-O-aminopropyl (2′-O-AP) nucleoside. In some embodiments, the modified nucleoside comprises 2′-ara-F. In some embodiments, the modified nucleoside comprises one or more 2′-fluoro modified nucleosides. In some embodiments, the modified nucleoside comprises a 2′-O-alkyl modified nucleoside. Benefits of the modified nucleoside may include decreased toxicity or improved pharmacokinetics.

[0102] In some embodiments, the oligonucleotide comprises 1, 2, 3, 4, 5, 6, 7, 8, 9, 10, 11, 12, 13, 14, 15, 16, 17, 18, 19, 20, or 21 modified nucleosides, or a range of nucleosides defined by any two of the aforementioned numbers. In some embodiments, the oligonucleotide comprises no more than 19 modified nucleosides. In some embodiments, the oligonucleotide comprises no more than 21 modified nucleosides. In some embodiments, the oligonucleotide comprises 2 or more modified nucleosides, 3 or more modified nucleosides, 4 or more modified nucleosides, 5 or more modified nucleosides, 6 or more modified nucleosides, 7 or more modified nucleosides, 8 or more modified nucleosides, 9 or more modified nucleosides, 10 or more modified nucleosides, 11 or more modified nucleosides, 12 or more modified nucleosides, 13 or more modified nucleosides, 14 or more modified nucleosides, 15 or more modified nucleosides, 16 or more modified nucleosides, 17 or more modified nucleosides, 18 or more modified nucleosides, 19 or more modified nucleosides, 20 or more modified nucleosides, or 21 or more modified nucleosides.

[0103] In some embodiments, the composition comprises an oligonucleotide that inhibits the expression of ANGPTL7, wherein the oligonucleotide comprises a moiety attached at a 3′ or 5′ terminus of the oligonucleotide. For example, the moiety may be attached at a 3′ end of an siRNA sense strand, a 3′ end of an siRNA antisense strand, a 3′ end of an ASO, a 5′ end of an siRNA sense strand, a 5′ end of an siRNA antisense strand, or a 5′ end of an ASO. An example of an attachment at a 3′ end includes attachment at a 3′ position of a sugar such as a ribose. In some embodiments, the moiety is attached at a 2′ position of a sugar (e.g. ribose). The moiety may include cholesterol. The moiety may include tetraethyleneglycol. The moiety may include cholesterol-tetraethyleneglycol (CholTEG).

[0104] In some embodiments, the moiety includes a negatively charged group attached at a 5′ end of the oligonucleotide. This may be referred to as a 5′-end group. In some embodiments, the negatively charged group is attached at a 5′ end of an antisense strand of an siRNA disclosed herein. The 5′-end group may be or include a 5′-end phosphorothioate, 5′-end phosphorodithioate, 5′-end vinylphosphonate (5′-VP), 5′-end methylphosphonate, 5′-end cyclopropyl phosphonate, or a 5′-deoxy-5′-C-malonyl. The 5′-end group may comprise 5′-VP. In some embodiments, the 5′-VP comprises a trans-vinylphosphate or cis-vinylphosphate. The 5′-end group may include an extra 5′ phosphate. A combination of 5′-end groups may be used.

[0105] In some embodiments, a hydrophobic moiety is attached to the oligonucleotide (e.g. a sense strand and/or an antisense strand of a siRNA). In some embodiments, a hydrophobic moiety is attached at a 3′ terminus of the oligonucleotide. In some embodiments, a hydrophobic moiety is attached at a 5′ terminus of the oligonucleotide. In some embodiments, the hydrophobic moiety comprises cholesterol. In some embodiments, the hydrophobic moiety includes a cyclohexanyl.

[0106] In some embodiments, the composition comprises an oligonucleotide that inhibits the expression of ANGPTL7, wherein the oligonucleotide comprises a lipid attached at a 3′ or 5′ terminus of the oligonucleotide. In some embodiments, a lipid is attached at a 3′ terminus of the oligonucleotide. In some embodiments, a lipid is attached at a 5′ terminus of the oligonucleotide. In some embodiments, the lipid comprises cholesterol, myristoyl, palmitoyl, stearoyl, lithocholoyl, docosanoyl, docosahexaenoyl, myristyl, palmityl stearyl, or α-tocopherol, or a combination thereof. In some embodiments, the lipid comprises stearyl, lithocholyl, docosanyl, docosahexaenyl, or myristyl. In some embodiments, the lipid comprises cholesterol. In some embodiments, the lipid includes a sterol such as cholesterol. In some embodiments, the lipid comprises stearyl, t-butylphenol, n-butylphenol, octylphenol, dodecylphenol, phenyl n-dodecyl, octadecylbenzamide, hexadecylbenzamide, or octadecylcyclohexyl. In some embodiments, the lipid comprises phenyl para C12.

[0107] In some embodiments, the oligonucleotide comprises any aspect of the following structure:

[chemical structure]

In some embodiments, the oligonucleotide comprises any aspect of the following structure:

[chemical structure]

In some embodiments, the oligonucleotide comprises any aspect of the following structure:

[chemical structure]

In some embodiments, the oligonucleotide comprises any aspect of the following structure:

[chemical structure]

The aspect included in the oligonucleotide may include the entire structure, or may include the lipid moiety, of any of the structures shown. In some embodiments, n is 1-3. In some embodiments, n is 1. In some embodiments, n is 2. In some embodiments, n is 3. In some embodiments, R is an alkyl group. In some embodiments, the alkyl group contains 1, 2, 3, 4, 5, 6, 7, 8, 9, 10, 11, 12, 13, 14, 15, 16, 17, 18, 19, or 20 carbons. In some embodiments, the alkyl group contains 4, 5, 6, 7, 8, 9, 10, 11, 12, 13, 14, 15, 16, 17, or 18 carbons, or a range defined by any two of the aforementioned numbers of carbons. In some embodiments, the alkyl group contains 4-18 carbons. In some embodiments, the alkyl group contains 11 carbons. In some embodiments, the alkyl group contains 12 carbons. In some embodiments, the alkyl group contains 13 carbons. In some embodiments, the alkyl group contains 14 carbons. In some embodiments, the alkyl group contains 15 carbons. In some embodiments, the alkyl group contains 16 carbons. In some embodiments, the alkyl group contains 17 carbons. In some embodiments, the alkyl group contains 18 carbons. In some embodiments, R is not an octane (C₈). In some embodiments, R includes a branched carbon chain. In some embodiments, R includes an unbranched carbon chain. In some embodiments, the lipid moiety comprises an alcohol or ether. In some embodiments, the lipid moiety has at least one degree of unsaturation. In some embodiments, the lipid moiety is an omega fatty acid, such as an omega-3, omega-5, omega-6, omega-7, or omega-9 fatty acid.

[0108] In some embodiments, the lipid includes a fatty acid. In some embodiments, the lipid comprises a lipid depicted in Table 1. The example lipid moieties in Table 1 are shown attached at a 5′ end of an oligonucleotide, in which the 5′ terminal phosphate of the oligonucleotide is shown with the lipid moiety. In some embodiments, a lipid moiety in Table 1 may be attached at a different point of attachment than shown. For example, the point of attachment of any of the lipid moieties in the table may be at a 3′ oligonucleotide end. In some embodiments, the lipid is used for targeting the oligonucleotide to a non-hepatic cell or tissue.

TABLE 1
Hydrophobic moiety examples

| Hydrophobic | Hydrophobic | |
|---|---|---|
| Moiety Description | Moiety Name | Example Conjugation |
| stearyl | ETL3 | [chemical structure] |
| t-butylphenyl | ETL7 | [chemical structure] |
| n-butylphenyl | ETL8 | [chemical structure] |
| octylphenyl | ETL9 | [chemical structure] |
| dodecylphenyl | ETL10 | [chemical structure] |
| phenyl n-dodecyl | ETL12 | [chemical structure] |
| octadecylbenzamide | ETL13 | [chemical structure] |
| hexadecylbenzamide | ETL15 | [chemical structure] |
| octadecylcyclohexyl | ETL16 | [chemical structure] |
| myristamido methylphenyl | ETL18 | [chemical structure] |
| lauramido methylphenyl | ETL19 | [chemical structure] |
| palmitoamidoethyl- | ETL20 | |
| phenyl | | |

[0109] In some embodiments, the lipid or lipid moiety includes 16 to 18 carbons. In some embodiments, the lipid includes 16 carbons. In some embodiments, the lipid includes 17 carbons. In some embodiments, the lipid includes 18 carbons. In some embodiments, the lipid moiety includes 16 carbons. In some embodiments, the lipid moiety includes 17 carbons. In some embodiments, the lipid moiety includes 18 carbons. In some embodiments, the lipid moiety includes 19 carbons. In some embodiments, the lipid moiety includes 20 carbons.

[0110] The hydrophobic moiety may include a linker that comprises a carbocycle. The carbocycle may be six-membered. Some examples of a carbocycle include phenyl or cyclohexyl. The linker may include a phenyl. The linker may include a cyclohexyl. The lipid may be attached to the carbocycle, which may in turn be attached at a phosphate (e.g. 5′ or 3′ phosphate) of the oligonucleotide. In some embodiments, the lipid or hydrocarbon, and the end of the sense are connected to the phenyl or cyclohexyl linker in the 1,4; 1,3; or 1,2 substitution pattern (e.g. the para, meta, or ortho phenyl configuration). In some embodiments, the lipid or hydrocarbon, and the end of the sense are connected to the phenyl or cyclohexyl linker in the 1,4 substitution pattern (e.g. the para phenyl configuration). The lipid may be attached to the carbocycle in the 1,4 substitution pattern relative to the oligonucleotide. The lipid may be attached to the carbocycle in the 1,3 substitution pattern relative to the oligonucleotide. The lipid may be attached to the carbocycle in the 1,2 substitution pattern relative to the oligonucleotide. The lipid may be attached to the carbocycle in the ortho orientation relative to the oligonucleotide. The lipid may be attached to the carbocycle in the para orientation relative to the oligonucleotide. The lipid may be attached to the carbocycle in the meta orientation relative to the oligonucleotide.

[0111] The lipid moiety may comprise or consist of the following structure

[chemical structure]

In some embodiments, the lipid moiety comprises or consists of the following structure:

[chemical structure]

In some embodiments, the lipid moiety comprises the following structure:

[chemical structure]

In some embodiments, the lipid moiety comprises or consist of the following structure:

[chemical structure]

In some embodiments, the dotted line indicates a covalent connection. The covalent connection may between an end of the sense or antisense strand. For example, the connection may be to the 5′ end of the sense strand. In some embodiments, n is 0-3. In some embodiments, n is 1-3. In some embodiments, n is 0. In some embodiments, n is 1. In some embodiments, n is 2. In some embodiments, n is 3. In some embodiments, n is 4. In some embodiments, n is 5. In some embodiments, n is 1, 2, 3, 4, 5, 6, 7, 8, 9, or 10. In some embodiments, R includes a branched carbon chain. In some embodiments, R includes an unbranched carbon chain. In some embodiments, R is an alkyl group. In some embodiments, the alkyl group contains 1, 2, 3, 4, 5, 6, 7, 8, 9, 10, 11, 12, 13, 14, 15, 16, 17, 18, 19, or 20 carbons. In some embodiments, the alkyl group contains 4, 5, 6, 7, 8, 9, 10, 11, 12, 13, 14, 15, 16, 17, or 18 carbons, or a range defined by any two of the aforementioned numbers of carbons. In some embodiments, the alkyl group contains 11 carbons. In some embodiments, the alkyl group contains 12 carbons. In some embodiments, the alkyl group contains 13 carbons. In some embodiments, the alkyl group contains 14 carbons. In some embodiments, the alkyl group contains 15 carbons. In some embodiments, the alkyl group contains 16 carbons. In some embodiments, the alkyl group contains 17 carbons. In some embodiments, the alkyl group contains 18 carbons. In some embodiments, R comprises or consists of an alkyl group containing 4-18 carbons. In some embodiments, the lipid moiety is not a phenyloctyl group. In some embodiments, R is not octane. In some embodiments, R is a carbon chain containing 4-7 or 9-18 carbons. In some embodiments, the lipid moiety is not a phenyloctyl group.

[0112] In some embodiments, the 5′ hydrophobic moiety comprises any one of the following structures:

[chemical structure]

wherein the dotted line indicates a covalent connection to the end of the 5′ end of the sense strand, n is 1-3, and R is an alkyl group containing 4-18 carbons. In some embodiments, R is not an octane. In some embodiments, the alkyl group contains 4-7 or 9-18 carbons. In some embodiments, the alkyl group contains 14 carbons. In some embodiments, the alkyl group contains 15 carbons. In some embodiments, the alkyl group contains 16 carbons. In some embodiments, the alkyl group contains 17 carbons. In some embodiments, the alkyl group contains 18 carbons. In some embodiments, the 5′ hydrophobic moiety comprises a hydrophobic moiety in Table 1. In some embodiments, the 5′ hydrophobic moiety comprises phenyl para C12. In some embodiments, n is 1, 2, 3, 4, 5, 6, 7, 8, 9, 10, 11, 12, 13, or 14. In some embodiments, n is 0-3. In some embodiments, n is 1-3. In some embodiments, n is 1. In some embodiments n is 2. In some embodiments, the hydrophobic moiety comprises an alcohol or an ether. In some embodiments, R is an unsaturated alkyl group. In some embodiments, the unsaturated alkyl group may be monounsaturated. In some embodiments, the unsaturated alkyl group may be unsaturated at the omega-3, position, omega-4 position, omega-5 position, omega-6 position, omega-7 position, omega-8 position, omega-9 position, or a combination thereof. In some embodiments, the 5′ hydrophobic moiety is not a phenyloctyl group.

[0113] The hydrophobic moiety may include a linker that comprises a carbocycle. The carbocycle may be six-membered. Some examples of a carbocycle include phenyl or cyclohexyl. The linker may include a phenyl. The linker may include a cyclohexyl. The lipid may be attached to the carbocycle, which may in turn be attached at a phosphate (e.g. 5′ or 3′ phosphate) of the oligonucleotide. In some embodiments, the lipid or hydrocarbon, and the end of the sense are connected to the phenyl or cyclohexyl linker in the 1,4; 1,3; or 1,2 substitution pattern (e.g. the para, meta, or ortho phenyl configuration). In some embodiments, the lipid or hydrocarbon, and the end of the sense are connected to the phenyl or cyclohexyl linker in the 1,4 substitution pattern (e.g. the para phenyl configuration). The lipid may be attached to the carbocycle in the ortho orientation relative to the oligonucleotide. The lipid may be attached to the carbocycle in the para orientation relative to the oligonucleotide. The lipid may be attached to the carbocycle in the meta orientation relative to the oligonucleotide. The lipid may be attached to the carbocycle in the in the 1,4 orientation relative to the oligonucleotide. The lipid may be attached to the carbocycle in the in the 1,3 orientation relative to the oligonucleotide. The lipid may be attached to the carbocycle in the in the 1,2 orientation relative to the oligonucleotide.

[0114] The lipid moiety may be attached at a 5′ end of the oligonucleotide. The 5′ end may have one phosphate linking the lipid moiety to a 5′ carbon of a sugar of the oligonucleotide. The 5′ end may have two phosphates linking the lipid moiety to a 5′ carbon of a sugar of the oligonucleotide. The 5′ end may have three phosphates linking the lipid moiety to a 5′ carbon of a sugar of the oligonucleotide. The 5′ end may have one phosphate connected to the 5′ carbon of a sugar of the oligonucleotide, where the one phosphate is connected to the lipid moiety. The 5′ end may have two phosphates connected to the 5′ carbon of a sugar of the oligonucleotide, where the one of the two phosphates is connected to the lipid moiety. The 5′ end may have three phosphates connected to the 5′ carbon of a sugar of the oligonucleotide, where the one of the three phosphates is connected to the lipid moiety. The sugar may include a ribose. The sugar may include a deoxyribose. The sugar may be modified a such as a 2′ modified sugar (e.g. a 2′ O-methyl or 2′ fluoro ribose). A phosphate of the 5′ end may include a modification such as a sulfur in place of an oxygen. Two phosphates of the 5′ end may include a modification such as a sulfur in place of an oxygen. Three phosphates of the 5′ end may include a modification such as a sulfur in place of an oxygen.

[0115] In some embodiments, the oligonucleotide includes 1 lipid moiety. In some embodiments, the oligonucleotide includes 2 lipid moieties. In some embodiments, the oligonucleotide includes 3 lipid moieties. In some embodiments, the oligonucleotide includes 4 lipid moieties.

[0116] Some embodiments relate to a method of making an oligonucleotide comprising a hydrophobic conjugate. A strategy for making hydrophobic conjugates may include use of a phosphoramidite reagent based upon a 6-membered ring alcohol such as a phenol or cyclohexanol. The phosphoramidite may be reacted to a nucleotide to connect the nucleotide to the hydrophobic moiety, and thereby produce the hydrophobic conjugate. Some examples of phosphoramidite reagents that may be used to produce a hydrophobic conjugate are provided as follows:

[chemical structure]

In embodiments, R is an alkyl group. In some embodiments, the alkyl group contains 1, 2, 3, 4, 5, 6, 7, 8, 9, 10, 11, 12, 13, 14, 15, 16, 17, 18, 19, or 20 carbons. In some embodiments, the alkyl group contains 4, 5, 6, 7, 8, 9, 10, 11, 12, 13, 14, 15, 16, 17, or 18 carbons, or a range defined by any two of the aforementioned numbers of carbons. In some embodiments, R comprises or consists of an alkyl group containing 4-18 carbons. Any one of the phosphoramidite reagents may be reacted to a 5′ end of an oligonucleotide to produce an oligonucleotide comprising a hydrophobic moiety. In some embodiments, the phosphoramidite reagents is reacted to a 5′ end of a sense strand of an siRNA. The sense strand may then be hybridized to an antisense strand to form a duplex. The hybridization may be performed by incubating the sense and antisense strands in solution at a given temperature. The temperature may be gradually reduced. The temperature may comprise or include a temperature comprising an annealing temperature for the sense and antisense strands. The temperature may be below or include a temperature below the annealing temperature for the sense and antisense strands. The temperature may be below a melting temperature of the sense and antisense strands.

[0117] The lipid may be attached to the oligonucleotide by a linker. The linker may include a polyethyleneglycol (e.g. tetraethyleneglycol).

[0118] In some embodiments, the oligonucleotide includes a negatively charged group. The negatively charged group may aid in cell or tissue penetration. The negatively charged group may be attached at a 5′ or 3′ end (e.g. a 5′ end) of the oligonucleotide. This may be referred to as an end group. The end group may be or include a phosphorothioate, phosphorodithioate, vinylphosphonate, methylphosphonate, cyclopropyl phosphonate, or a deoxy-C-malonyl. The end group may include an extra 5′ phosphate such as an extra 5′ phosphate. A combination of end groups may be used.

[0119] In some embodiments, the oligonucleotide includes a phosphate mimic. In some embodiments, the phosphate mimic comprises vinyl phosphonate. In some embodiments, the vinyl phosphonate comprises a trans-vinylphosphate. In some embodiments, the vinyl phosphonate comprises a cis-vinylphosphate. An example of a nucleotide that includes a vinyl phosphonate is shown below.

[chemical structure]

[0120] In some embodiments, the vinyl phosphonate increases the stability of the oligonucleotide. In some embodiments, the vinyl phosphonate increases the accumulation of the oligonucleotide in tissues. In some embodiments, the vinyl phosphonate protects the oligonucleotide from an exonuclease or a phosphatase. In some embodiments, the vinyl phosphonate improves the binding affinity of the oligonucleotide with the siRNA processing machinery.

[0121] In some embodiments, the oligonucleotide includes 1 vinyl phosphonate. In some embodiments, the oligonucleotide includes 2 vinyl phosphonates. In some embodiments, the oligonucleotide includes 3 vinyl phosphonates. In some embodiments, the oligonucleotide includes 4 vinyl phosphonates. In some embodiments, the antisense strand of the oligonucleotide comprises a vinyl phosphonate at the 5′ end. In some embodiments, the antisense strand of the oligonucleotide comprises a vinyl phosphonate at the 3′ end. In some embodiments, the sense strand of the oligonucleotide comprises a vinyl phosphonate at the 5′ end. In some embodiments, the sense strand of the oligonucleotide comprises a vinyl phosphonate at the 3′ end.

[0122] In some embodiments, the composition comprises an arginine-glycine-aspartic acid (RGD) peptide. In some embodiments, the RGD peptide is attached at a 3′ terminus of the oligonucleotide. In some embodiments, the RGD peptide is attached at a 5′ terminus of the oligonucleotide. In some embodiments, the composition comprises a sense strand, and the RGD peptide is attached to the sense strand (e.g. attached to a 5′ end of the sense strand, or attached to a 3′ end of the sense strand). In some embodiments, the composition comprises an antisense strand, and the RGD peptide is attached to the antisense strand (e.g. attached to a 5′ end of the antisense strand, or attached to a 3′ end of the antisense strand). In some embodiments, the composition comprises an RGD peptide attached at a 3′ or 5′ terminus of the oligonucleotide. In some embodiments, the oligonucleotide comprises an RGD peptide and a lipid attached at a 3′ or 5′ terminus of the oligonucleotide. The RGD peptide may be attached to the oligonucleotide by a linker. The linker may include a polyethyleneglycol. In some embodiments, the RGD peptide comprises Cyclo(-Arg-Gly-Asp-D-Phe-Cys). In some embodiments, the RGD peptide comprises Cyclo(-Arg-Gly-Asp-D-Phe-Lys). In some embodiments, the RGD peptide comprises Cyclo(-Arg-Gly-Asp-D-Phe-azido). In some embodiments, the RGD peptide comprises an amino benzoic acid derived RGD. In some embodiments, the RGD peptide comprises Cyclo(-Arg-Gly-Asp-D-Phe-Cys), Cyclo(-Arg-Gly-Asp-D-Phe-Lys), Cyclo(-Arg-Gly-Asp-D-Phe-azido), an amino benzoic acid derived RGD, or a combination thereof. In some embodiments, the RGD peptide comprises multiple of such RGD peptides. For example, the RGD peptide may include 2, 3, or 4 RGD peptides.

[0123] In some embodiments, a modification or modification pattern disclosed herein includes a cholesterol moiety.

[0124] In some embodiments, the oligonucleotide comprises a dsRNA agent described herein. In some embodiments, the oligonucleotide comprises an siRNA described herein. In some embodiments, one or more nucleotides in the sense and/or antisense strand of a dsRNA agent, or siRNA, is modified in accordance with any of the modifications or modification patterns described herein.

[0125] The oligonucleotide may include purines. Examples of purines include adenine (A) or guanine (G), or modified versions thereof. The oligonucleotide may include pyrimidines. Examples of pyrimidines include cytosine (C), thymine (T), or uracil (U), or modified versions thereof.

[0126] In some embodiments, purines of the oligonucleotide comprise 2′-fluoro modified purines. In some embodiments, purines of the oligonucleotide comprise 2′-O-methyl modified purines. In some embodiments, purines of the oligonucleotide comprise a mixture of 2′-fluoro and 2′-O-methyl modified purines. In some embodiments, all purines of the oligonucleotide comprise 2′-fluoro modified purines. In some embodiments, all purines of the oligonucleotide comprise 2′-O-methyl modified purines. In some embodiments, all purines of the oligonucleotide comprise a mixture of 2′-fluoro and 2′-O-methyl modified purines.

[0127] In some embodiments, pyrimidines of the oligonucleotide comprise 2′-fluoro modified pyrimidines. In some embodiments, pyrimidines of the oligonucleotide comprise 2′-O-methyl modified pyrimidines. In some embodiments, pyrimidines of the oligonucleotide comprise a mixture of 2′-fluoro and 2′-O-methyl modified pyrimidines. In some embodiments, all pyrimidines of the oligonucleotide comprise 2′-fluoro modified pyrimidines. In some embodiments, all pyrimidines of the oligonucleotide comprise 2′-O-methyl modified pyrimidines. In some embodiments, all pyrimidines of the oligonucleotide comprise a mixture of 2′-fluoro and 2′-O-methyl modified pyrimidines.

[0128] In some embodiments, purines of the oligonucleotide comprise 2′-fluoro modified purines, and pyrimidines of the oligonucleotide comprise a mixture of 2′-fluoro and 2′-O-methyl modified pyrimidines. In some embodiments, purines of the oligonucleotide comprise 2′-O-methyl modified purines, and pyrimidines of the oligonucleotide comprise a mixture of 2′-fluoro and 2′-O-methyl modified pyrimidines. In some embodiments, purines of the oligonucleotide comprise 2′-fluoro modified purines, and pyrimidines of the oligonucleotide comprise 2′-O-methyl modified pyrimidines. In some embodiments, purines of the oligonucleotide comprise 2′-O-methyl modified purines, and pyrimidines of the oligonucleotide comprise 2′-fluoro modified pyrimidines. In some embodiments, pyrimidines of the oligonucleotide comprise 2′-fluoro modified pyrimidines, and purines of the oligonucleotide comprise a mixture of 2′-fluoro and 2′-O-methyl modified purines. In some embodiments, pyrimidines of the oligonucleotide comprise 2′-O-methyl modified pyrimidines, and purines of the oligonucleotide comprise a mixture of 2′-fluoro and 2′-O-methyl modified purines. In some embodiments, pyrimidines of the oligonucleotide comprise 2′-fluoro modified pyrimidines, and purines of the oligonucleotide comprise 2′-O-methyl modified purines. In some embodiments, pyrimidines of the oligonucleotide comprise 2′-O-methyl modified pyrimidines, and purines of the oligonucleotide comprise 2′-fluoro modified purines.

[0129] In some embodiments, all purines of the oligonucleotide comprise 2′-fluoro modified purines, and all pyrimidines of the oligonucleotide comprise a mixture of 2′-fluoro and 2′-O-methyl modified pyrimidines. In some embodiments, all purines of the oligonucleotide comprise 2′-O-methyl modified purines, and all pyrimidines of the oligonucleotide comprise a mixture of 2′-fluoro and 2′-O-methyl modified pyrimidines. In some embodiments, all purines of the oligonucleotide comprise 2′-fluoro modified purines, and all pyrimidines of the oligonucleotide comprise 2′-O-methyl modified pyrimidines. In some embodiments, all purines of the oligonucleotide comprise 2′-O-methyl modified purines, and all pyrimidines of the oligonucleotide comprise 2′-fluoro modified pyrimidines. In some embodiments, all pyrimidines of the oligonucleotide comprise 2′-fluoro modified pyrimidines, and all purines of the oligonucleotide comprise a mixture of 2′-fluoro and 2′-O-methyl modified purines. In some embodiments, all pyrimidines of the oligonucleotide comprise 2′-O-methyl modified pyrimidines, and all purines of the oligonucleotide comprise a mixture of 2′-fluoro and 2′-O-methyl modified purines. In some embodiments, all pyrimidines of the oligonucleotide comprise 2′-fluoro modified pyrimidines, and all purines of the oligonucleotide comprise 2′-O-methyl modified purines. In some embodiments, all pyrimidines of the oligonucleotide comprise 2′-O-methyl modified pyrimidines, and all purines of the oligonucleotide comprise 2′-fluoro modified purines.

[0130] In some embodiments, position nine of the sense strand comprises a 2′ fluoro-modified pyrimidine. In some embodiments, all purines of the sense strand comprise 2′-O-methyl modified purines. In some embodiments, 1, 2, 3, 4, or 5 pyrimidines between positions 5 and 11 comprise a 2′fluoro-modified pyrimidine, provided there are never three 2′ fluoro-modified pyrimidines in a row. In some embodiments, the odd-numbered positions of the antisense strand comprise 2′-O-methyl modified nucleotides. In some embodiments, the even-numbered positions of the antisense strand comprise 2′fluoro-modified nucleotides and unmodified deoxyribonucleotide. In some embodiments, position nine of the sense strand comprises a 2′ fluoro-modified pyrimidine; all purines of the sense strand comprises 2′-O-methyl modified purines; 1, 2, 3, 4, or 5 pyrimidines between positions 5 and 11 comprise a 2′fluoro-modified pyrimidine, provided there are never three 2′ fluoro-modified pyrimidines in a row; the odd-numbered positions of the antisense strand comprise 2′-O-methyl modified nucleotides; and the even-numbered positions of the antisense strand comprise 2′fluoro-modified nucleotides and unmodified deoxyribonucleotides.

[0131] In some embodiments, position nine of the sense strand comprises a 2′ fluoro-modified purine. In some embodiments, all pyrimidines of the sense strand comprise 2′-O-methyl modified purines. In some embodiments, 1, 2, 3, 4, or 5 purines between positions 5 and 11 comprise a 2′fluoro-modified purine, provided there are never three 2′ fluoro-modified purine in a row. In some embodiments, the odd-numbered positions of the antisense strand comprise 2′-O-methyl modified nucleotides. In some embodiments, the even-numbered positions of the antisense strand comprise 2′fluoro-modified nucleotides and unmodified deoxyribonucleotide. In some embodiments, position nine of the sense strand comprises a 2′ fluoro-modified purine; all pyrimidine of the sense strand comprises 2′-O-methyl modified pyrimidines; 1, 2, 3, 4, or 5 purines between positions 5 and 11 comprise a 2′fluoro-modified purines, provided there are never three 2′ fluoro-modified purines in a row; the odd-numbered positions of the antisense strand comprise 2′-O-methyl modified nucleotides; and the even-numbered positions of the antisense strand comprise 2′fluoro-modified nucleotides and unmodified deoxyribonucleotides.

[0132] In some embodiments, position nine of the sense strand comprises an unmodified deoxyribonucleotide. In some embodiments, positions 5, 7, and 8 of the sense strand comprise 2′fluoro-modified nucleotides. In some embodiments, all pyrimidines in positions 10 to 21 of the sense strand comprise 2′-O-methyl modified pyrimidines and all purines in positions 10 to 21 of the comprise 2′-O-methyl modified purines or 2′fluoro-modified purines. In some embodiments, the odd-numbered positions of the antisense strand comprise 2′-O-methyl modified nucleotides. In some embodiments, the even-numbered positions of the antisense strand comprise 2′fluoro-modified nucleotides and unmodified deoxyribonucleotides. In some embodiments, position nine of the sense strand comprises an unmodified deoxyribonucleotide; positions 5, 7, and 8 of the sense strand comprise 2′fluoro-modified nucleotides; all pyrimidines in positions 10 to 21 of the sense strand comprise 2′-O-methyl modified pyrimidines and all purines in positions 10 to 21 of the comprise 2′-O-methyl modified purines or 2′fluoro-modified purines; the odd-numbered positions of the antisense strand comprise 2′-O-methyl modified nucleotides; and the even-numbered positions of the antisense strand comprise 2′fluoro-modified nucleotides and unmodified deoxyribonucleotides.

[0133] In some embodiments, position nine of the sense strand comprises an unmodified deoxyribonucleotide. In some embodiments, positions 5, 7, and 8 of the sense strand comprise 2′fluoro-modified nucleotides. In some embodiments, all purines in positions 10 to 21 of the sense strand comprise 2′-O-methyl modified purines and all pyrimidines in positions 10 to 21 of the comprise 2′-O-methyl modified pyrimidines or 2′fluoro-modified pyrimidines. In some embodiments, the odd-numbered positions of the antisense strand comprise 2′-O-methyl modified nucleotides. In some embodiments, the even-numbered positions of the antisense strand comprise 2′fluoro-modified nucleotides and unmodified deoxyribonucleotides. In some embodiments, position nine of the sense strand comprises an unmodified deoxyribonucleotide; positions 5, 7, and 8 of the sense strand comprise 2′fluoro-modified nucleotides; all purines in positions 10 to 21 of the sense strand comprise 2′-O-methyl modified purines and all pyrimidines in positions 10 to 21 of the comprise 2′-O-methyl modified pyrimidines or 2′fluoro-modified pyrimidines; the odd-numbered positions of the antisense strand comprise 2′-O-methyl modified nucleotides; and the even-numbered positions of the antisense strand comprise 2′fluoro-modified nucleotides and unmodified deoxyribonucleotides.

dsRNA Agent

[0134] In some embodiments, the composition comprises a double-stranded RNAi (dsRNA) agent. The dsRNA agent may include an RNA duplex. In one aspect, provided herein is a dsRNA agent capable of inhibiting the expression of ANGPTL7. The dsRNA agent may include a sense strand and an antisense strand. In some embodiments, the dsRNA agent comprises a small interfering RNA (siRNA). The siRNA may include an RNA duplex. In one aspect, provided herein is a siRNA capable of inhibiting the expression of ANGPTL7. The siRNA may include a sense strand and an antisense strand.

[0135] In some cases, each strand of the dsRNA agent can range from 12-30 nucleotides in length. For example, each strand can be between 14-30 nucleotides in length, 17-30 nucleotides in length, 25-30 nucleotides in length, 27-30 nucleotides in length, 17-23 nucleotides in length, 17-21 nucleotides in length, 17-19 nucleotides in length, 19-25 nucleotides in length, 19-23 nucleotides in length, 19-21 nucleotides in length, 21-25 nucleotides in length, or 21-23 nucleotides in length.

[0136] The sense strand and antisense strand typically form a duplex dsRNA. The duplex region of a dsRNA agent may be 12-30 nucleotide pairs in length. For example, the duplex region can be between 14-30 nucleotide pairs in length, 17-30 nucleotide pairs in length, 25-30 nucleotides in length, 27-30 nucleotide pairs in length, 17-23 nucleotide pairs in length, 17-21 nucleotide pairs in length, 17-19 nucleotide pairs in length, 19-25 nucleotide pairs in length, 19-23 nucleotide pairs in length, 19-21 nucleotide pairs in length, 21-25 nucleotide pairs in length, or 21-23 nucleotide pairs in length. In another example, the duplex region has a length of about 15, 16, 17, 18, 19, 20, 21, 22, 23, 24, 25, 26, and 27.

[0137] In some embodiments, the dsRNA agent comprises one or more overhang regions and/or capping groups at the 3′-end, or 5′-end, or both ends of a strand. In some cases, the overhang is about 1-6 nucleotides in length, for instance 2-6 nucleotides in length, 1-5 nucleotides in length, 2-5 nucleotides in length, 1-4 nucleotides in length, 2-4 nucleotides in length, 1-3 nucleotides in length, 2-3 nucleotides in length, or 1-2 nucleotides in length. The overhang can be the result of one strand being longer than the other, or the result of two strands of the same length being staggered. The overhang can form a mismatch with the target mRNA or it can be complementary to the gene sequences being targeted or can be other sequence. The first and second strands can also be joined, e.g., by additional bases to form a hairpin, or by other non-base linkers.

[0138] Described herein, in some embodiments, are compositions comprising an RNA interference (RNAi) agent. In some embodiments, the RNAi agent is capable of inhibiting or modulating the expression of angiopoietin-like 7 (ANGPTL7). In some embodiments, the RNAi agent comprises a siRNA described herein. In some embodiments, the RNAi agent comprises a double-stranded RNA (dsRNA). In some embodiments, the dsRNA comprises a sense strand and an antisense strand (such as a sense strand and/or an antisense strand described herein). In some embodiments, the antisense strand is complementary to a portion of a nucleic acid having the nucleoside sequence of SEQ ID NO: 11085. In some embodiments, the antisense strand is complementary to a portion of a nucleic acid having the nucleoside sequence of SEQ ID NO: 11086. In some embodiments, each strand has 14 to 30 nucleotides.

[0139] Described herein, in some embodiments, are compositions comprising an RNA interference (RNAi) agent capable of inhibiting or modulating the expression of angiopoietin like 7 (ANGPTL7); wherein the RNAi agent comprises a double-stranded RNA (dsRNA) comprising a sense strand and an antisense strand, the antisense strand being complementary to a portion of a nucleic acid having the nucleoside sequence of SEQ ID NO: 11085, and each strand having 14 to 30 nucleotides.

[0140] Described herein, in some embodiments, are compositions comprising an RNA interference (RNAi) agent capable of inhibiting or modulating the expression of angiopoietin-like 7 (ANGPTL7); wherein the RNAi agent comprises a double-stranded RNA (dsRNA) comprising a sense strand and an antisense strand, the antisense strand being complementary to a portion of a nucleic acid having the nucleoside sequence of SEQ ID NO: 11086, and each strand having 14 to 30 nucleotides.

[0141] In some embodiments, all or part of the antisense strand is complementary to all or part of a nucleic acid having the nucleoside sequence of SEQ ID NO: 1424. In some embodiments, all or part of the antisense strand is complementary to all or part of a nucleic acid having the nucleoside sequence of SEQ ID NO: 1765. In some embodiments, all or part of the antisense strand is complementary to all or part of a nucleic acid having the nucleoside sequence of SEQ ID NO: 1796.

[0142] Described herein, in some embodiments, are compositions comprising an RNA interference (RNAi) agent capable of inhibiting or modulating the expression of angiopoietin like 7 (ANGPTL7); wherein the RNAi agent comprises a double-stranded RNA (dsRNA) comprising a sense strand and an antisense strand, the antisense strand having at least 14, at least 15, at least 16, at least 17, at least 18, or 19 nucleosides complementary to a nucleic acid having the nucleoside sequence of SEQ ID NO: 1424, and each strand having 14 to 30 nucleotides.

[0143] Described herein, in some embodiments, are compositions comprising an RNA interference (RNAi) agent capable of inhibiting or modulating the expression of angiopoietin like 7 (ANGPTL7); wherein the RNAi agent comprises a double-stranded RNA (dsRNA) comprising a sense strand and an antisense strand, the antisense strand having at least 14, at least 15, at least 16, at least 17, at least 18, or 19 nucleosides complementary to a nucleic acid having the nucleoside sequence of SEQ ID NO: 1765, and each strand having 14 to 30 nucleotides.

[0144] Described herein, in some embodiments, are compositions comprising an RNA interference (RNAi) agent capable of inhibiting or modulating the expression of angiopoietin like 7 (ANGPTL7); wherein the RNAi agent comprises a double-stranded RNA (dsRNA) comprising a sense strand and an antisense strand, the antisense strand having at least 14, at least 15, at least 16, at least 17, at least 18, or 19 nucleosides complementary to a nucleic acid having the nucleoside sequence of SEQ ID NO: 1796, and each strand having 14 to 30 nucleotides.

[0145] In some embodiments, the one or more modifications confers nuclease resistance upon the oligonucleotide (e.g. siRNA). In some embodiments, the modification pattern confers nuclease resistance upon the oligonucleotide (e.g. siRNA). For example, modification pattern 1S, 2S, 3S, 4S, 5S, 6S, 7S, 8S, 9S, 10S, 1S, 12S, 13S, 14S, 15S, 16S, 17S, 18S, 19S, 20S, 21S, 22S, 23S, 24S, 25S, 26S, 27S, 28S, 29S, 30S, 31S, 32S, 33S, 34S, 35S, 36S, 37S, 38S, 39S, 40S, 41S, 42S, 43S, 44S, 45S, 46S, 47S, 48S, 49S, 50S, 1AS, 2AS, 3AS, 4AS, 6AS, 7AS, 8AS, 9AS, 10AS, 11AS, or 12AS may confer nuclease resistance.

[0146] In some embodiments, the dsRNA agent comprises a sense strand and an antisense strand. In some cases, the sense strand comprises a sequence at least about 80%, 85%, 90%, 95%, or 100% identical to a sequence selected from SEQ ID NOS: 1-4412. In some cases, the sense strand comprises a sequence at least about 80%, 85%, 90%, 95% or 100% identical to a sequence selected from SEQ ID NOS: 11450-11474. In some embodiments, the sense strand comprises a sequence at least about 80%, 85%, 90%, 95% or 100% identical to an unmodified version of a sequence selected from SEQ ID NOS: 11549-11595 or 11787. In some embodiments, the sense strand comprises a sequence at least about 80%, 85%, 90%, 95% or 100% identical to a sequence selected from SEQ ID NOS: 11643-11676. In some embodiments, the sense strand comprises a sequence at least about 80%, 85%, 90%, 95% or 100% identical to a sequence selected from SEQ ID NOS: 11755-11767. In some cases, the antisense strand comprises a sequence at least about 80%, 85%, 90%, 95%, or 100% identical to the reverse complement of the sense strand. In some cases, the antisense strand comprises a sequence at least about 80%, 85%, 90%, 95%, or 100% identical to a sequence selected from SEQ ID NOS: 1-4412. In some cases, the antisense strand comprises a sequence at least about 80%, 85%, 90%, 95%, or 100% identical to a sequence selected from SEQ ID NOS: 11475-11499. In some embodiments, the antisense strand comprises a base sequence at least about 80%, 85%, 90%, 95% or 100% identical to an unmodified version of sequence selected from SEQ ID NOS: 11596-11642 or 11787. In some embodiments, the antisense strand comprises a sequence at least about 80%, 85%, 90%, 95% or 100% identical to a sequence selected from SEQ ID NOS: 11677-11710. In some embodiments, the antisense strand comprises a sequence at least about 80%, 85%, 90%, 95% or 100% identical to a sequence selected from SEQ ID NOS: 11768-11780.

[0147] In some embodiments, the sense strand comprises a sequence at least 70% identical to a sequence in Table 26B. In some embodiments, the sense strand comprises a sequence at least 75% identical to a sequence in Table 26B. In some embodiments, the sense strand comprises a sequence at least 80% identical to a sequence in Table 26B. In some embodiments, the sense strand comprises a sequence at least 84% identical to a sequence in Table 26B. In some embodiments, the sense strand comprises a sequence at least 85% identical to a sequence in Table 26B. In some embodiments, the sense strand comprises a sequence at least 89% identical to a sequence in Table 26B. In some embodiments, the sense strand comprises a sequence at least 90% identical to a sequence in Table 26B. In some embodiments, the sense strand comprises a sequence at least 91% identical to a sequence in Table 26B. In some embodiments, the sense strand comprises a sequence at least 92% identical to a sequence in Table 26B. In some embodiments, the sense strand comprises a sequence at least 93% identical to a sequence in Table 26B. In some embodiments, the sense strand comprises a sequence at least 94% identical to a sequence in Table 26B. In some embodiments, the sense strand comprises a sequence at least 95% identical to a sequence in Table 26B. In some embodiments, the sense strand comprises a sequence at least 96% identical to a sequence in Table 26B. In some embodiments, the sense strand comprises a sequence at least 97% identical to a sequence in Table 26B. In some embodiments, the sense strand comprises a sequence at least 98% identical to a sequence in Table 26B. In some embodiments, the sense strand comprises a sequence at least 99% identical to a sequence in Table 26B. In some embodiments, the sense strand comprises a sequence less than 70% identical to a sequence in Table 26B. In some embodiments, the sense strand comprises a sequence less than 75% identical to a sequence in Table 26B. In some embodiments, the sense strand comprises a sequence less than 80% identical to a sequence in Table 26B. In some embodiments, the sense strand comprises a sequence less than 84% identical to a sequence in Table 26B. In some embodiments, the sense strand comprises a sequence less than 85% identical to a sequence in Table 26B. In some embodiments, the sense strand comprises a sequence less than 89% identical to a sequence in Table 26B. In some embodiments, the sense strand comprises a sequence less than 90% identical to a sequence in Table 26B. In some embodiments, the sense strand comprises a sequence less than 91% identical to a sequence in Table 26B. In some embodiments, the sense strand comprises a sequence less than 92% identical to a sequence in Table 26B. In some embodiments, the sense strand comprises a sequence less than 93% identical to a sequence in Table 26B. In some embodiments, the sense strand comprises a sequence less than 94% identical to a sequence in Table 26B. In some embodiments, the sense strand comprises a sequence less than 95% identical to a sequence in Table 26B. In some embodiments, the sense strand comprises a sequence less than 96% identical to a sequence in Table 26B. In some embodiments, the sense strand comprises a sequence less than 97% identical to a sequence in Table 26B. In some embodiments, the sense strand comprises a sequence less than 98% identical to a sequence in Table 26B. In some embodiments, the sense strand comprises a sequence less than 99% identical to a sequence in Table 26B. In some embodiments, the sense strand comprises a sequence 100% identical to a sequence in Table 26B. The sense strand may include a 3′ overhang such as a 3′ terminal UU overhang. One or both of the overhanging Us of the sense strand may be linked to the rest of the sense strand by a phosphorothioate linkage.

[0148] In some embodiments, the antisense strand comprises a sequence at least 70% identical to a sequence in Table 26B. In some embodiments, the antisense strand comprises a sequence at least 75% identical to a sequence in Table 26B. In some embodiments, the antisense strand comprises a sequence at least 80% identical to a sequence in Table 26B. In some embodiments, the antisense strand comprises a sequence at least 84% identical to a sequence in Table 26B. In some embodiments, the antisense strand comprises a sequence at least 85% identical to a sequence in Table 26B. In some embodiments, the antisense strand comprises a sequence at least 89% identical to a sequence in Table 26B. In some embodiments, the antisense strand comprises a sequence at least 90% identical to a sequence in Table 26B. In some embodiments, the antisense strand comprises a sequence at least 91% identical to a sequence in Table 26B. In some embodiments, the antisense strand comprises a sequence at least 92% identical to a sequence in Table 26B. In some embodiments, the antisense strand comprises a sequence at least 93% identical to a sequence in Table 26B. In some embodiments, the antisense strand comprises a sequence at least 94% identical to a sequence in Table 26B. In some embodiments, the antisense strand comprises a sequence at least 95% identical to a sequence in Table 26B. In some embodiments, the antisense strand comprises a sequence at least 96% identical to a sequence in Table 26B. In some embodiments, the antisense strand comprises a sequence at least 97% identical to a sequence in Table 26B. In some embodiments, the antisense strand comprises a sequence at least 98% identical to a sequence in Table 26B. In some embodiments, the antisense strand comprises a sequence at least 99% identical to a sequence in Table 26B. In some embodiments, the antisense strand comprises a sequence less than 70% identical to a sequence in Table 26B. In some embodiments, the antisense strand comprises a sequence less than 75% identical to a sequence in Table 26B. In some embodiments, the antisense strand comprises a sequence less than 80% identical to a sequence in Table 26B. In some embodiments, the antisense strand comprises a sequence less than 84% identical to a sequence in Table 26B. In some embodiments, the antisense strand comprises a sequence less than 85% identical to a sequence in Table 26B. In some embodiments, the antisense strand comprises a sequence less than 89% identical to a sequence in Table 26B. In some embodiments, the antisense strand comprises a sequence less than 90% identical to a sequence in Table 26B. In some embodiments, the antisense strand comprises a sequence less than 91% identical to a sequence in Table 26B. In some embodiments, the antisense strand comprises a sequence less than 92% identical to a sequence in Table 26B. In some embodiments, the antisense strand comprises a sequence less than 93% identical to a sequence in Table 26B. In some embodiments, the antisense strand comprises a sequence less than 94% identical to a sequence in Table 26B. In some embodiments, the antisense strand comprises a sequence less than 95% identical to a sequence in Table 26B. In some embodiments, the antisense strand comprises a sequence less than 96% identical to a sequence in Table 26B. In some embodiments, the antisense strand comprises a sequence less than 97% identical to a sequence in Table 26B. In some embodiments, the antisense strand comprises a sequence less than 98% identical to a sequence in Table 26B. In some embodiments, the antisense strand comprises a sequence less than 99% identical to a sequence in Table 26B. In some embodiments, the antisense strand comprises a sequence 100% identical to a sequence in Table 26B. The antisense strand may include a 3′ overhang such as a 3′ terminal UU overhang. One or both of the overhanging Us of the antisense strand may be linked to the rest of the antisense strand by a phosphorothioate linkage.

[0149] In some embodiments, the sense strand comprises a sequence at least 70% identical to a sequence in Table 26D. In some embodiments, the sense strand comprises a sequence at least 75% identical to a sequence in Table 26D. In some embodiments, the sense strand comprises a sequence at least 80% identical to a sequence in Table 26D. In some embodiments, the sense strand comprises a sequence at least 84% identical to a sequence in Table 26D. In some embodiments, the sense strand comprises a sequence at least 85% identical to a sequence in Table 26D. In some embodiments, the sense strand comprises a sequence at least 89% identical to a sequence in Table 26D. In some embodiments, the sense strand comprises a sequence at least 90% identical to a sequence in Table 26D. In some embodiments, the sense strand comprises a sequence at least 91% identical to a sequence in Table 26D. In some embodiments, the sense strand comprises a sequence at least 92% identical to a sequence in Table 26D. In some embodiments, the sense strand comprises a sequence at least 93% identical to a sequence in Table 26D. In some embodiments, the sense strand comprises a sequence at least 94% identical to a sequence in Table 26D. In some embodiments, the sense strand comprises a sequence at least 95% identical to a sequence in Table 26D. In some embodiments, the sense strand comprises a sequence at least 96% identical to a sequence in Table 26D. In some embodiments, the sense strand comprises a sequence at least 97% identical to a sequence in Table 26D. In some embodiments, the sense strand comprises a sequence at least 98% identical to a sequence in Table 26D. In some embodiments, the sense strand comprises a sequence at least 99% identical to a sequence in Table 26D. In some embodiments, the sense strand comprises a sequence less than 70% identical to a sequence in Table 26D. In some embodiments, the sense strand comprises a sequence less than 75% identical to a sequence in Table 26D. In some embodiments, the sense strand comprises a sequence less than 80% identical to a sequence in Table 26D. In some embodiments, the sense strand comprises a sequence less than 84% identical to a sequence in Table 26D. In some embodiments, the sense strand comprises a sequence less than 85% identical to a sequence in Table 26D. In some embodiments, the sense strand comprises a sequence less than 89% identical to a sequence in Table 26D. In some embodiments, the sense strand comprises a sequence less than 90% identical to a sequence in Table 26D. In some embodiments, the sense strand comprises a sequence less than 91% identical to a sequence in Table 26D. In some embodiments, the sense strand comprises a sequence less than 92% identical to a sequence in Table 26D. In some embodiments, the sense strand comprises a sequence less than 93% identical to a sequence in Table 26D. In some embodiments, the sense strand comprises a sequence less than 94% identical to a sequence in Table 26D. In some embodiments, the sense strand comprises a sequence less than 95% identical to a sequence in Table 26D. In some embodiments, the sense strand comprises a sequence less than 96% identical to a sequence in Table 26D. In some embodiments, the sense strand comprises a sequence less than 97% identical to a sequence in Table 26D. In some embodiments, the sense strand comprises a sequence less than 98% identical to a sequence in Table 26D. In some embodiments, the sense strand comprises a sequence less than 99% identical to a sequence in Table 26D. In some embodiments, the sense strand comprises a sequence 100% identical to a sequence in Table 26D. The sense strand may include a 3′ overhang such as a 3′ terminal UU overhang. One or both of the overhanging Us of the sense strand may be linked to the rest of the sense strand by a phosphorothioate linkage.

[0150] In some embodiments, the antisense strand comprises a sequence at least 70% identical to a sequence in Table 26D. In some embodiments, the antisense strand comprises a sequence at least 75% identical to a sequence in Table 26D. In some embodiments, the antisense strand comprises a sequence at least 80% identical to a sequence in Table 26D. In some embodiments, the antisense strand comprises a sequence at least 84% identical to a sequence in Table 26D. In some embodiments, the antisense strand comprises a sequence at least 85% identical to a sequence in Table 26D. In some embodiments, the antisense strand comprises a sequence at least 89% identical to a sequence in Table 26D. In some embodiments, the antisense strand comprises a sequence at least 90% identical to a sequence in Table 26D. In some embodiments, the antisense strand comprises a sequence at least 91% identical to a sequence in Table 26D. In some embodiments, the antisense strand comprises a sequence at least 92% identical to a sequence in Table 26D. In some embodiments, the antisense strand comprises a sequence at least 93% identical to a sequence in Table 26D. In some embodiments, the antisense strand comprises a sequence at least 94% identical to a sequence in Table 26D. In some embodiments, the antisense strand comprises a sequence at least 95% identical to a sequence in Table 26D. In some embodiments, the antisense strand comprises a sequence at least 96% identical to a sequence in Table 26D. In some embodiments, the antisense strand comprises a sequence at least 97% identical to a sequence in Table 26D. In some embodiments, the antisense strand comprises a sequence at least 98% identical to a sequence in Table 26D. In some embodiments, the antisense strand comprises a sequence at least 99% identical to a sequence in Table 26D. In some embodiments, the antisense strand comprises a sequence less than 70% identical to a sequence in Table 26D. In some embodiments, the antisense strand comprises a sequence less than 75% identical to a sequence in Table 26D. In some embodiments, the antisense strand comprises a sequence less than 80% identical to a sequence in Table 26D. In some embodiments, the antisense strand comprises a sequence less than 84% identical to a sequence in Table 26D. In some embodiments, the antisense strand comprises a sequence less than 85% identical to a sequence in Table 26D. In some embodiments, the antisense strand comprises a sequence less than 89% identical to a sequence in Table 26D. In some embodiments, the antisense strand comprises a sequence less than 90% identical to a sequence in Table 26D. In some embodiments, the antisense strand comprises a sequence less than 91% identical to a sequence in Table 26D. In some embodiments, the antisense strand comprises a sequence less than 92% identical to a sequence in Table 26D. In some embodiments, the antisense strand comprises a sequence less than 93% identical to a sequence in Table 26D. In some embodiments, the antisense strand comprises a sequence less than 94% identical to a sequence in Table 26D. In some embodiments, the antisense strand comprises a sequence less than 95% identical to a sequence in Table 26D. In some embodiments, the antisense strand comprises a sequence less than 96% identical to a sequence in Table 26D. In some embodiments, the antisense strand comprises a sequence less than 97% identical to a sequence in Table 26D. In some embodiments, the antisense strand comprises a sequence less than 98% identical to a sequence in Table 26D. In some embodiments, the antisense strand comprises a sequence less than 99% identical to a sequence in Table 26D. In some embodiments, the antisense strand comprises a sequence 100% identical to a sequence in Table 26D. The antisense strand may include a 3′ overhang such as a 3′ terminal UU overhang. One or both of the overhanging Us of the antisense strand may be linked to the rest of the antisense strand by a phosphorothioate linkage.

[0151] In some embodiments, the sense strand comprises a sequence at least 70% identical to a sequence in Table 38. In some embodiments, the sense strand comprises a sequence at least 75% identical to a sequence in Table 38. In some embodiments, the sense strand comprises a sequence at least 80% identical to a sequence in Table 38. In some embodiments, the sense strand comprises a sequence at least 84% identical to a sequence in Table 38. In some embodiments, the sense strand comprises a sequence at least 85% identical to a sequence in Table 38. In some embodiments, the sense strand comprises a sequence at least 89% identical to a sequence in Table 38. In some embodiments, the sense strand comprises a sequence at least 90% identical to a sequence in Table 38. In some embodiments, the sense strand comprises a sequence at least 91% identical to a sequence in Table 38. In some embodiments, the sense strand comprises a sequence at least 92% identical to a sequence in Table 38. In some embodiments, the sense strand comprises a sequence at least 93% identical to a sequence in Table 38. In some embodiments, the sense strand comprises a sequence at least 94% identical to a sequence in Table 38. In some embodiments, the sense strand comprises a sequence at least 95% identical to a sequence in Table 38. In some embodiments, the sense strand comprises a sequence at least 96% identical to a sequence in Table 38. In some embodiments, the sense strand comprises a sequence at least 97% identical to a sequence in Table 38. In some embodiments, the sense strand comprises a sequence at least 98% identical to a sequence in Table 38. In some embodiments, the sense strand comprises a sequence at least 99% identical to a sequence in Table 38. In some embodiments, the sense strand comprises a sequence less than 70% identical to a sequence in Table 38. In some embodiments, the sense strand comprises a sequence less than 75% identical to a sequence in Table 38. In some embodiments, the sense strand comprises a sequence less than 80% identical to a sequence in Table 38. In some embodiments, the sense strand comprises a sequence less than 84% identical to a sequence in Table 38. In some embodiments, the sense strand comprises a sequence less than 85% identical to a sequence in Table 38. In some embodiments, the sense strand comprises a sequence less than 89% identical to a sequence in Table 38. In some embodiments, the sense strand comprises a sequence less than 90% identical to a sequence in Table 38. In some embodiments, the sense strand comprises a sequence less than 91% identical to a sequence in Table 38. In some embodiments, the sense strand comprises a sequence less than 92% identical to a sequence in Table 38. In some embodiments, the sense strand comprises a sequence less than 93% identical to a sequence in Table 38. In some embodiments, the sense strand comprises a sequence less than 94% identical to a sequence in Table 38. In some embodiments, the sense strand comprises a sequence less than 95% identical to a sequence in Table 38. In some embodiments, the sense strand comprises a sequence less than 96% identical to a sequence in Table 38. In some embodiments, the sense strand comprises a sequence less than 97% identical to a sequence in Table 38. In some embodiments, the sense strand comprises a sequence less than 98% identical to a sequence in Table 38. In some embodiments, the sense strand comprises a sequence less than 99% identical to a sequence in Table 38. In some embodiments, the sense strand comprises a sequence 100% identical to a sequence in Table 38. The sense strand may include a 3′ overhang such as a 3′ terminal UU overhang. One or both of the overhanging Us of the sense strand may be linked to the rest of the sense strand by a phosphorothioate linkage.

[0152] In some embodiments, the antisense strand comprises a sequence at least 70% identical to a sequence in Table 38. In some embodiments, the antisense strand comprises a sequence at least 75% identical to a sequence in Table 38. In some embodiments, the antisense strand comprises a sequence at least 80% identical to a sequence in Table 38. In some embodiments, the antisense strand comprises a sequence at least 84% identical to a sequence in Table 38. In some embodiments, the antisense strand comprises a sequence at least 85% identical to a sequence in Table 38. In some embodiments, the antisense strand comprises a sequence at least 89% identical to a sequence in Table 38. In some embodiments, the antisense strand comprises a sequence at least 90% identical to a sequence in Table 38. In some embodiments, the antisense strand comprises a sequence at least 91% identical to a sequence in Table 38. In some embodiments, the antisense strand comprises a sequence at least 92% identical to a sequence in Table 38. In some embodiments, the antisense strand comprises a sequence at least 93% identical to a sequence in Table 38. In some embodiments, the antisense strand comprises a sequence at least 94% identical to a sequence in Table 38. In some embodiments, the antisense strand comprises a sequence at least 95% identical to a sequence in Table 38. In some embodiments, the antisense strand comprises a sequence at least 96% identical to a sequence in Table 38. In some embodiments, the antisense strand comprises a sequence at least 97% identical to a sequence in Table 38. In some embodiments, the antisense strand comprises a sequence at least 98% identical to a sequence in Table 38. In some embodiments, the antisense strand comprises a sequence at least 99% identical to a sequence in Table 38. In some embodiments, the antisense strand comprises a sequence less than 70% identical to a sequence in Table 38. In some embodiments, the antisense strand comprises a sequence less than 75% identical to a sequence in Table 38. In some embodiments, the antisense strand comprises a sequence less than 80% identical to a sequence in Table 38. In some embodiments, the antisense strand comprises a sequence less than 84% identical to a sequence in Table 38. In some embodiments, the antisense strand comprises a sequence less than 85% identical to a sequence in Table 38. In some embodiments, the antisense strand comprises a sequence less than 89% identical to a sequence in Table 38. In some embodiments, the antisense strand comprises a sequence less than 90% identical to a sequence in Table 38. In some embodiments, the antisense strand comprises a sequence less than 91% identical to a sequence in Table 38. In some embodiments, the antisense strand comprises a sequence less than 92% identical to a sequence in Table 38. In some embodiments, the antisense strand comprises a sequence less than 93% identical to a sequence in Table 38. In some embodiments, the antisense strand comprises a sequence less than 94% identical to a sequence in Table 38. In some embodiments, the antisense strand comprises a sequence less than 95% identical to a sequence in Table 38. In some embodiments, the antisense strand comprises a sequence less than 96% identical to a sequence in Table 38. In some embodiments, the antisense strand comprises a sequence less than 97% identical to a sequence in Table 38. In some embodiments, the antisense strand comprises a sequence less than 98% identical to a sequence in Table 38. In some embodiments, the antisense strand comprises a sequence less than 99% identical to a sequence in Table 38. In some embodiments, the antisense strand comprises a sequence 100% identical to a sequence in Table 38. The antisense strand may include a 3′ overhang such as a 3′ terminal UU overhang. One or both of the overhanging Us of the antisense strand may be linked to the rest of the antisense strand by a phosphorothioate linkage.

dsRNA Modifications

[0153] The modifications described herein in reference to dsRNA agents may be applicable to siRNA oligonucleotides described elsewhere herein.

[0154] In some embodiments, one or more nucleotides in the sense and/or antisense strand of a dsRNA agent is modified. In some cases, every nucleotide in the sense strand and antisense strand of the dsRNA is modified. The modifications on sense strand and antisense strand may each independently comprise at least two different modifications. In some cases, not every nucleotide in the sense and antisense strand is modified. In some cases, no nucleotide in the sense and/or antisense strand is modified.

[0155] In some cases, the sense strand contains at least one motif of three identical modifications on three consecutive nucleotides, where at least one of the motifs occurs at or near the cleavage site in the antisense strand. In some cases, the antisense strand contains at least one motif of three identical modifications on three consecutive nucleotides. The modification pattern of the antisense strand may be shifted by one or more nucleotides relative to the modification pattern of the sense strand.

[0156] In some cases, the sense strand contains at least two motifs of three identical modifications on three consecutive nucleotides, when at least one of the motifs occurs at the cleavage site in the strand and at least one of the motifs occurs at another portion of the strand that is separated from the motif at the cleavage site by at least one nucleotide. In some cases, the antisense strand contains at least one motif of three identical modifications on three consecutive nucleotides, where at least one of the motifs occurs at or near the cleavage site in the strand and at least one of the motifs occurs at another portion of the strand that is separated from the motif at or near cleavage site by at least one nucleotide.

[0157] In some cases, the sense strand contains at least two motifs of three identical modifications on three consecutive nucleotides, where at least one of the motifs occurs at the cleavage site in the strand and at least one of the motifs occurs at another portion of the strand that is separated from the motif at the cleavage site by at least one nucleotide. In some cases, the antisense strand contains at least one motif of three identical modifications on three consecutive nucleotides, where at least one of the motifs occurs at or near the cleavage site in the strand and at least one of the motifs occurs at another portion of the strand that is separated from the motif at or near cleavage site by at least one nucleotide. In some cases, the modification in the motif occurring at the cleavage site in the sense strand is different than the modification in the motif occurring at or near the cleavage site in the antisense strand.

[0158] In some cases, the sense strand contains at least one motif of three 2′-F modifications on three consecutive nucleotides, where at least one of the motifs occurs at the cleavage site in the strand. In some cases, the antisense strand contains at least one motif of three 2′-O-methyl modifications on three consecutive nucleotides.

[0159] In some cases, the sense strand comprises one or more motifs of three identical modifications on three consecutive nucleotides, where the one or more additional motifs occur at another portion of the strand that is separated from the three 2′-F modifications at the cleavage site by at least one nucleotide. The antisense strand may comprise one or more motifs of three identical modifications on three consecutive nucleotides, where the one or more additional motifs occur at another portion of the strand that is separated from the three 2′-O-methyl modifications by at least one nucleotide. In some cases, at least one of the nucleotides having a 2′-F modification may form a base pair with one of the nucleotides having a 2′-O-methyl modification.

[0160] In some embodiments, if the dsRNA agent comprises an overhang, the nucleotides in the overhang region of the dsRNA agent can each independently be a modified or unmodified nucleotide. Non-limiting examples of modifications include, but are not limited to, a 2′-sugar modification, such as, 2-F, 2′-Omethyl, thymidine (T), 2′-O-methoxyethyl-5-methyluridine (Teo), 2′-O-methoxyethyladenosine (Aeo), 2′-O-methoxyethyl-5-methylcytidine (m5Ceo), and any combinations thereof. For example, TT can be an overhang sequence for either end on either strand. The overhang can form a mismatch with the target Mrna, or it can be complementary to the gene sequences being targeted or can be other sequence.

[0161] In some embodiments, if the dsRNA agent comprises an overhang, the 5′- and/or 3′-overhang at the sense strand, antisense strand or both strands of the dsRNA agent may be phosphorylated. In some embodiments, the overhang region contains two nucleotides having a phosphorothioate between the two nucleotides, where the two nucleotides can be the same or different. In some embodiments, the overhang is present at the 3′-end of the sense strand, antisense strand or both strands. In some embodiments, this 3′-overhang is present in the antisense strand. In some embodiments, this 3′-overhang is present in the sense strand.

[0162] In some embodiments, the modified dsRNA agent comprises one or more modified nucleotides including, but not limited to, 2′OMe nucleotides, 2′-deoxy-2′-fluoro (2′F) nucleotides, 2′-deoxy nucleotides, 2′-O-(2-methoxyethyl) (MOE) nucleotides, locked nucleic acid (LNA) nucleotides, or combinations thereof. In some embodiments, the modified dsRNA agent comprises 2′OMe nucleotides (e.g., 2′OMe purine and/or pyrimidine nucleotides) such as, for example, 2′OMe-guanosine nucleotides, 2′OMe-uridine nucleotides, 2′OMe-adenosine nucleotides, 2′OMe-cytosine nucleotides, or combinations thereof. In certain instances, the modified dsRNA agent does not comprise 2′OMe-cytosine nucleotides. In some embodiments, the modified dsRNA agent comprises a hairpin loop structure.

[0163] In certain aspects, the modified dsRNA agent has an IC50 less than or equal to ten-fold that of the corresponding unmodified dsRNA (e.g., the modified dsRNA agent has an IC50 that is less than or equal to ten-times the IC50 of the corresponding unmodified dsRNA agent). In some embodiments, the modified dsRNA agent has an IC50 less than or equal to three-fold that of the corresponding unmodified dsRNA agent. In some embodiments, the modified dsRNA agent has an IC50 less than or equal to two-fold that of the corresponding unmodified dsRNA agent. It will be readily apparent to those of skill in the art that a dose response curve can be generated and the IC50 values for the modified dsRNA agent and the corresponding unmodified dsRNA agent can be readily determined using methods known to those of skill in the art.

[0164] The modified dsRNA agent may have 3′ overhangs of one, two, three, four, or more nucleotides on one or both sides of the double-stranded region, or may lack overhangs (i.e., have blunt ends). In some cases, the modified dsRNA agent has 3′ overhangs of two nucleotides on each side of the double-stranded region. In certain instances, the 3′ overhang on the antisense strand has complementarity to the target sequence and the 3′ overhang on the sense strand has complementarity to the complementary strand of the target sequence. In some cases, the 3′ overhangs do not have complementarity to the target sequence or the complementary strand thereof. In some embodiments, the 3′ overhangs comprise one, two, three, four, or more nucleotides such as 2′-deoxy(2′H) nucleotides. In some cases, the 3′ overhangs comprise deoxythymidine (dT) nucleotides.

[0165] In some embodiments, the modified dsRNA agent comprises from about 1% to about 100% (e.g., about 1%, 5%, 10%, 15%, 20%, 25%, 30%, 35%, 40%, 45%, 50%, 55%, 60%, 65%, 70%, 75%, 80%, 85%, 90%, 95%, or 100%) modified nucleotides in the double-stranded region of the dsRNA agent. In some embodiments, less than about 30% (e.g., less than about 30%, 25%, 20%, 15%, 10%, or 5%) or from about 1% to about 30% (e.g., from about 1%-30%, 5%-30%, 10%-30%, 15%-30%, 20%-30%, or 25%-30%) of the nucleotides in the double-stranded region of the dsRNA agent comprise modified nucleotides.

[0166] In some embodiments, the dsRNA agent does not comprise phosphate backbone modifications, e.g., in the sense and/or antisense strand of the double-stranded region. In some embodiments, the modified dsRNA agent does not comprise 2′-deoxy nucleotides, e.g., in the sense and/or antisense strand of the double-stranded region. In certain instances, the nucleotide at the 3′-end of the double-stranded region in the sense and/or antisense strand is not a modified nucleotide. In certain instances, the nucleotides near the 3′-end (e.g., within one, two, three, or four nucleotides of the 3′-end) of the double-stranded region in the sense and/or antisense strand are not modified nucleotides.

[0167] The dsRNA agent may have 3′ overhangs of one, two, three, four, or more nucleotides on one or both sides of the double-stranded region, or may lack overhangs (i.e., have blunt ends). In some cases, the dsRNA agent has 3′ overhangs of two nucleotides on each side of the double-stranded region. In some embodiments, the 3′ overhangs comprise one, two, three, four, or more nucleotides such as 2′-deoxy(2′H) nucleotides. In some cases, the 3′ overhangs comprise deoxythymidine (dT) nucleotides.

[0168] The dsRNA agent may also have a blunt end, located at the 5′-end of the antisense strand (or the 3′-end of the sense strand) or vice versa. In some cases, the antisense strand of the dsRNA has a nucleotide overhang at the 3′-end, and the 5′-end is blunt. While not bound by theory, the asymmetric blunt end at the 5′-end of the antisense strand and 3′-end overhang of the antisense strand may favor the guide strand loading into RISC process.

[0169] In some embodiments, the dsRNA agent may also have two blunt ends, at both ends of the dsRNA duplex.

[0170] In some embodiments, every nucleotide in the sense strand and antisense strand of the dsRNA agent, including the nucleotides that are part of the motifs, may be modified. Each nucleotide may be modified with the same or different modification which can include one or more alteration of one or both of the non-linking phosphate oxygens and/or of one or more of the linking phosphate oxygens; alteration of a constituent of the ribose sugar, e.g., of the 2′ hydroxyl on the ribose sugar; wholesale replacement of the phosphate moiety with “dephospho” linkers; modification or replacement of a naturally occurring base; and replacement or modification of the ribose-phosphate backbone. In some embodiments, fewer than all nucleotides in the sense and antisense strand are modified.

[0171] As nucleic acids are polymers of subunits, in some cases, many of the modifications occur at a position which is repeated within a nucleic acid, e.g., a modification of a base, or a phosphate moiety, or a non-linking O of a phosphate moiety. In some cases, the modification will occur at all of the subject positions in the nucleic acid, but in other cases, it will not. By way of example, a modification may only occur at a 3′ or 5′ terminal position, may only occur in a terminal region, e.g., at a position on a terminal nucleotide or in the last 2, 3, 4, 5, or 10 nucleotides of a strand. A modification may occur in a double strand region, a single strand region, or in both. A modification may occur only in the double strand region of a R A or may only occur in a single strand region of a RNA. For example, a phosphorothioate modification at a non-linking O position may only occur at one or both termini, may only occur in a terminal region, e.g., at a position on a terminal nucleotide or in the last 2, 3, 4, 5, or 10 nucleotides of a strand, or may occur in double strand and single strand regions, particularly at termini. The 5′ end or ends can be phosphorylated.

[0172] It may be possible, e.g., to enhance stability, to include particular bases in overhangs, or to include modified nucleotides or nucleotide surrogates, in single strand overhangs, e.g., in a 5′ or 3′ overhang, or in both. For example, purine nucleotides may be included in overhangs. In some embodiments all or some of the bases in a 3′ or 5′ overhang may be modified, e.g., with a modification described herein. Modifications can include, e.g., the use of modifications at the 2′ position of the ribose sugar with modifications that are known in the art, e.g., the use of deoxyribonucleotides, 2′-deoxy-2′-fluoro (2′-F) or 2′-O-methyl modified instead of the ribosugar of the nucleobase, and modifications in the phosphate group, e.g., phosphorothioate modifications. In some cases, overhangs need not be homologous with the target sequence.

[0173] In some embodiments, each residue of the sense strand and antisense strand is independently modified with LNA, HNA, CeNA, 2′-methoxyethyl, 2′-O-methyl, 2′-O-allyl, 2′-C-allyl, 2′-deoxy, or 2′-fluoro. The strands can contain more than one modification. In some embodiments, each residue of the sense strand and antisense strand is independently modified with 2′-O-methyl or 2′-fluoro.

[0174] In some embodiments, at least two different modifications are present on the sense strand and antisense strand. Those two modifications may be the 2′-O-methyl or 2′-fluoro modifications, or others.

[0175] In some embodiments, the sense strand and antisense strand each contains two differently modified nucleotides selected from 2′-O-methyl or 2′-fluoro.

[0176] In some embodiments, each residue of the sense strand and antisense strand is independently modified with 2′-O-methyl nucleotide, 2′-deoxyfluoro nucleotide, 2-O—N-methylacetamido (2′-O—NMA) nucleotide, a 2′-O-dimethylaminoethoxyethyl (2′-O-DMAEOE) nucleotide, 2′-O-aminopropyl (2′-O-AP) nucleotide, or 2′-ara-F nucleotide.

[0177] The type of modifications contained in an alternating motif may be the same or different. For example, if A, B, C, D each represent one type of modification on the nucleotide, the alternating pattern, i.e., modifications on every other nucleotide, may be the same, but each of the sense strand or antisense strand can be selected from several possibilities of modifications within the alternating motif such as “ABABAB . . . ”, “ACACAC . . . ” “BDBDBD . . . ” or “CDCDCD . . . ,” etc.

[0178] In some embodiments, the dsRNA agent comprises the modification pattern for the alternating motif on the sense strand relative to the modification pattern for the alternating motif on the antisense strand is shifted. The shift may be such that the modified group of nucleotides of the sense strand corresponds to a differently modified group of nucleotides of the antisense strand and vice versa. For example, the sense strand when paired with the antisense strand in the dsRNA duplex, the alternating motif in the sense strand may start with “ABABAB” from 5′-3′ of the strand and the alternating motif in the antisense strand may start with “BABABA” from 3′-5 of the strand within the duplex region. As another example, the alternating motif in the sense strand may start with “AABBAABB” from 5′-3′ of the strand and the alternating motif in the antisense strand may start with “BBAABBAA” from 3′-5 Of the strand within the duplex region, so that there is a complete or partial shift of the modification patterns between the sense strand and the antisense strand.

[0179] In some embodiments, the dsRNA agent comprises the pattern of the alternating motif of 2′-O-methyl modification and 2′-F modification on the sense strand initially has a shift relative to the pattern of the alternating motif of 2′-O-methyl modification and 2′-F modification on the antisense strand initially, i.e., the 2′-O-methyl modified nucleotide on the sense strand base pairs with a 2′-F modified nucleotide on the antisense strand and vice versa. The 1 position of the sense strand may start with the 2′-F modification, and the 1 position of the antisense strand may start with the 2′-O-methyl modification. The introduction of one or more motifs of three identical modifications on three consecutive nucleotides to the sense strand and/or antisense strand interrupts the initial modification pattern present in the sense strand and/or antisense strand. This interruption of the modification pattern of the sense and/or antisense strand by introducing one or more motifs of three identical modifications on three consecutive nucleotides to the sense and/or antisense strand may enhance the gene silencing activity to the target gene.

[0180] The dsRNA agent may comprise at least one phosphorothioate or methylphosphonate internucleotide linkage. The phosphorothioate or methylphosphonate internucleotide linkage modification may occur on any nucleotide of the sense strand or antisense strand or both in any position of the strand. For instance, the internucleotide linkage modification may occur on every nucleotide on the sense strand and/or antisense strand; each internucleotide linkage modification may occur in an alternating pattern on the sense strand or antisense strand; or the sense strand or antisense strand comprises both internucleotide linkage modifications in an alternating pattern. The alternating pattern of the internucleotide linkage modification on the sense strand may be the same or different from the antisense strand, and the alternating pattern of the internucleotide linkage modification on the sense strand may have a shift relative to the alternating pattern of the internucleotide linkage modification on the antisense strand.

[0181] In some embodiments, the dsRNA comprises the phosphorothioate or methylphosphonate internucleotide linkage modification in the overhang region. For example, the overhang region comprises two nucleotides having a phosphorothioate or methylphosphonate internucleotide linkage between the two nucleotides. Internucleotide linkage modifications also may be made to link the overhang nucleotides with the terminal paired nucleotides within duplex region. For example, at least 2, 3, 4, or all the overhang nucleotides may be linked through phosphorothioate or methylphosphonate internucleotide linkage, and optionally, there may be additional phosphorothioate or methylphosphonate internucleotide linkages linking the overhang nucleotide with a paired nucleotide that is next to the overhang nucleotide. For instance, there may be at least two phosphorothioate internucleotide linkages between the terminal three nucleotides, in which two of the three nucleotides are overhang nucleotides, and the third is a paired nucleotide next to the overhang nucleotide. In some cases, these terminal three nucleotides may be at the 3′-end of the antisense strand.

[0182] In some embodiments the sense strand of the dsRNA agent comprises 1-10 blocks of two to ten phosphorothioate or methylphosphonate internucleotide linkages separated by about 1, 2, 3, 4, 5, 6, 7, 8, 9, 10, 11, 12, 13, 14, 15 or 16 phosphate internucleotide linkages, wherein one of the phosphorothioate or methylphosphonate internucleotide linkages is placed at any position in the oligonucleotide sequence and the said sense strand is paired with an antisense strand comprising any combination of phosphorothioate, methylphosphonate and phosphate internucleotide linkages or an antisense strand comprising either phosphorothioate or methylphosphonate or phosphate linkage.

[0183] In some embodiments the antisense strand of the dsRNA agent comprises two blocks of two phosphorothioate or methylphosphonate internucleotide linkages separated by about 1, 2, 3, 4, 5, 6, 7, 8, 9, 10, 11, 12, 13, 14, 15, 16, 17, or 18 phosphate internucleotide linkages, wherein one of the phosphorothioate or methylphosphonate internucleotide linkages is placed at any position in the oligonucleotide sequence and the said antisense strand is paired with a sense strand comprising any combination of phosphorothioate, methylphosphonate and phosphate internucleotide linkages or an antisense strand comprising either phosphorothioate or methylphosphonate or phosphate linkage.

[0184] In some embodiments the antisense strand of the dsRNA agent comprises two blocks of three phosphorothioate or methylphosphonate internucleotide linkages separated by about 1, 2, 3, 4, 5, 6, 7, 8, 9, 10, 11, 12, 13, 14, 15 or 16 phosphate internucleotide linkages, wherein one of the phosphorothioate or methylphosphonate internucleotide linkages is placed at any position in the oligonucleotide sequence and the said antisense strand is paired with a sense strand comprising any combination of phosphorothioate, methylphosphonate and phosphate internucleotide linkages or an antisense strand comprising either phosphorothioate or methylphosphonate or phosphate linkage.

[0185] In some embodiments the antisense strand of the dsRNA agent comprises two blocks of four phosphorothioate or methylphosphonate internucleotide linkages separated by about 1, 2, 3, 4, 5, 6, 7, 8, 9, 10, 11, 12, 13 or 14 phosphate internucleotide linkages, wherein one of the phosphorothioate or methylphosphonate internucleotide linkages is placed at any position in the oligonucleotide sequence and the said antisense strand is paired with a sense strand comprising any combination of phosphorothioate, methylphosphonate and phosphate internucleotide linkages or an antisense strand comprising either phosphorothioate or methylphosphonate or phosphate linkage.

[0186] In some embodiments the antisense strand of the dsRNA agent comprises two blocks of five phosphorothioate or methylphosphonate internucleotide linkages separated by about 1, 2, 3, 4, 5, 6, 7, 8, 9, 10, 11 or 12 phosphate internucleotide linkages, wherein one of the phosphorothioate or methylphosphonate internucleotide linkages is placed at any position in the oligonucleotide sequence and the said antisense strand is paired with a sense strand comprising any combination of phosphorothioate, methylphosphonate and phosphate internucleotide linkages or an antisense strand comprising either phosphorothioate or methylphosphonate or phosphate linkage.

[0187] In some embodiments the antisense strand of the dsRNA agent comprises two blocks of six phosphorothioate or methylphosphonate internucleotide linkages separated by about 1, 2, 3, 4, 5, 6, 7, 8, 9 or 10 phosphate internucleotide linkages, wherein one of the phosphorothioate or methylphosphonate internucleotide linkages is placed at any position in the oligonucleotide sequence and the said antisense strand is paired with a sense strand comprising any combination of phosphorothioate, methylphosphonate and phosphate internucleotide linkages or an antisense strand comprising either phosphorothioate or methylphosphonate or phosphate linkage.

[0188] In some embodiments the antisense strand of the dsRNA agent comprises two blocks of seven phosphorothioate or methylphosphonate internucleotide linkages separated by about 1, 2, 3, 4, 5, 6, 7 or 8 phosphate internucleotide linkages, wherein one of the phosphorothioate or methylphosphonate internucleotide linkages is placed at any position in the oligonucleotide sequence and the said antisense strand is paired with a sense strand comprising any combination of phosphorothioate, methylphosphonate and phosphate internucleotide linkages or an antisense strand comprising either phosphorothioate or methylphosphonate or phosphate linkage.

[0189] In some embodiments the antisense strand of the dsRNA agent comprises two blocks of eight phosphorothioate or methylphosphonate internucleotide linkages separated by about 1, 2, 3, 4, 5 or 6 phosphate internucleotide linkages, wherein one of the phosphorothioate or methylphosphonate internucleotide linkages is placed at any position in the oligonucleotide sequence and the said antisense strand is paired with a sense strand comprising any combination of phosphorothioate, methylphosphonate and phosphate internucleotide linkages or an antisense strand comprising either phosphorothioate or methylphosphonate or phosphate linkage.

[0190] In some embodiments the antisense strand of the dsRNA agent comprises two blocks of nine phosphorothioate or methylphosphonate internucleotide linkages separated by about 1, 2, 3 or 4 phosphate internucleotide linkages, wherein one of the phosphorothioate or methylphosphonate internucleotide linkages is placed at any position in the oligonucleotide sequence and the said antisense strand is paired with a sense strand comprising any combination of phosphorothioate, methylphosphonate and phosphate internucleotide linkages or an antisense strand comprising either phosphorothioate or methylphosphonate or phosphate linkage.

[0191] In some embodiments, the dsRNA agent comprises one or more phosphorothioate or methylphosphonate internucleotide linkage modification within 1-10 of the termini position(s) of the sense and/or antisense strand. For example, at least about 2, 3, 4, 5, 6, 7, 8, 9 or 10 nucleotides may be linked through phosphorothioate or methylphosphonate internucleotide linkage at one end or both ends of the sense and/or antisense strand.

[0192] In some embodiments, the dsRNA agent comprises one or more phosphorothioate or methylphosphonate internucleotide linkage modification within 1-10 of the internal region of the duplex of each of the sense and/or antisense strand. For example, at least about 2, 3, 4, 5, 6, 7, 8, 9 or 10 nucleotides may be linked through phosphorothioate methylphosphonate internucleotide linkage at position 8-16 of the duplex region counting from the 5′-end of the sense strand; the dsRNA can optionally further comprise one or more phosphorothioate or methylphosphonate internucleotide linkage modification within 1-10 of the termini position(s).

[0193] In some embodiments, the dsRNA agent comprises one to five phosphorothioate or methylphosphonate internucleotide linkage modification(s) within position 1-5 and one to five phosphorothioate or methylphosphonate internucleotide linkage modification(s) within position 18-23 of the sense strand (counting from the 5′-end), and one to five phosphorothioate or methylphosphonate internucleotide linkage modification at positions 1 and 2 and one to five within positions 18-23 of the antisense strand (counting from the 5′-end).

[0194] In some embodiments, the dsRNA agent comprises one phosphorothioate internucleotide linkage modification within position 1-5 and one phosphorothioate or methylphosphonate internucleotide linkage modification within position 18-23 of the sense strand (counting from the 5′-end), and one phosphorothioate internucleotide linkage modification at positions 1 and 2 and two phosphorothioate or methylphosphonate internucleotide linkage modifications within positions 18-23 of the antisense strand (counting from the 5′-end).

[0195] In some embodiments, the dsRNA agent comprises two phosphorothioate internucleotide linkage modifications within position 1-5 and one phosphorothioate internucleotide linkage modification within position 18-23 of the sense strand (counting from the 5′-end), and one phosphorothioate internucleotide linkage modification at positions 1 and 2 and two phosphorothioate internucleotide linkage modifications within positions 18-23 of the antisense strand (counting from the 5′-end).

[0196] In some embodiments, the dsRNA agent comprises two phosphorothioate internucleotide linkage modifications within position 1-5 and two phosphorothioate internucleotide linkage modifications within position 18-23 of the sense strand (counting from the 5′-end), and one phosphorothioate internucleotide linkage modification at positions 1 and 2 and two phosphorothioate internucleotide linkage modifications within positions 18-23 of the antisense strand (counting from the 5′-end). In some embodiments, the dsRNA agent comprises two phosphorothioate internucleotide linkage modifications within position 1-5 and two phosphorothioate internucleotide linkage modifications within position 18-23 of the sense strand (counting from the 5′-end), and one phosphorothioate internucleotide linkage modification at positions 1 and 2 and one phosphorothioate internucleotide linkage modification within positions 18-23 of the antisense strand (counting from the 5′-end).

[0197] In some embodiments, the dsRNA agent comprises one phosphorothioate internucleotide linkage modification within position 1-5 and one phosphorothioate internucleotide linkage modification within position 18-23 of the sense strand (counting from the 5′-end), and two phosphorothioate internucleotide linkage modifications at positions 1 and 2 and two phosphorothioate internucleotide linkage modifications within positions 18-23 of the antisense strand (counting from the 5′-end).

[0198] In some embodiments, the dsRNA agent comprises one phosphorothioate internucleotide linkage modification within position 1-5 and one within position 18-23 of the sense strand (counting from the 5′-end), and two phosphorothioate internucleotide linkage modification at positions 1 and 2 and one phosphorothioate internucleotide linkage modification within positions 18-23 of the antisense strand (counting from the 5′-end).

[0199] In some embodiments, the dsRNA agent comprises one phosphorothioate internucleotide linkage modification within position 1-5 (counting from the 5′-end), and two phosphorothioate internucleotide linkage modifications at positions 1 and 2 and one phosphorothioate internucleotide linkage modification within positions 18-23 of the antisense strand (counting from the 5′-end).

[0200] In some embodiments, the dsRNA agent comprises two phosphorothioate internucleotide linkage modifications within position 1-5 (counting from the 5′-end), and one phosphorothioate internucleotide linkage modification at positions 1 and 2 and two phosphorothioate internucleotide linkage modifications within positions 18-23 of the antisense strand (counting from the 5′-end).

[0201] In some embodiments, the dsRNA agent comprises two phosphorothioate internucleotide linkage modifications within position 1-5 and one within position 18-23 of the sense strand (counting from the 5′-end), and two phosphorothioate internucleotide linkage modifications at positions 1 and 2 and one phosphorothioate internucleotide linkage modification within positions 18-23 of the antisense strand (counting from the 5′-end).

[0202] In some embodiments, the dsRNA agent comprises two phosphorothioate internucleotide linkage modifications within position 1-5 and one phosphorothioate internucleotide linkage modification within position 18-23 of the sense strand (counting from the 5′-end), and two phosphorothioate internucleotide linkage modifications at positions 1 and 2 and two phosphorothioate internucleotide linkage modifications within positions 18-23 of the antisense strand (counting from the 5′-end).

[0203] In some embodiments, the dsRNA agent comprises two phosphorothioate internucleotide linkage modifications within position 1-5 and one phosphorothioate internucleotide linkage modification within position 18-23 of the sense strand (counting from the 5′-end), and one phosphorothioate internucleotide linkage modification at positions 1 and 2 and two phosphorothioate internucleotide linkage modifications within positions 18-23 of the antisense strand (counting from the 5′-end).

[0204] In some embodiments, the dsRNA agent comprises two phosphorothioate internucleotide linkage modifications at position 1 and 2, and two phosphorothioate internucleotide linkage modifications at position 20 and 21 of the sense strand (counting from the 5′-end), and one phosphorothioate internucleotide linkage modification at positions 1 and one at position 21 of the antisense strand (counting from the 5′-end).

[0205] In some embodiments, the dsRNA agent comprises one phosphorothioate internucleotide linkage modification at position 1, and one phosphorothioate internucleotide linkage modification at position 21 of the sense strand (counting from the 5′-end), and two phosphorothioate internucleotide linkage modifications at positions 1 and 2 and two phosphorothioate internucleotide linkage modifications at positions 20 and 21 the antisense strand (counting from the 5′-end).

[0206] In some embodiments, the dsRNA agent comprises two phosphorothioate internucleotide linkage modifications at position 1 and 2, and two phosphorothioate internucleotide linkage modifications at position 21 and 22 of the sense strand (counting from the 5′-end), and one phosphorothioate internucleotide linkage modification at positions 1 and one phosphorothioate internucleotide linkage modification at position 21 of the antisense strand (counting from the 5′-end).

[0207] In some embodiments, the dsRNA agent comprises one phosphorothioate internucleotide linkage modification at position 1, and one phosphorothioate internucleotide linkage modification at position 21 of the sense strand (counting from the 5′-end), and two phosphorothioate internucleotide linkage modifications at positions 1 and 2 and two phosphorothioate internucleotide linkage modifications at positions 21 and 22 the antisense strand (counting from the 5′-end).

[0208] In some embodiments, the dsRNA agent comprises two phosphorothioate internucleotide linkage modifications at position 1 and 2, and two phosphorothioate internucleotide linkage modifications at position 22 and 23 of the sense strand (counting from the 5′-end), and one phosphorothioate internucleotide linkage modification at positions 1 and one phosphorothioate internucleotide linkage modification at position 21 of the antisense strand (counting from the 5′-end).

[0209] In some embodiments, the dsRNA agent comprises one phosphorothioate internucleotide linkage modification at position 1, and one phosphorothioate internucleotide linkage modification at position 21 of the sense strand (counting from the 5′-end), and two phosphorothioate internucleotide linkage modifications at positions 1 and 2 and two phosphorothioate internucleotide linkage modifications at positions 23 and 23 the antisense strand (counting from the 5′-end).

[0210] In some embodiments, the dsRNA agent comprises mismatch(es) with the target, within the duplex, or combinations thereof. The mismatch can occur in an overhang region or the duplex region. The base pair can be ranked on the basis of their propensity to promote dissociation or melting (e.g., on the free energy of association or dissociation of a particular pairing, the simplest approach is to examine the pairs on an individual pair basis, though next neighbor or similar analysis can also be used). In some cases, in terms of promoting dissociation: A:U is preferred over G:C; G:U is preferred over G:C; and I:C is preferred over G:C (I=inosine). In some cases, mismatches, e.g., non-canonical or other than canonical pairings (as described elsewhere herein) are preferred over canonical (A:T, A:U, G:C) pairings; and pairings which include a universal base are preferred over canonical pairings. In some embodiments, the dsRNA agent comprises at least one of the first 1, 2, 3, 4, or 5 base pairs within the duplex regions from the 5′-end of the antisense strand can be chosen independently from the group of: A:U, G:U, I:C, and mismatched pairs, e.g., non-canonical or other than canonical pairings or pairings which include a universal base, to promote the dissociation of the antisense strand at the 5′-end of the duplex.

[0211] In some embodiments, the nucleotide at the 1 position within the duplex region from the 5′-end in the antisense strand is selected from the group consisting of A, dA, dU, U, and dT. In some embodiments, at least one of the first 1, 2 or 3 base pair within the duplex region from the 5′-end of the antisense strand is an AU base pair. For example, the first base pair within the duplex region from the 5′-end of the antisense strand is an AU base pair.

[0212] In some embodiments, the dsRNA agent is conjugated to one or more carbohydrate moieties, which may optimize one or more properties of the dsRNA agent. In some cases, the carbohydrate moiety is attached to a modified subunit of the dsRNA agent. For example, the ribose sugar of one or more ribonucleotide subunits of a dsRNA agent can be replaced with another moiety, e.g., a non-carbohydrate (e.g., cyclic) carrier to which is attached a carbohydrate ligand. A ribonucleotide subunit in which the ribose sugar of the subunit is so replaced is referred to herein as a ribose replacement modification subunit (RRMS). A cyclic carrier may be a carbocyclic ring system, i.e., all ring atoms are carbon atoms, or a heterocyclic ring system, i.e., one or more ring atoms may be a heteroatom, e.g., nitrogen, oxygen, sulfur. The cyclic carrier may be a monocyclic ring system, or may contain two or more rings, e.g. fused rings. The cyclic carrier may be a fully saturated ring system, or it may contain one or more double bonds.

[0213] In some embodiments, a ligand is attached to the dsRNA via a carrier. In some cases, the carriers include (i) at least one “backbone attachment point” or two “backbone attachment points” and (ii) at least one “tethering attachment point.” In some cases, a “backbone attachment point” refers to a functional group, e.g. a hydroxy 1 group, or generally, a bond available for, and that is suitable for incorporation of the carrier into the backbone, e.g., the phosphate, or modified phosphate, e.g., sulfur containing, backbone, of a ribonucleic acid. A “tethering attachment point” (TAP), in some embodiments, refers to a constituent ring atom of the cyclic carrier, e.g., a carbon atom or a heteroatom (distinct from an atom which provides a backbone attachment point), that connects a selected moiety. The moiety can be, e.g., a carbohydrate, e.g. monosaccharide, disaccharide, trisaccharide, tetrasaccharide, oligosaccharide and polysaccharide. Optionally, the selected moiety is connected by an intervening tether to the cyclic carrier. Thus, the cyclic carrier may include a functional group, e.g., an amino group, or generally, provide a bond, that is suitable for incorporation or tethering of another chemical entity, e.g., a ligand to the constituent ring.

[0214] In some embodiments the dsRNA agent is conjugated to a ligand via a carrier, wherein the carrier can be cyclic group or acyclic group; e.g., the cyclic group is selected from pyrrolidinyl, pyrazolinyl, pyrazolidinyl, imidazolinyl, imidazolidinyl, piperidinyl, piperazinyl, [1,3]dioxolane, oxazolidinyl, isoxazolidinyl, morpholinyl, thiazolidinyl, isothiazolidinyl, quinoxalinyl, pyridazinonyl, tetrahydrofuryl and decalin; e.g., the acyclic group is selected from serinol backbone or diethanolamine backbone. The dsRNA agent may optionally be conjugated to one or more ligands. The ligand can be attached to the sense strand, antisense strand or both strands, at the 3′-end, 5′-end or both ends. For instance, the ligand may be conjugated to the sense strand, in particular, the 3′-end of the sense strand.

[0215] In some embodiments, the dsRNA is modified to promote stability. Stabilization of synthetic siRNA, such as a dsRNA herein, against rapid nuclease degradation may be regarded as a prerequisite for in vivo and therapeutic applications. This can be achieved using a variety of stabilization chemistries previously developed for other nucleic acid drugs, such as ribozymes and antisense molecules. These include chemical modifications to the native 2′-OH group in the ribose sugar backbone, such as 2′-O-methyl (2′OMe) and 2′-Fluoro (2′F) substitutions that can be readily introduced into siRNA as 2′-modified nucleotides during RNA synthesis. In some cases, the introduction of chemical modifications to native siRNA duplexes can have a negative impact on RNAi activity, therefore the design of chemically modified siRNA may require a stochastic screening approach to identify duplexes that retain potent gene silencing activity.

[0216] In some cases, when cleavage of the sense strand is inhibited, the endonucleolytic cleavage of target mRNA is impaired. In some cases, incorporation of a 2′-O-Me ribose to the Ago2 cleavage site in the sense strand inhibits RNAi. In some cases, with regard to phosphorothioate modifications, cleavage of the sense strand may be required for efficient RNAi.

[0217] In some cases, the dsRNA agent comprises 2′-F modified residues, e.g., at the Ago2 cleavage site. The modification may or may not be motif specific, e.g., one modification includes 2′-F modifications on all pyrimidines on both sense and antisense strands as long as pyrimidine residue is present, without any selectivity.

[0218] In some cases, the dsRNA agent comprises two 2′-F modified residues, e.g., at the Ago2 cleavage site, on the sense and/or antisense strand. In some cases, for each particular strand, either all pyrimidines or all purines are modified.

[0219] In some cases, the dsRNA agent comprises 2′-OMe modifications or various combinations of 2′-F, 2′-OMe and phosphorothioate modifications to stabilize the siRNA. In some cases, the residues at the cleavage site of the antisense strand are not be modified with 2′-OMe in order to increase the stability of the siRNA.

[0220] In some embodiments, the sense strand comprises a sequence at least 70% identical to a sequence in Table 26A. In some embodiments, the sense strand comprises a sequence at least 75% identical to a sequence in Table 26A. In some embodiments, the sense strand comprises a sequence at least 80% identical to a sequence in Table 26A. In some embodiments, the sense strand comprises a sequence at least 84% identical to a sequence in Table 26A. In some embodiments, the sense strand comprises a sequence at least 85% identical to a sequence in Table 26A. In some embodiments, the sense strand comprises a sequence at least 89% identical to a sequence in Table 26A. In some embodiments, the sense strand comprises a sequence at least 90% identical to a sequence in Table 26A. In some embodiments, the sense strand comprises a sequence at least 91% identical to a sequence in Table 26A. In some embodiments, the sense strand comprises a sequence at least 92% identical to a sequence in Table 26A. In some embodiments, the sense strand comprises a sequence at least 93% identical to a sequence in Table 26A. In some embodiments, the sense strand comprises a sequence at least 94% identical to a sequence in Table 26A. In some embodiments, the sense strand comprises a sequence at least 95% identical to a sequence in Table 26A. In some embodiments, the sense strand comprises a sequence at least 96% identical to a sequence in Table 26A. In some embodiments, the sense strand comprises a sequence at least 97% identical to a sequence in Table 26A. In some embodiments, the sense strand comprises a sequence at least 98% identical to a sequence in Table 26A. In some embodiments, the sense strand comprises a sequence at least 99% identical to a sequence in Table 26A. In some embodiments, the sense strand comprises a sequence less than 70% identical to a sequence in Table 26A. In some embodiments, the sense strand comprises a sequence less than 75% identical to a sequence in Table 26A. In some embodiments, the sense strand comprises a sequence less than 80% identical to a sequence in Table 26A. In some embodiments, the sense strand comprises a sequence less than 84% identical to a sequence in Table 26A. In some embodiments, the sense strand comprises a sequence less than 85% identical to a sequence in Table 26A. In some embodiments, the sense strand comprises a sequence less than 89% identical to a sequence in Table 26A. In some embodiments, the sense strand comprises a sequence less than 90% identical to a sequence in Table 26A. In some embodiments, the sense strand comprises a sequence less than 91% identical to a sequence in Table 26A. In some embodiments, the sense strand comprises a sequence less than 92% identical to a sequence in Table 26A. In some embodiments, the sense strand comprises a sequence less than 93% identical to a sequence in Table 26A. In some embodiments, the sense strand comprises a sequence less than 94% identical to a sequence in Table 26A. In some embodiments, the sense strand comprises a sequence less than 95% identical to a sequence in Table 26A. In some embodiments, the sense strand comprises a sequence less than 96% identical to a sequence in Table 26A. In some embodiments, the sense strand comprises a sequence less than 97% identical to a sequence in Table 26A. In some embodiments, the sense strand comprises a sequence less than 98% identical to a sequence in Table 26A. In some embodiments, the sense strand comprises a sequence less than 99% identical to a sequence in Table 26A. In some embodiments, the sense strand comprises a sequence 100% identical to a sequence in Table 26A. The sense strand may exclude the 3′ UU overhang of a sequence in Table 26A. The sense strand may include different modifications than a sequence in Table 26A.

[0221] In some embodiments, the antisense strand comprises a sequence at least 70% identical to a sequence in Table 26A. In some embodiments, the antisense strand comprises a sequence at least 75% identical to a sequence in Table 26A. In some embodiments, the antisense strand comprises a sequence at least 80% identical to a sequence in Table 26A. In some embodiments, the antisense strand comprises a sequence at least 84% identical to a sequence in Table 26A. In some embodiments, the antisense strand comprises a sequence at least 85% identical to a sequence in Table 26A. In some embodiments, the antisense strand comprises a sequence at least 89% identical to a sequence in Table 26A. In some embodiments, the antisense strand comprises a sequence at least 90% identical to a sequence in Table 26A. In some embodiments, the antisense strand comprises a sequence at least 91% identical to a sequence in Table 26A. In some embodiments, the antisense strand comprises a sequence at least 92% identical to a sequence in Table 26A. In some embodiments, the antisense strand comprises a sequence at least 93% identical to a sequence in Table 26A. In some embodiments, the antisense strand comprises a sequence at least 94% identical to a sequence in Table 26A. In some embodiments, the antisense strand comprises a sequence at least 95% identical to a sequence in Table 26A. In some embodiments, the antisense strand comprises a sequence at least 96% identical to a sequence in Table 26A. In some embodiments, the antisense strand comprises a sequence at least 97% identical to a sequence in Table 26A. In some embodiments, the antisense strand comprises a sequence at least 98% identical to a sequence in Table 26A. In some embodiments, the antisense strand comprises a sequence at least 99% identical to a sequence in Table 26A. In some embodiments, the antisense strand comprises a sequence less than 70% identical to a sequence in Table 26A. In some embodiments, the antisense strand comprises a sequence less than 75% identical to a sequence in Table 26A. In some embodiments, the antisense strand comprises a sequence less than 80% identical to a sequence in Table 26A. In some embodiments, the antisense strand comprises a sequence less than 84% identical to a sequence in Table 26A. In some embodiments, the antisense strand comprises a sequence less than 85% identical to a sequence in Table 26A. In some embodiments, the antisense strand comprises a sequence less than 89% identical to a sequence in Table 26A. In some embodiments, the antisense strand comprises a sequence less than 90% identical to a sequence in Table 26A. In some embodiments, the antisense strand comprises a sequence less than 91% identical to a sequence in Table 26A. In some embodiments, the antisense strand comprises a sequence less than 92% identical to a sequence in Table 26A. In some embodiments, the antisense strand comprises a sequence less than 93% identical to a sequence in Table 26A. In some embodiments, the antisense strand comprises a sequence less than 94% identical to a sequence in Table 26A. In some embodiments, the antisense strand comprises a sequence less than 95% identical to a sequence in Table 26A. In some embodiments, the antisense strand comprises a sequence less than 96% identical to a sequence in Table 26A. In some embodiments, the antisense strand comprises a sequence less than 97% identical to a sequence in Table 26A. In some embodiments, the antisense strand comprises a sequence less than 98% identical to a sequence in Table 26A. In some embodiments, the antisense strand comprises a sequence less than 99% identical to a sequence in Table 26A. In some embodiments, the antisense strand comprises a sequence 100% identical to a sequence in Table 26A. The antisense strand may exclude the 3′ UU overhang of a sequence in Table 26A. The antisense strand may include different modifications than a sequence in Table 26A.

[0222] In some embodiments, the sense strand comprises a sequence at least 70% identical to a sequence in Table 26C. In some embodiments, the sense strand comprises a sequence at least 75% identical to a sequence in Table 26C. In some embodiments, the sense strand comprises a sequence at least 80% identical to a sequence in Table 26C. In some embodiments, the sense strand comprises a sequence at least 84% identical to a sequence in Table 26C. In some embodiments, the sense strand comprises a sequence at least 85% identical to a sequence in Table 26C. In some embodiments, the sense strand comprises a sequence at least 89% identical to a sequence in Table 26C. In some embodiments, the sense strand comprises a sequence at least 90% identical to a sequence in Table 26C. In some embodiments, the sense strand comprises a sequence at least 91% identical to a sequence in Table 26C. In some embodiments, the sense strand comprises a sequence at least 92% identical to a sequence in Table 26C. In some embodiments, the sense strand comprises a sequence at least 93% identical to a sequence in Table 26C. In some embodiments, the sense strand comprises a sequence at least 94% identical to a sequence in Table 26C. In some embodiments, the sense strand comprises a sequence at least 95% identical to a sequence in Table 26C. In some embodiments, the sense strand comprises a sequence at least 96% identical to a sequence in Table 26C. In some embodiments, the sense strand comprises a sequence at least 97% identical to a sequence in Table 26C. In some embodiments, the sense strand comprises a sequence at least 98% identical to a sequence in Table 26C. In some embodiments, the sense strand comprises a sequence at least 99% identical to a sequence in Table 26C. In some embodiments, the sense strand comprises a sequence less than 70% identical to a sequence in Table 26C. In some embodiments, the sense strand comprises a sequence less than 75% identical to a sequence in Table 26C. In some embodiments, the sense strand comprises a sequence less than 80% identical to a sequence in Table 26C. In some embodiments, the sense strand comprises a sequence less than 84% identical to a sequence in Table 26C. In some embodiments, the sense strand comprises a sequence less than 85% identical to a sequence in Table 26C. In some embodiments, the sense strand comprises a sequence less than 89% identical to a sequence in Table 26C. In some embodiments, the sense strand comprises a sequence less than 90% identical to a sequence in Table 26C. In some embodiments, the sense strand comprises a sequence less than 91% identical to a sequence in Table 26C. In some embodiments, the sense strand comprises a sequence less than 92% identical to a sequence in Table 26C. In some embodiments, the sense strand comprises a sequence less than 93% identical to a sequence in Table 26C. In some embodiments, the sense strand comprises a sequence less than 94% identical to a sequence in Table 26C. In some embodiments, the sense strand comprises a sequence less than 95% identical to a sequence in Table 26C. In some embodiments, the sense strand comprises a sequence less than 96% identical to a sequence in Table 26C. In some embodiments, the sense strand comprises a sequence less than 97% identical to a sequence in Table 26C. In some embodiments, the sense strand comprises a sequence less than 98% identical to a sequence in Table 26C. In some embodiments, the sense strand comprises a sequence less than 99% identical to a sequence in Table 26C. In some embodiments, the sense strand comprises a sequence 100% identical to a sequence in Table 26C. The sense strand may exclude the 3′ UU overhang of a sequence in Table 26C. The sense strand may include different modifications than a sequence in Table 26C.

[0223] In some embodiments, the antisense strand comprises a sequence at least 70% identical to a sequence in Table 26C. In some embodiments, the antisense strand comprises a sequence at least 75% identical to a sequence in Table 26C. In some embodiments, the antisense strand comprises a sequence at least 80% identical to a sequence in Table 26C. In some embodiments, the antisense strand comprises a sequence at least 84% identical to a sequence in Table 26C. In some embodiments, the antisense strand comprises a sequence at least 85% identical to a sequence in Table 26C. In some embodiments, the antisense strand comprises a sequence at least 89% identical to a sequence in Table 26C. In some embodiments, the antisense strand comprises a sequence at least 90% identical to a sequence in Table 26C. In some embodiments, the antisense strand comprises a sequence at least 91% identical to a sequence in Table 26C. In some embodiments, the antisense strand comprises a sequence at least 92% identical to a sequence in Table 26C. In some embodiments, the antisense strand comprises a sequence at least 93% identical to a sequence in Table 26C. In some embodiments, the antisense strand comprises a sequence at least 94% identical to a sequence in Table 26C. In some embodiments, the antisense strand comprises a sequence at least 95% identical to a sequence in Table 26C. In some embodiments, the antisense strand comprises a sequence at least 96% identical to a sequence in Table 26C. In some embodiments, the antisense strand comprises a sequence at least 97% identical to a sequence in Table 26C. In some embodiments, the antisense strand comprises a sequence at least 98% identical to a sequence in Table 26C. In some embodiments, the antisense strand comprises a sequence at least 99% identical to a sequence in Table 26C. In some embodiments, the antisense strand comprises a sequence less than 70% identical to a sequence in Table 26C. In some embodiments, the antisense strand comprises a sequence less than 75% identical to a sequence in Table 26C. In some embodiments, the antisense strand comprises a sequence less than 80% identical to a sequence in Table 26C. In some embodiments, the antisense strand comprises a sequence less than 84% identical to a sequence in Table 26C. In some embodiments, the antisense strand comprises a sequence less than 85% identical to a sequence in Table 26C. In some embodiments, the antisense strand comprises a sequence less than 89% identical to a sequence in Table 26C. In some embodiments, the antisense strand comprises a sequence less than 90% identical to a sequence in Table 26C. In some embodiments, the antisense strand comprises a sequence less than 91% identical to a sequence in Table 26C. In some embodiments, the antisense strand comprises a sequence less than 92% identical to a sequence in Table 26C. In some embodiments, the antisense strand comprises a sequence less than 93% identical to a sequence in Table 26C. In some embodiments, the antisense strand comprises a sequence less than 94% identical to a sequence in Table 26C. In some embodiments, the antisense strand comprises a sequence less than 95% identical to a sequence in Table 26C. In some embodiments, the antisense strand comprises a sequence less than 96% identical to a sequence in Table 26C. In some embodiments, the antisense strand comprises a sequence less than 97% identical to a sequence in Table 26C. In some embodiments, the antisense strand comprises a sequence less than 98% identical to a sequence in Table 26C. In some embodiments, the antisense strand comprises a sequence less than 99% identical to a sequence in Table 26C. In some embodiments, the antisense strand comprises a sequence 100% identical to a sequence in Table 26C. The antisense strand may exclude the 3′ UU overhang of a sequence in Table 26C. The antisense strand may include different modifications than a sequence in Table 26C.

[0224] Disclosed herein, in some embodiments, is a composition comprising an oligonucleotide that targets Angiopoietin like 7 (ANGPTL7) and when administered to a cell decreases expression of ANGPTL7, wherein the oligonucleotide comprises a small interfering RNA (siRNA) comprising a sense strand and an antisense strand in which at least one internucleoside linkage is modified and at least one nucleoside is modified.

[0225] Disclosed herein, in some embodiments, is a composition comprising an oligonucleotide that targets Angiopoietin like 7 (ANGPTL7) and when administered to a cell decreases expression of ANGPTL7, wherein the oligonucleotide comprises a small interfering RNA (siRNA) comprising a sense strand and an antisense strand, wherein the sense strand comprises an oligonucleotide sequence of any one of SEQ ID NOs: 1-4412 in which at least one internucleoside linkage is modified and at least one nucleoside is modified, or an oligonucleotide sequence comprising 1 or 2 nucleoside substitutions, additions, or deletions of any one of SEQ ID NOs: 1-4412 in which at least one internucleoside linkage is modified and at least one nucleoside is modified, and wherein the antisense strand comprises an oligonucleotide sequence of any one of SEQ ID NOs: 4413-8824 in which at least one internucleoside linkage is modified and at least one nucleoside is modified, or an oligonucleotide sequence comprising 1 or 2 nucleoside substitutions, additions, or deletions of any one of SEQ ID NOs: 4413-8824 in which at least one internucleoside linkage is modified and at least one nucleoside is modified.

[0226] Disclosed herein, in some embodiments, is a composition comprising an oligonucleotide that targets Angiopoietin like 7 (ANGPTL7) and when administered to a cell decreases expression of ANGPTL7, wherein the oligonucleotide comprises a small interfering RNA (siRNA) comprising a sense strand and an antisense strand, wherein the sense strand comprises an oligonucleotide sequence of SEQ ID NOs: 1424, 1765, or 1796 in which at least one internucleoside linkage is modified and at least one nucleoside is modified, or an oligonucleotide sequence comprising 1 or 2 nucleoside substitutions, additions, or deletions of SEQ ID NOs: 1424, 1765, or 1796 in which at least one internucleoside linkage is modified and at least one nucleoside is modified, and wherein the antisense strand comprises an oligonucleotide sequence of SEQ ID NOs: 3630, 3971, or 4002 in which at least one internucleoside linkage is modified and at least one nucleoside is modified, or an oligonucleotide sequence comprising 1 or 2 nucleoside substitutions, additions, or deletions of SEQ ID NOs: 3630, 3971, or 4002 in which at least one internucleoside linkage is modified and at least one nucleoside is modified.

[0227] Disclosed herein, in some embodiments, is a composition comprising an oligonucleotide that targets Angiopoietin like 7 (ANGPTL7) and when administered to a cell decreases expression of ANGPTL7, wherein the oligonucleotide comprises a small interfering RNA (siRNA) comprising a sense strand and an antisense strand, wherein the sense strand comprises an oligonucleotide sequence of any one of SEQ ID NOs: 11805-11819 in which at least one internucleoside linkage is modified and at least one nucleoside is modified, or an oligonucleotide sequence comprising 1 or 2 nucleoside substitutions, additions, or deletions of any one of SEQ ID NOs: 11805-11819 in which at least one internucleoside linkage is modified and at least one nucleoside is modified, and wherein the antisense strand comprises an oligonucleotide sequence of any one of SEQ ID NOs: 11820-11834 in which at least one internucleoside linkage is modified and at least one nucleoside is modified, or an oligonucleotide sequence comprising 1 or 2 nucleoside substitutions, additions, or deletions of any one of SEQ ID NOs: 11820-11834 in which at least one internucleoside linkage is modified and at least one nucleoside is modified.

[0228] Disclosed herein, in some embodiments, is a composition comprising an oligonucleotide that targets Angiopoietin like 7 (ANGPTL7) and when administered to a cell decreases expression of ANGPTL7, wherein the oligonucleotide comprises a small interfering RNA (siRNA) comprising a sense strand and an antisense strand, wherein the sense strand comprises an oligonucleotide sequence of any one of SEQ ID NOs: 11805-11809 in which at least one internucleoside linkage is modified and at least one nucleoside is modified, or an oligonucleotide sequence comprising 1 or 2 nucleoside substitutions, additions, or deletions of any one of SEQ ID NOs: 11805-11809 in which at least one internucleoside linkage is modified and at least one nucleoside is modified, and wherein the antisense strand comprises an oligonucleotide sequence of any one of SEQ ID NOs: 11820-11824 in which at least one internucleoside linkage is modified and at least one nucleoside is modified, or an oligonucleotide sequence comprising 1 or 2 nucleoside substitutions, additions, or deletions of any one of SEQ ID NOs: 11820-11824 in which at least one internucleoside linkage is modified and at least one nucleoside is modified.

[0229] Disclosed herein, in some embodiments, is a composition comprising an oligonucleotide that targets Angiopoietin like 7 (ANGPTL7) and when administered to a cell decreases expression of ANGPTL7, wherein the oligonucleotide comprises a small interfering RNA (siRNA) comprising a sense strand and an antisense strand, wherein the sense strand comprises an oligonucleotide sequence of any one of SEQ ID NOs: 11810-11814 in which at least one internucleoside linkage is modified and at least one nucleoside is modified, or an oligonucleotide sequence comprising 1 or 2 nucleoside substitutions, additions, or deletions of any one of SEQ ID NOs: 11810-11814 in which at least one internucleoside linkage is modified and at least one nucleoside is modified, and wherein the antisense strand comprises an oligonucleotide sequence of any one of SEQ ID NOs: 11825-11829 in which at least one internucleoside linkage is modified and at least one nucleoside is modified, or an oligonucleotide sequence comprising 1 or 2 nucleoside substitutions, additions, or deletions of any one of SEQ ID NOs: 11825-11829 in which at least one internucleoside linkage is modified and at least one nucleoside is modified.

[0230] Disclosed herein, in some embodiments, is a composition comprising an oligonucleotide that targets Angiopoietin like 7 (ANGPTL7) and when administered to a cell decreases expression of ANGPTL7, wherein the oligonucleotide comprises a small interfering RNA (siRNA) comprising a sense strand and an antisense strand, wherein the sense strand comprises an oligonucleotide sequence of any one of SEQ ID NOs: 11815-11819 in which at least one internucleoside linkage is modified and at least one nucleoside is modified, or an oligonucleotide sequence comprising 1 or 2 nucleoside substitutions, additions, or deletions of any one of SEQ ID NOs: 11815-11819 in which at least one internucleoside linkage is modified and at least one nucleoside is modified, and wherein the antisense strand comprises an oligonucleotide sequence of any one of SEQ ID NOs: 11830-11834 in which at least one internucleoside linkage is modified and at least one nucleoside is modified, or an oligonucleotide sequence comprising 1 or 2 nucleoside substitutions, additions, or deletions of any one of SEQ ID NOs: 11830-11834 in which at least one internucleoside linkage is modified and at least one nucleoside is modified.

siRNAs

[0231] In some embodiments, the composition comprises an oligonucleotide that targets ANGPTL7, wherein the oligonucleotide comprises a small interfering RNA (siRNA). In some embodiments, the composition comprises an oligonucleotide that targets ANGPTL7, wherein the oligonucleotide comprises an siRNA comprising a sense strand and an antisense strand. In some embodiments, the siRNA comprises a double stranded agent described herein.

[0232] In some embodiments, the composition comprises an oligonucleotide that inhibits the expression of ANGPTL7, wherein the oligonucleotide comprises a siRNA comprising a sense strand and an antisense strand, wherein the sense strand is 14-30 nucleosides in length. In some embodiments, the composition comprises a sense strange that is at least about 10, 11, 12, 13, 14, 15, 16, 17, 18,19, 20, 21, 22, 23, 24, 25, 26, 27, 28, 29, or 30 nucleosides in length, or a range defined by any of the two aforementioned numbers. In some embodiments, the composition comprises an antisense strand is 14-30 nucleosides in length. In some embodiments, the composition comprises an antisense strange that is at least about 10, 11, 12, 13, 14, 15, 16, 17, 18,19, 20, 21, 22, 23, 24, 25, 26, 27, 28, 29, or 30 nucleosides in length, or a range defined by any of the two aforementioned numbers.

[0233] In some embodiments, the composition comprises an oligonucleotide that inhibits the expression of ANGPTL7, wherein the oligonucleotide comprises a siRNA comprising a sense strand and an antisense strand, each strand is independently about 14-30 nucleosides in length, and at least one of the sense strand and the antisense strand comprises a nucleoside sequence comprising about 14-30 contiguous nucleosides of a full-length human ANGPTL7 mRNA sequence such as SEQ ID NO: 11085. In some embodiments, at least one of the sense strand and the antisense strand comprise a nucleoside sequence comprising at least about 10, 11, 12, 13, 14, 15, 16, 17, 18, 19, 20, 21, 22, 23, 24, 25, 26, 27, 28, 29, 30, or more contiguous nucleosides of one of SEQ ID NO: 11085.

[0234] In some embodiments, the composition comprises an oligonucleotide that inhibits the expression of ANGPTL7, wherein the oligonucleotide comprises a siRNA comprising a sense strand and an antisense strand, each strand is independently about 14-30 nucleosides in length, and at least one of the sense strand and the antisense strand comprises a nucleoside sequence comprising about 14-30 contiguous nucleosides of a full-length human ANGPTL7 mRNA sequence such as SEQ ID NO: 11086. In some embodiments, at least one of the sense strand and the antisense strand comprise a nucleoside sequence comprising at least about 10, 11, 12, 13, 14, 15, 16, 17, 18, 19, 20, 21, 22, 23, 24, 25, 26, 27, 28, 29, 30, or more contiguous nucleosides of one of SEQ ID NO: 11086.

[0235] In some embodiments, the composition comprises an oligonucleotide that inhibits the expression of ANGPTL7, wherein the oligonucleotide comprises a siRNA comprising a sense strand and an antisense strand, each strand is independently about 14-30 nucleosides in length, and at least one of the sense strand and the antisense strand comprises a nucleoside sequence comprising about 14-30 contiguous nucleosides of a full-length human ANGPTL7 mRNA sequence such as SEQ ID NO: 11086. In some embodiments, the sense strand comprises a nucleoside sequence comprising at least about 10, 11, 12, 13, 14, 15, 16, 17, 18, or 19 contiguous nucleosides of SEQ ID NO: 1424. In some embodiments, the sense strand comprises a nucleoside sequence comprising at least about 10, 11, 12, 13, 14, 15, 16, 17, 18, or 19 contiguous nucleosides of SEQ ID NO: 1765. In some embodiments, the sense strand comprises a nucleoside sequence comprising at least about 10, 11, 12, 13, 14, 15, 16, 17, 18, or 19 contiguous nucleosides of SEQ ID NO: 1796.

[0236] In some embodiments, the composition comprises an oligonucleotide that inhibits the expression of ANGPTL7, wherein the oligonucleotide comprises a siRNA comprising a sense strand and an antisense strand, wherein the sense strand and the antisense strand form a double-stranded RNA duplex. In some embodiments, the first base pair of the double-stranded RNA duplex is an AU base pair.

[0237] In some embodiments, the sense strand further comprises a 3′ overhang. In some embodiments, the 3′ overhang comprises 1, 2, 3, 4, 5, 6, 7, 8, 9, or 10 nucleosides, or a range of nucleotides defined by any two of the aforementioned numbers. In some embodiments, the 3′ overhang comprises 1, 2, or more nucleosides. In some embodiments, the 3′ overhang comprises 2 nucleosides. In some embodiments, the sense strand further comprises a 5′ overhang. In some embodiments, the 5′ overhang comprises 1, 2, 3, 4, 5, 6, 7, 8, 9, or 10 nucleosides, or a range of nucleotides defined by any two of the aforementioned numbers. In some embodiments, the 5′ overhang comprises 1, 2, or more nucleosides. In some embodiments, the 5′ overhang comprises 2 nucleosides.

[0238] In some embodiments, the antisense strand further comprises a 3′ overhang. In some embodiments, the 3′ overhang comprises 1, 2, 3, 4, 5, 6, 7, 8, 9, or 10 nucleosides, or a range of nucleotides defined by any two of the aforementioned numbers. In some embodiments, the 3′ overhang comprises 1, 2, or more nucleosides. In some embodiments, the 3′ overhang comprises 2 nucleosides. In some embodiments, the antisense strand further comprises a 5′ overhang. In some embodiments, the 5′ overhang comprises 1, 2, 3, 4, 5, 6, 7, 8, 9, or 10 nucleosides, or a range of nucleotides defined by any two of the aforementioned numbers. In some embodiments, the 5′ overhang comprises 1, 2, or more nucleosides. In some embodiments, the 5′ overhang comprises 2 nucleosides.

[0239] In some embodiments, the composition comprises an oligonucleotide that inhibits the expression of ANGPTL7, wherein the oligonucleotide comprises a siRNA comprising a sense strand and an antisense strand, wherein the siRNA binds with a 19mer in a human ANGPTL7 mRNA. In some embodiments, the siRNA binds with a 12mer, a 13mer, a 14mer, a 15mer, a 16mer, a 17mer, a 18mer, a 19mer, a 20mer, a 21mer, a 22mer, a 23mer, a 24mer, or a 25mer in a human ANGPTL7 mRNA.

[0240] In some embodiments, the composition comprises an oligonucleotide that inhibits the expression of ANGPTL7, wherein the oligonucleotide comprises a siRNA comprising a sense strand and an antisense strand, wherein the siRNA binds with a 17mer in a non-human primate ANGPTL7 mRNA. In some embodiments, the siRNA binds with a 12mer, a 13mer, a 14mer, a 15mer, a 16mer, a 17mer, a 18mer, a 19mer, a 20mer, a 21mer, a 22mer, a 23mer, a 24mer, or a 25mer in a non-human primate ANGPTL7 mRNA.

[0241] In some embodiments, the composition comprises an oligonucleotide that inhibits the expression of ANGPTL7, wherein the oligonucleotide comprises a siRNA comprising a sense strand and an antisense strand, wherein the siRNA binds with a 19mer in a human ANGPTL7 mRNA, or a combination thereof. In some embodiments, the siRNA binds with a 12mer, a 13mer, a 14mer, a 15mer, a 16mer, a 17mer, and 18mer, a 19mer, a 20mer, a 21mer, a 22mer, a 23mer, a 24mer, or a 25mer in a human ANGPTL7 mRNA.

[0242] In some embodiments, the composition comprises an oligonucleotide that inhibits the expression of ANGPTL7, wherein the oligonucleotide comprises a siRNA comprising a sense strand and an antisense strand, wherein the siRNA binds with a human ANGPTL7 mRNA and less than or equal to 20 human off-targets, with no more than 2 mismatches in the antisense strand. In some embodiments, the siRNA binds with a human ANGPTL7 mRNA and less than or equal to 10 human off-targets, with no more than 2 mismatches in the antisense strand. In some embodiments, the siRNA binds with a human ANGPTL7 mRNA and less than or equal to 30 human off-targets, with no more than 2 mismatches in the antisense strand. In some embodiments, the siRNA binds with a human ANGPTL7 mRNA and less than or equal to 40 human off-targets, with no more than 2 mismatches in the antisense strand. In some embodiments, the siRNA binds with a human ANGPTL7 mRNA and less than or equal to 50 human off-targets, with no more than 2 mismatches in the antisense strand. In some embodiments, the siRNA binds with a human ANGPTL7 mRNA and less than or equal to 10 human off-targets, with no more than 3 mismatches in the antisense strand. In some embodiments, the siRNA binds with a human ANGPTL7 mRNA and less than or equal to 20 human off-targets, with no more than 3 mismatches in the antisense strand. In some embodiments, the siRNA binds with a human ANGPTL7 mRNA and less than or equal to 30 human off-targets, with no more than 3 mismatches in the antisense strand. In some embodiments, the siRNA binds with a human ANGPTL7 mRNA and less than or equal to 40 human off-targets, with no more than 3 mismatches in the antisense strand. In some embodiments, the siRNA binds with a human ANGPTL7 mRNA and less than or equal to 50 human off-targets, with no more than 3 mismatches in the antisense strand.

[0243] In some embodiments, the composition comprises an oligonucleotide that inhibits the expression of ANGPTL7, wherein the oligonucleotide comprises a siRNA comprising a sense strand and an antisense strand. In some embodiments, the siRNA binds with a human ANGPTL7 mRNA target site that does not harbor an SNP, with a minor allele frequency (MAF) greater or equal to 1% (pos. 2-18). In some embodiments, the MAF is greater or equal to about 2%, about 3%, about 4%, about 5%, about 6%, about 7%, about 8%, about 9%, about 10%, about 11%, about 12%, about 13%, about 14%, about 15%, about 16%, about 17%, about 18%, about 19%, or about 20%.

[0244] In some embodiments, the siRNA binds with a human ANGPTL7 mRNA with no more than 2 mismatches in the antisense strand. In some embodiments, the siRNA binds with a human ANGPTL7 mRNA target site that does not harbor an SNP, with a minor allele frequency (MAF) greater or equal to 1% (pos. 2-18). In some embodiments, the sense strand and the antisense strand each comprise a seed region that is not identical to a seed region of a human miRNA. In some embodiments, the sense strand comprises a seed region that is not identical to a seed region of a human miRNA. In some embodiments, the antisense strand comprises a seed region that is not identical to a seed region of a human miRNA.

[0245] In some embodiments, the composition comprises an oligonucleotide that inhibits the expression of ANGPTL7, wherein the oligonucleotide comprises a siRNA comprising a sense strand and an antisense strand. In some embodiments, the oligonucleotide comprises a nucleic acid sequence (e.g. a sense strand sequence or an antisense strand sequence). In some embodiments, the sense strand comprises a sense strand sequence. In some embodiments, the antisense strand comprises an antisense strand sequence. In some embodiments, the nucleic acid sequence comprises or consists of a sequence at least 75% identical to of any one of SEQ ID NOs: 1-4412, at least 80% identical to of any one of SEQ ID NOs: 1-4412, at least 85% identical to of any one of SEQ ID NOs: 1-4412, at least 90% identical to of any one of SEQ ID NOs: 1-4412, or at least 95% identical to of any one of SEQ ID NOs: 1-4412. In some embodiments, the nucleic acid sequence comprises or consists of the sequence of any one of SEQ ID NOs: 1-4412, or a nucleic acid sequence thereof having 1, 2, 3, or 4 nucleoside substitutions, additions, or deletions. In some embodiments, the nucleic acid sequence comprises or consists of the sequence of any one of SEQ ID NOs: 1-4412, or a nucleic acid sequence thereof having 1 or 2 nucleoside substitutions, additions, or deletions. In some embodiments, the nucleic acid sequence comprises or consists of the sequence of any one of SEQ ID NOs: 1-4412. In some embodiments, the nucleic acid sequence comprises or consists of a sequence at least 75% identical to of any one of SEQ ID NOs: 11450-11499, at least 80% identical to of any one of SEQ ID NOs: 11450-11499, at least 85% identical to of any one of SEQ ID NOs: 11450-11499, at least 90% identical to of any one of SEQ ID NOs: 11450-11499, or at least 95% identical to of any one of SEQ ID NOs: 11450-11499. In some embodiments, the nucleic acid sequence comprises or consists of the sequence of any one of SEQ ID NOs: 11450-11499, or a nucleic acid sequence thereof having 1, 2, 3, or 4 nucleoside substitutions, additions, or deletions. In some embodiments, the nucleic acid sequence comprises or consists of the sequence of any one of SEQ ID NOs: 11450-11499, or a nucleic acid sequence thereof having 1 or 2 nucleoside substitutions, additions, or deletions. In some embodiments, the nucleic acid sequence comprises or consists of the sequence of any one of SEQ ID NOs: 11450-11499. In some embodiments, the oligonucleotide comprises an overhang described herein. In some embodiments, the oligonucleotide comprises on or more modifications or modification patterns described herein.

[0246] In some embodiments, the nucleic acid sequence comprises or consists of a sequence at least 75% identical to of any one of SEQ ID NOs: 11106, 11129, 11130, 11133, 11134, 11135, 11177, 11178, 11205, 11207, 11208, 11211, 11212, 11226, 11249, 11250, 11253, 11254, 11255, 11297, 11298, 11325, 11327, 11328, 11331, 11332, or 11643-11710, at least 80% identical to of any one of SEQ ID NOs: 11106, 11129, 11130, 11133, 11134, 11135, 11177, 11178, 11205, 11207, 11208, 11211, 11212, 11226, 11249, 11250, 11253, 11254, 11255, 11297, 11298, 11325, 11327, 11328, 11331, 11332, or 11643-11710, at least 85% identical to of any one of SEQ ID NOs: 11106, 11129, 11130, 11133, 11134, 11135, 11177, 11178, 11205, 11207, 11208, 11211, 11212, 11226, 11249, 11250, 11253, 11254, 11255, 11297, 11298, 11325, 11327, 11328, 11331, 11332, or 11643-11710, at least 90% identical to of any one of SEQ ID NOs: 11106, 11129, 11130, 11133, 11134, 11135, 11177, 11178, 11205, 11207, 11208, 11211, 11212, 11226, 11249, 11250, 11253, 11254, 11255, 11297, 11298, 11325, 11327, 11328, 11331, 11332, or 11643-11710, or at least 95% identical to of any one of SEQ ID NOs: 11106, 11129, 11130, 11133, 11134, 11135, 11177, 11178, 11205, 11207, 11208, 11211, 11212, 11226, 11249, 11250, 11253, 11254, 11255, 11297, 11298, 11325, 11327, 11328, 11331, 11332, or 11643-11710. In some embodiments, the nucleic acid sequence comprises or consists of the sequence of any one of SEQ ID NOs: 11106, 11129, 11130, 11133, 11134, 11135, 11177, 11178, 11205, 11207, 11208, 11211, 11212, 11226, 11249, 11250, 11253, 11254, 11255, 11297, 11298, 11325, 11327, 11328, 11331, 11332, or 11643-11710, or a nucleic acid sequence thereof having 1, 2, 3, or 4 nucleoside substitutions, additions, or deletions. In some embodiments, the nucleic acid sequence comprises or consists of the sequence of any one of SEQ ID NOs: 11106, 11129, 11130, 11133, 11134, 11135, 11177, 11178, 11205, 11207, 11208, 11211, 11212, 11226, 11249, 11250, 11253, 11254, 11255, 11297, 11298, 11325, 11327, 11328, 11331, 11332, or 11643-11710, or a nucleic acid sequence thereof having 1 or 2 nucleoside substitutions, additions, or deletions. In some embodiments, the nucleic acid sequence comprises or consists of the sequence of any one of SEQ ID NOs: 11106, 11129, 11130, 11133, 11134, 11135, 11177, 11178, 11205, 11207, 11208, 11211, 11212, 11226, 11249, 11250, 11253, 11254, 11255, 11297, 11298, 11325, 11327, 11328, 11331, 11332, or 11643-11710. In some embodiments, the oligonucleotide comprises or excludes an overhang of one of these siRNAs. In some embodiments, the oligonucleotide comprises on or more modifications or modification patterns described herein, or a different modification pattern than any of said siRNAs.

[0247] In some embodiments, the oligonucleotide comprises or consists of any one of the siRNAs of siRNA subset A, or an siRNA thereof having 1 or 2 nucleoside substitutions, additions, or deletions. In some embodiments, the oligonucleotide comprises or consists of any one of the siRNAs of siRNA subset A. In some embodiments, the oligonucleotide comprises or consists of any one of the siRNAs of siRNA subset B, or an siRNA thereof having 1 or 2 nucleoside substitutions, additions, or deletions. In some embodiments, the oligonucleotide comprises or consists of any one of the siRNAs of siRNA subset B. In some embodiments, the oligonucleotide comprises or consists of any one of the siRNAs of siRNA subset C, or an siRNA thereof having 1 or 2 nucleoside substitutions, additions, or deletions. In some embodiments, the oligonucleotide comprises or consists of any one of the siRNAs of siRNA subset C. In some embodiments, the oligonucleotide comprises or consists of any one of the siRNAs of siRNA subset D, or an siRNA thereof having 1 or 2 nucleoside substitutions, additions, or deletions. In some embodiments, the oligonucleotide comprises or consists of any one of the siRNAs of siRNA subset D. In some embodiments, the oligonucleotide comprises or consists of any one of the siRNAs of siRNA subset E, or an siRNA thereof having 1 or 2 nucleoside substitutions, additions, or deletions. In some embodiments, the oligonucleotide comprises or consists of any one of the siRNAs of siRNA subset E.

[0248] In some embodiments, the sense strand sequence comprises or consists of a sequence at least 75% identical to of any one of SEQ ID NOs: 1-2206, at least 80% identical to of any one of SEQ ID NOs: 1-2206, at least 85% identical to of any one of SEQ ID NOs: 1-2206, at least 90% identical to of any one of SEQ ID NOs: 1-2206, or at least 95% identical to of any one of SEQ ID NOs: 1-2206. In some embodiments, the sense strand sequence comprises or consists of the sequence of any one of SEQ ID NOs: 1-2206, or a sense strand sequence thereof having 1, 2, 3, or 4 nucleoside substitutions, additions, or deletions. In some embodiments, the sense strand sequence comprises or consists of the sequence of any one of SEQ ID NOs: 1-2206, or a sense strand sequence thereof having 1 or 2 nucleoside substitutions, additions, or deletions. In some embodiments, the sense strand sequence comprises or consists of the sequence of any one of SEQ ID NOs: 1-2206. In some embodiments, the sense strand comprises an overhang described herein. In some embodiments, the sense strand comprises one or more modifications or modification patterns described herein.

[0249] In some embodiments, the sense strand sequence comprises or consists of a sequence at least 75% identical to of any one of SEQ ID NOs: 11450-11474, at least 80% identical to of any one of SEQ ID NOs: 11450-11474, at least 85% identical to of any one of SEQ ID NOs: 11450-11474, at least 90% identical to of any one of SEQ ID NOs: 11450-11474, or at least 95% identical to any one of SEQ ID NOs: 11450-11474. In some embodiments, the sense strand sequence comprises or consists of the sequence of any one of SEQ ID NOs: 11450-11474, or a sense strand sequence thereof having 1, 2, 3, or 4 nucleoside substitutions, additions, or deletions. In some embodiments, the sense strand sequence comprises or consists of the sequence of any one of SEQ ID NOs: 11450-11474, or a sense strand sequence thereof having 1 or 2 nucleoside substitutions, additions, or deletions. In some embodiments, the sense strand sequence comprises or consists of the sequence of any one of SEQ ID NOs: 11450-11474. In some embodiments, the sense strand comprises an overhang described herein. In some embodiments, the sense strand comprises one or more modifications or modification patterns described herein.

[0250] In some embodiments, the sense strand sequence comprises or consists of a sequence at least 75% identical, at least 80% identical, at least 85% identical, at least 90% identical, or at least 95% identical to of any one of SEQ ID NOs: 7, 92, 93, 94, 115, 117, 118, 120, 206, 207, 256, 645, 646, 657, 740, 741, 743, 923, 943, 948, 1021, 1092, 1094, 1097, 1105, 1107, 1132, 1198, 1201, 1424, 1425, 1429, 1434, 1436, 1438, 1537, 1541, 1639, 1654, 1691, 1693, 1762, 1764, 1765, 1794, 1796, 1797, 1968, 1969, 2030, 2085, 2087, 2091, 2095, 2099, 2192, 11470, 11473, or 11474. In some embodiments, the sense strand sequence comprises or consists of the sequence of any one of SEQ ID NOs: 7, 92, 93, 94, 115, 117, 118, 120, 206, 207, 256, 645, 646, 657, 740, 741, 743, 923, 943, 948, 1021, 1092, 1094, 1097, 1105, 1107, 1132, 1198, 1201, 1424, 1425, 1429, 1434, 1436, 1438, 1537, 1541, 1639, 1654, 1691, 1693, 1762, 1764, 1765, 1794, 1796, 1797, 1968, 1969, 2030, 2085, 2087, 2091, 2095, 2099, 2192, 11470, 11473, or 11474, or a sense strand sequence thereof having 1, 2, 3, or 4 nucleoside substitutions, additions, or deletions. In some embodiments, the sense strand sequence comprises or consists of the sequence of any one of SEQ ID NOs: 7, 92, 93, 94, 115, 117, 118, 120, 206, 207, 256, 645, 646, 657, 740, 741, 743, 923, 943, 948, 1021, 1092, 1094, 1097, 1105, 1107, 1132, 1198, 1201, 1424, 1425, 1429, 1434, 1436, 1438, 1537, 1541, 1639, 1654, 1691, 1693, 1762, 1764, 1765, 1794, 1796, 1797, 1968, 1969, 2030, 2085, 2087, 2091, 2095, 2099, 2192, 11470, 11473, or 11474, or a sense strand sequence thereof having 1 or 2 nucleoside substitutions, additions, or deletions. In some embodiments, the sense strand sequence comprises or consists of the sequence of any one of SEQ ID NOs: 7, 92, 93, 94, 115, 117, 118, 120, 206, 207, 256, 645, 646, 657, 740, 741, 743, 923, 943, 948, 1021, 1092, 1094, 1097, 1105, 1107, 1132, 1198, 1201, 1424, 1425, 1429, 1434, 1436, 1438, 1537, 1541, 1639, 1654, 1691, 1693, 1762, 1764, 1765, 1794, 1796, 1797, 1968, 1969, 2030, 2085, 2087, 2091, 2095, 2099, 2192, 11470, 11473, or 11474. In some embodiments, the sense strand comprises an overhang described herein.

[0251] In some embodiments, the sense strand sequence comprises or consists of a sequence at least 75% identical to of any one of SEQ ID NOs: 11106, 11129, 11130, 11133, 11134, 11135, 11177, 11178, 11205, 11207, 11208, 11211, 11212, or 11643-11676, at least 80% identical to of any one of SEQ ID NOs: 11450-11474, at least 85% identical to of any one of SEQ ID NOs: 11106, 11129, 11130, 11133, 11134, 11135, 11177, 11178, 11205, 11207, 11208, 11211, 11212, or 11643-11676, at least 90% identical to of any one of SEQ ID NOs: 11106, 11129, 11130, 11133, 11134, 11135, 11177, 11178, 11205, 11207, 11208, 11211, 11212, or 11643-11676, or at least 95% identical to any one of SEQ ID NOs: 11106, 11129, 11130, 11133, 11134, 11135, 11177, 11178, 11205, 11207, 11208, 11211, 11212, or 11643-11676. In some embodiments, the sense strand sequence comprises or consists of the sequence of any one of SEQ ID NOs: 11450-11474, or a sense strand sequence thereof having 1, 2, 3, or 4 nucleoside substitutions, additions, or deletions. In some embodiments, the sense strand sequence comprises or consists of the sequence of any one of SEQ ID NOs: 11106, 11129, 11130, 11133, 11134, 11135, 11177, 11178, 11205, 11207, 11208, 11211, 11212, or 11643-11676, or a sense strand sequence thereof having 1 or 2 nucleoside substitutions, additions, or deletions. In some embodiments, the sense strand sequence comprises or consists of the sequence of any one of SEQ ID NOs: 11106, 11129, 11130, 11133, 11134, 11135, 11177, 11178, 11205, 11207, 11208, 11211, 11212, or 11643-11676. In some embodiments, the sense strand comprises an overhang described herein. In some embodiments, the sense strand comprises one or more modifications or modification patterns described herein.

[0252] In some embodiments, the sense strand comprises or consists of a sense strand of any one of the siRNAs of siRNA subset A, or a sense strand thereof having 1 or 2 nucleoside substitutions, additions, or deletions. In some embodiments, the sense strand comprises or consists of a sense strand of any one of the siRNAs of siRNA subset A. In some embodiments, the sense strand comprises or consists of a sense strand of any one of the siRNAs of siRNA subset B, or a sense strand thereof having 1 or 2 nucleoside substitutions, additions, or deletions. In some embodiments, the sense strand comprises or consists of a sense strand of any one of the siRNAs of siRNA subset B. In some embodiments, the sense strand comprises or consists of a sense strand of any one of the siRNAs of siRNA subset C, or a sense strand thereof having 1 or 2 nucleoside substitutions, additions, or deletions. In some embodiments, the sense strand comprises or consists of a sense strand of any one of the siRNAs of siRNA subset C. In some embodiments, the sense strand comprises or consists of a sense strand of any one of the siRNAs of siRNA subset D, or a sense strand thereof having 1 or 2 nucleoside substitutions, additions, or deletions. In some embodiments, the sense strand comprises or consists of a sense strand of any one of the siRNAs of siRNA subset D. In some embodiments, the sense strand comprises or consists of a sense strand of any one of the siRNAs of siRNA subset E, or a sense strand thereof having 1 or 2 nucleoside substitutions, additions, or deletions. In some embodiments, the sense strand comprises or consists of a sense strand of any one of the siRNAs of siRNA subset E.

[0253] In some embodiments, the sense strand sequence comprises or consists of the sequence of SEQ ID NO: 11089, or a sense strand sequence thereof having 1 or 2 nucleoside substitutions, additions, or deletions. In some embodiments, the sense strand sequence comprises or consists of the sequence of SEQ ID NO: 11089.

[0254] In some embodiments, the antisense strand sequence comprises or consists of a sequence at least 75% identical to any one of SEQ ID NOs: 2207-4412, at least 80% identical to any one of SEQ ID NOs: 2207-4412, at least 85% identical to of any one of SEQ ID NOs: 2207-4412, at least 90% identical to any one of SEQ ID NOs: 2207-4412, or at least 95% identical to any one of SEQ ID NOs: 2207-4412. In some embodiments, the antisense strand sequence comprises or consists of the sequence of any one of SEQ ID NOs: 2207-4412, or an antisense strand sequence thereof having 1, 2, 3, or 4 nucleoside substitutions, additions, or deletions. In some embodiments, the antisense strand sequence comprises or consists of the sequence of any one of SEQ ID NOs: 2207-4412, or an antisense strand sequence thereof having 1 or 2 nucleoside substitutions, additions, or deletions. In some embodiments, the antisense strand sequence comprises or consists of the sequence of any one of SEQ ID NOs: 2207-4412. In some embodiments, the antisense strand comprises an overhang described herein. In some embodiments, the antisense strand comprises one or more modifications or modification patterns described herein.

[0255] In some embodiments, the antisense strand sequence comprises or consists of a sequence at least 75% identical to any one of SEQ ID NOs: 11475-11499, at least 80% identical to any one of SEQ ID NOs: 11475-11499, at least 85% identical to any one of SEQ ID NOs: 11475-11499, at least 90% identical to any one of SEQ ID NOs: 11475-11499, or at least 95% identical to any one of SEQ ID NOs: 11475-11499. In some embodiments, the antisense strand sequence comprises or consists of the sequence of any one of SEQ ID NOs: 11475-11499, or an antisense strand sequence thereof having 1, 2, 3, or 4 nucleoside substitutions, additions, or deletions. In some embodiments, the antisense strand sequence comprises or consists of the sequence of any one of SEQ ID NOs: 11475-11499, or an antisense strand sequence thereof having 1 or 2 nucleoside substitutions, additions, or deletions. In some embodiments, the antisense strand sequence comprises or consists of the sequence of any one of SEQ ID NOs: 11475-11499. In some embodiments, the antisense strand comprises an overhang described herein. In some embodiments, the antisense strand comprises one or more modifications or modification patterns described herein.

[0256] In some embodiments, the antisense strand sequence comprises or consists of a sequence at least 75% identical, at least 80% identical, at least 85% identical, at least 90% identical, or at least 95% identical to any one of SEQ ID NOs: 2213, 2298, 2299, 2300, 2321, 2323, 2324, 2326, 2412, 2413, 2462, 2851, 2852, 2863, 2946, 2947, 2949, 3129, 3149, 3154, 3227, 3298, 3300, 3303, 3311, 3313, 3338, 3404, 3407, 3630, 3631, 3635, 3640, 3642, 3644, 3743, 3747, 3845, 3860, 3897, 3899, 3968, 3970, 3971, 4000, 4002, 4003, 4174, 4175, 4236, 4291, 4293, 4297, 4301, 4305, 4398, 11495, 11498, or 11499. In some embodiments, the antisense strand sequence comprises or consists of the sequence of any one of SEQ ID NOs: 2213, 2298, 2299, 2300, 2321, 2323, 2324, 2326, 2412, 2413, 2462, 2851, 2852, 2863, 2946, 2947, 2949, 3129, 3149, 3154, 3227, 3298, 3300, 3303, 3311, 3313, 3338, 3404, 3407, 3630, 3631, 3635, 3640, 3642, 3644, 3743, 3747, 3845, 3860, 3897, 3899, 3968, 3970, 3971, 4000, 4002, 4003, 4174, 4175, 4236, 4291, 4293, 4297, 4301, 4305, 4398, 11495, 11498, or 11499, or an antisense strand sequence thereof having 1, 2, 3, or 4 nucleoside substitutions, additions, or deletions. In some embodiments, the antisense strand sequence comprises or consists of the sequence of any one of SEQ ID NOs: 2213, 2298, 2299, 2300, 2321, 2323, 2324, 2326, 2412, 2413, 2462, 2851, 2852, 2863, 2946, 2947, 2949, 3129, 3149, 3154, 3227, 3298, 3300, 3303, 3311, 3313, 3338, 3404, 3407, 3630, 3631, 3635, 3640, 3642, 3644, 3743, 3747, 3845, 3860, 3897, 3899, 3968, 3970, 3971, 4000, 4002, 4003, 4174, 4175, 4236, 4291, 4293, 4297, 4301, 4305, 4398, 11495, 11498, or 11499, or an antisense strand sequence thereof having 1 or 2 nucleoside substitutions, additions, or deletions. In some embodiments, the antisense strand sequence comprises or consists of the sequence of any one of SEQ ID NOs: 2213, 2298, 2299, 2300, 2321, 2323, 2324, 2326, 2412, 2413, 2462, 2851, 2852, 2863, 2946, 2947, 2949, 3129, 3149, 3154, 3227, 3298, 3300, 3303, 3311, 3313, 3338, 3404, 3407, 3630, 3631, 3635, 3640, 3642, 3644, 3743, 3747, 3845, 3860, 3897, 3899, 3968, 3970, 3971, 4000, 4002, 4003, 4174, 4175, 4236, 4291, 4293, 4297, 4301, 4305, 4398, 11495, 11498, or 11499. In some embodiments, the antisense strand comprises an overhang described herein. In some embodiments, the antisense strand comprises one or more modifications or modification patterns described herein.

[0257] In some embodiments, the antisense strand sequence comprises or consists of a sequence at least 75% identical to any one of SEQ ID NOs: 11226, 11249, 11250, 11253, 11254, 11255, 11297, 11298, 11325, 11327, 11328, 11331, 11332, or 11677-11710, at least 80% identical to any one of SEQ ID NOs: 11226, 11249, 11250, 11253, 11254, 11255, 11297, 11298, 11325, 11327, 11328, 11331, 11332, or 11677-11710, at least 85% identical to any one of SEQ ID NOs: 11226, 11249, 11250, 11253, 11254, 11255, 11297, 11298, 11325, 11327, 11328, 11331, 11332, or 11677-11710, at least 90% identical to any one of SEQ ID NOs: 11226, 11249, 11250, 11253, 11254, 11255, 11297, 11298, 11325, 11327, 11328, 11331, 11332, or 11677-11710, or at least 95% identical to any one of SEQ ID NOs: 11226, 11249, 11250, 11253, 11254, 11255, 11297, 11298, 11325, 11327, 11328, 11331, 11332, or 11677-11710. In some embodiments, the antisense strand sequence comprises or consists of the sequence of any one of SEQ ID NOs: 11226, 11249, 11250, 11253, 11254, 11255, 11297, 11298, 11325, 11327, 11328, 11331, 11332, or 11677-11710, or an antisense strand sequence thereof having 1, 2, 3, or 4 nucleoside substitutions, additions, or deletions. In some embodiments, the antisense strand sequence comprises or consists of the sequence of any one of SEQ ID NOs: 11226, 11249, 11250, 11253, 11254, 11255, 11297, 11298, 11325, 11327, 11328, 11331, 11332, or 11677-11710, or an antisense strand sequence thereof having 1 or 2 nucleoside substitutions, additions, or deletions. In some embodiments, the antisense strand sequence comprises or consists of the sequence of any one of SEQ ID NOs: 11226, 11249, 11250, 11253, 11254, 11255, 11297, 11298, 11325, 11327, 11328, 11331, 11332, or 11677-11710. In some embodiments, the antisense strand comprises an overhang described herein. In some embodiments, the antisense strand comprises one or more modifications or modification patterns described herein.

[0258] In some embodiments, the antisense strand comprises or consists of an antisense strand of any one of the siRNAs of siRNA subset A, or an antisense strand thereof having 1 or 2 nucleoside substitutions, additions, or deletions. In some embodiments, the antisense strand comprises or consists of an antisense strand of any one of the siRNAs of siRNA subset A. In some embodiments, the antisense strand comprises or consists of an antisense strand of any one of the siRNAs of siRNA subset B, or an antisense strand thereof having 1 or 2 nucleoside substitutions, additions, or deletions. In some embodiments, the antisense strand comprises or consists of an antisense strand of any one of the siRNAs of siRNA subset B. In some embodiments, the antisense strand comprises or consists of an antisense strand of any one of the siRNAs of siRNA subset C, or an antisense strand thereof having 1 or 2 nucleoside substitutions, additions, or deletions. In some embodiments, the antisense strand comprises or consists of an antisense strand of any one of the siRNAs of siRNA subset C. In some embodiments, the antisense strand comprises or consists of an antisense strand of any one of the siRNAs of siRNA subset D, or an antisense strand thereof having 1 or 2 nucleoside substitutions, additions, or deletions. In some embodiments, the antisense strand comprises or consists of an antisense strand of any one of the siRNAs of siRNA subset D. In some embodiments, the antisense strand comprises or consists of an antisense strand of any one of the siRNAs of siRNA subset E, or an antisense strand thereof having 1 or 2 nucleoside substitutions, additions, or deletions. In some embodiments, the antisense strand comprises or consists of an antisense strand of any one of the siRNAs of siRNA subset E.

[0259] In some embodiments, the antisense strand sequence comprises or consists of the sequence of SEQ ID NO: 11090, or an antisense strand sequence thereof having 1 or 2 nucleoside substitutions, additions, or deletions. In some embodiments, the antisense strand sequence comprises or consists of the sequence of SEQ ID NO: 11090.

[0260] In some embodiments, the siRNA comprises a sense strand having a sequence in accordance with any of SEQ ID NOs: 11529-11533. In some embodiments, the sense strand sequence comprises or consists of a sequence at least 75% identical to any one of SEQ ID NOs: 11529-11533, at least 80% identical to any one of SEQ ID NOs: 11529-11533, at least 85% identical to of any one of SEQ ID NOs: 11529-11533, at least 90% identical to any one of SEQ ID NOs: 11529-11533, or at least 95% identical to any one of SEQ ID NOs: 11529-11533. In some embodiments, the sense strand sequence comprises or consists of the sequence of any one of SEQ ID NOs: 11529-11533, or a sense strand sequence thereof having 1, 2, 3, or 4 nucleoside substitutions, additions, or deletions. In some embodiments, the sense strand sequence comprises or consists of the sequence of any one of SEQ ID NOs: 11529-11533, or a sense strand sequence thereof having 1 or 2 nucleoside substitutions, additions, or deletions. In some embodiments, the sense strand sequence comprises or consists of a sequence 100% identical to SEQ ID NOs: 11529-11533. The sense strand may comprise a modification pattern described herein. The sense strand may comprise a lipid moiety such as a cholesterol moiety described herein.

[0261] In some embodiments, the siRNA comprises an antisense strand having a sequence in accordance with any of SEQ ID NOs: 11534-11538. In some embodiments, the antisense strand sequence comprises or consists of a sequence at least 75% identical to any one of SEQ ID NOs: 11534-11538, at least 80% identical to any one of SEQ ID NOs: 11534-11538, at least 85% identical to of any one of SEQ ID NOs: 11534-11538, at least 90% identical to any one of SEQ ID NOs: 11534-11538, or at least 95% identical to any one of SEQ ID NOs: 11534-11538. In some embodiments, the antisense strand sequence comprises or consists of the sequence of any one of SEQ ID NOs: 11534-11538, or an antisense strand sequence thereof having 1, 2, 3, or 4 nucleoside substitutions, additions, or deletions. In some embodiments, the antisense strand sequence comprises or consists of the sequence of any one of SEQ ID NOs: 11534-11538, or an antisense strand sequence thereof having 1 or 2 nucleoside substitutions, additions, or deletions. In some embodiments, the antisense strand sequence comprises or consists of a sequence 100% identical to SEQ ID NOs: 11534-11538. The antisense strand may comprise a modification pattern described herein.

[0262] In some embodiments, the siRNA a sense strand comprising the sequence of SEQ ID NO: 11474, or a nucleic acid sequence thereof having 3 or 4 nucleoside substitutions, additions, or deletions. In some embodiments, the siRNA a sense strand comprising the sequence of SEQ ID NO: 11474, or a nucleic acid sequence thereof having 1 or 2 nucleoside substitutions, additions, or deletions. In some embodiments, the siRNA a sense strand comprising the sequence of SEQ ID NO: 11474. In some embodiments, the sense strand comprises one or more internucleoside linkage or nucleoside modifications. In some embodiments, the siRNA an antisense strand comprising the sequence of SEQ ID NO: 11499, or a nucleic acid sequence thereof having 3 or 4 nucleoside substitutions, additions, or deletions. In some embodiments, the siRNA an antisense strand comprising the sequence of SEQ ID NO: 11499, or a nucleic acid sequence thereof having 1 or 2 nucleoside substitutions, additions, or deletions. In some embodiments, the siRNA an antisense strand comprising the sequence of SEQ ID NO: 11499. In some embodiments, the antisense strand comprises one or more internucleoside linkage or nucleoside modifications.

[0263] In some embodiments, the siRNA comprises a sense strand having a sequence in accordance with any of SEQ ID NOs: 11664 or 11708-11710. In some embodiments, the sense strand sequence comprises or consists of a sequence at least 75% identical to any one of SEQ ID NOs: 11664 or 11708-11710, at least 80% identical to any one of SEQ ID NOs: 11664 or 11708-11710, at least 85% identical to of any one of SEQ ID NOs: 11664 or 11708-11710, at least 90% identical to any one of SEQ ID NOs: 11664 or 11708-11710, or at least 95% identical to any one of SEQ ID NOs: 11664 or 11708-11710. In some embodiments, the sense strand sequence comprises or consists of the sequence of any one of SEQ ID NOs: 11664 or 11708-11710, or a sense strand sequence thereof having 1, 2, 3, or 4 nucleoside substitutions, additions, or deletions. In some embodiments, the sense strand sequence comprises or consists of the sequence of any one of SEQ ID NOs: 11664 or 11708-11710, or a sense strand sequence thereof having 1 or 2 nucleoside substitutions, additions, or deletions. In some embodiments, the sense strand sequence comprises or consists of a sequence 100% identical to SEQ ID NOs: 11664 or 11708-11710. The sense strand may comprise nucleoside or internucleoside linkage modifications. The sense strand may comprise a lipid moiety such as a 5′ carbocycle-linked lipid. In some embodiments, the siRNA comprises an antisense strand having a sequence in accordance with any of SEQ ID NOs: 11698 or 11640-11642. In some embodiments, the antisense strand sequence comprises or consists of a sequence at least 75% identical to any one of SEQ ID NOs: 11698 or 11640-11642, at least 80% identical to any one of SEQ ID NOs: 11698 or 11640-11642, at least 85% identical to of any one of SEQ ID NOs: 11698 or 11640-11642, at least 90% identical to any one of SEQ ID NOs: 11698 or 11640-11642, or at least 95% identical to any one of SEQ ID NOs: 11698 or 11640-11642. In some embodiments, the antisense strand sequence comprises or consists of the sequence of any one of SEQ ID NOs: 11698 or 11640-11642, or an antisense strand sequence thereof having 1, 2, 3, or 4 nucleoside substitutions, additions, or deletions. In some embodiments, the antisense strand sequence comprises or consists of the sequence of any one of SEQ ID NOs: 11698 or 11640-11642, or an antisense strand sequence thereof having 1 or 2 nucleoside substitutions, additions, or deletions. In some embodiments, the antisense strand sequence comprises or consists of a sequence 100% identical to SEQ ID NOs: 11698 or 11640-11642. The antisense strand may comprise nucleoside or internucleoside linkage modifications. The antisense strand may comprise a 5′ vinyl phosphonate.

[0264] In some embodiments, the siRNA comprises a sense strand having a sequence in accordance with any of SEQ ID NO: 11664. In some embodiments, the sense strand sequence comprises or consists of a sequence at least 75% identical to SEQ ID NO: 11664, at least 80% identical to SEQ ID NO: 11664, at least 85% identical to of SEQ ID NO: 11664, at least 90% identical to SEQ ID NO: 11664, or at least 95% identical to SEQ ID NO: 11664. In some embodiments, the sense strand sequence comprises or consists of the sequence of SEQ ID NO: 11664, or a sense strand sequence thereof having 1, 2, 3, or 4 nucleoside substitutions, additions, or deletions. In some embodiments, the sense strand sequence comprises or consists of the sequence of SEQ ID NO: 11664, or a sense strand sequence thereof having 1 or 2 nucleoside substitutions, additions, or deletions. In some embodiments, the sense strand sequence comprises or consists of a sequence 100% identical to SEQ ID NO: 11664. The sense strand may comprise nucleoside or internucleoside linkage modifications. The sense strand may comprise a lipid moiety such as a 5′ carbocycle-linked lipid. In some embodiments, the siRNA comprises an antisense strand having a sequence in accordance with any of SEQ ID NO: 11698. In some embodiments, the antisense strand sequence comprises or consists of a sequence at least 75% identical to SEQ ID NO: 11698, at least 80% identical to SEQ ID NO: 11698, at least 85% identical to of SEQ ID NO: 11698, at least 90% identical to SEQ ID NO: 11698, or at least 95% identical to SEQ ID NO: 11698. In some embodiments, the antisense strand sequence comprises or consists of the sequence of SEQ ID NO: 11698, or an antisense strand sequence thereof having 1, 2, 3, or 4 nucleoside substitutions, additions, or deletions. In some embodiments, the antisense strand sequence comprises or consists of the sequence of SEQ ID NO: 11698, or an antisense strand sequence thereof having 1 or 2 nucleoside substitutions, additions, or deletions. In some embodiments, the antisense strand sequence comprises or consists of a sequence 100% identical to SEQ ID NO: 11698. The antisense strand may comprise nucleoside or internucleoside linkage modifications. The antisense strand may comprise a 5′ vinyl phosphonate.

[0265] In some embodiments, the siRNA comprises a sense strand having a sequence in accordance with any of SEQ ID NO: 11708. In some embodiments, the sense strand sequence comprises or consists of a sequence at least 75% identical to SEQ ID NO: 11708, at least 80% identical to SEQ ID NO: 11708, at least 85% identical to of SEQ ID NO: 11708, at least 90% identical to SEQ ID NO: 11708, or at least 95% identical to SEQ ID NO: 11708. In some embodiments, the sense strand sequence comprises or consists of the sequence of SEQ ID NO: 11708, or a sense strand sequence thereof having 1, 2, 3, or 4 nucleoside substitutions, additions, or deletions. In some embodiments, the sense strand sequence comprises or consists of the sequence of SEQ ID NO: 11708, or a sense strand sequence thereof having 1 or 2 nucleoside substitutions, additions, or deletions. In some embodiments, the sense strand sequence comprises or consists of a sequence 100% identical to SEQ ID NO: 11708. The sense strand may comprise nucleoside or internucleoside linkage modifications. The sense strand may comprise a lipid moiety such as a 5′ carbocycle-linked lipid. In some embodiments, the siRNA comprises an antisense strand having a sequence in accordance with any of SEQ ID NO: 11640. In some embodiments, the antisense strand sequence comprises or consists of a sequence at least 75% identical to SEQ ID NO: 11640, at least 80% identical to SEQ ID NO: 11640, at least 85% identical to of SEQ ID NO: 11640, at least 90% identical to SEQ ID NO: 11640, or at least 95% identical to SEQ ID NO: 11640. In some embodiments, the antisense strand sequence comprises or consists of the sequence of SEQ ID NO: 11640, or an antisense strand sequence thereof having 1, 2, 3, or 4 nucleoside substitutions, additions, or deletions. In some embodiments, the antisense strand sequence comprises or consists of the sequence of SEQ ID NO: 11640, or an antisense strand sequence thereof having 1 or 2 nucleoside substitutions, additions, or deletions. In some embodiments, the antisense strand sequence comprises or consists of a sequence 100% identical to SEQ ID NO: 11640. The antisense strand may comprise nucleoside or internucleoside linkage modifications. The antisense strand may comprise a 5′ vinyl phosphonate.

[0266] In some embodiments, the siRNA comprises a sense strand having a sequence in accordance with any of SEQ ID NO: 11708. In some embodiments, the sense strand sequence comprises or consists of a sequence at least 75% identical to SEQ ID NO: 11708, at least 80% identical to SEQ ID NO: 11708, at least 85% identical to of SEQ ID NO: 11708, at least 90% identical to SEQ ID NO: 11708, or at least 95% identical to SEQ ID NO: 11708. In some embodiments, the sense strand sequence comprises or consists of the sequence of SEQ ID NO: 11708, or a sense strand sequence thereof having 1, 2, 3, or 4 nucleoside substitutions, additions, or deletions. In some embodiments, the sense strand sequence comprises or consists of the sequence of SEQ ID NO: 11708, or a sense strand sequence thereof having 1 or 2 nucleoside substitutions, additions, or deletions. In some embodiments, the sense strand sequence comprises or consists of a sequence 100% identical to SEQ ID NO: 11708. The sense strand may comprise nucleoside or internucleoside linkage modifications. The sense strand may comprise a lipid moiety such as a 5′ carbocycle-linked lipid. In some embodiments, the siRNA comprises an antisense strand having a sequence in accordance with any of SEQ ID NO: 11640. In some embodiments, the antisense strand sequence comprises or consists of a sequence at least 75% identical to SEQ ID NO: 11640, at least 80% identical to SEQ ID NO: 11640, at least 85% identical to of SEQ ID NO: 11640, at least 90% identical to SEQ ID NO: 11640, or at least 95% identical to SEQ ID NO: 11640. In some embodiments, the antisense strand sequence comprises or consists of the sequence of SEQ ID NO: 11640, or an antisense strand sequence thereof having 1, 2, 3, or 4 nucleoside substitutions, additions, or deletions. In some embodiments, the antisense strand sequence comprises or consists of the sequence of SEQ ID NO: 11640, or an antisense strand sequence thereof having 1 or 2 nucleoside substitutions, additions, or deletions. In some embodiments, the antisense strand sequence comprises or consists of a sequence 100% identical to SEQ ID NO: 11640. The antisense strand may comprise nucleoside or internucleoside linkage modifications. The antisense strand may comprise a 5′ vinyl phosphonate.

[0267] In some embodiments, the siRNA comprises a sense strand having a sequence in accordance with any of SEQ ID NO: 11710. In some embodiments, the sense strand sequence comprises or consists of a sequence at least 75% identical to SEQ ID NO: 11710, at least 80% identical to SEQ ID NO: 11710, at least 85% identical to of SEQ ID NO: 11710, at least 90% identical to SEQ ID NO: 11710, or at least 95% identical to SEQ ID NO: 11710. In some embodiments, the sense strand sequence comprises or consists of the sequence of SEQ ID NO: 11710, or a sense strand sequence thereof having 1, 2, 3, or 4 nucleoside substitutions, additions, or deletions. In some embodiments, the sense strand sequence comprises or consists of the sequence of SEQ ID NO: 11710, or a sense strand sequence thereof having 1 or 2 nucleoside substitutions, additions, or deletions. In some embodiments, the sense strand sequence comprises or consists of a sequence 100% identical to SEQ ID NO: 11710. The sense strand may comprise nucleoside or internucleoside linkage modifications. The sense strand may comprise a lipid moiety such as a 5′ carbocycle-linked lipid. In some embodiments, the siRNA comprises an antisense strand having a sequence in accordance with any of SEQ ID NO: 11642. In some embodiments, the antisense strand sequence comprises or consists of a sequence at least 75% identical to SEQ ID NO: 11642, at least 80% identical to SEQ ID NO: 11642, at least 85% identical to of SEQ ID NO: 11642, at least 90% identical to SEQ ID NO: 11642, or at least 95% identical to SEQ ID NO: 11642. In some embodiments, the antisense strand sequence comprises or consists of the sequence of SEQ ID NO: 11642, or an antisense strand sequence thereof having 1, 2, 3, or 4 nucleoside substitutions, additions, or deletions. In some embodiments, the antisense strand sequence comprises or consists of the sequence of SEQ ID NO: 11642, or an antisense strand sequence thereof having 1 or 2 nucleoside substitutions, additions, or deletions. In some embodiments, the antisense strand sequence comprises or consists of a sequence 100% identical to SEQ ID NO: 11642. The antisense strand may comprise nucleoside or internucleoside linkage modifications. The antisense strand may comprise a 5′ vinyl phosphonate.

[0268] In some embodiments, the sense strand sequence comprises or consists of a sequence at least 75% identical to SEQ ID NO: 11786, at least 80% identical to SEQ ID NO: 11786, at least 85% identical to SEQ ID NO: 11786, at least 90% identical to SEQ ID NO: 11786, or at least 95% identical to SEQ ID NO: 11786. In some embodiments, the sense strand sequence comprises or consists of the sequence of SEQ ID NO: 11786, or a sense strand sequence thereof having 1, 2, 3, or 4 nucleoside substitutions, additions, or deletions. In some embodiments, the sense strand sequence comprises or consists of the sequence of SEQ ID NO: 11786, or a sense strand sequence thereof having 1 or 2 nucleoside substitutions, additions, or deletions. In some embodiments, the sense strand sequence comprises or consists of the sequence of SEQ ID NO: 11786. In some embodiments, the sense strand comprises an overhang described herein. In some embodiments, the sense strand comprises one or more modifications or modification patterns described herein.

[0269] In some embodiments, the antisense strand sequence comprises or consists of a sequence at least 75% identical to SEQ ID NO: 11787, at least 80% identical to SEQ ID NO: 11787, at least 85% identical to SEQ ID NO: 11787, at least 90% identical to SEQ ID NO: 11787, or at least 95% identical to SEQ ID NO: 11787. In some embodiments, the antisense strand sequence comprises or consists of the sequence of SEQ ID NO: 11787 or a antisense strand sequence thereof having 1, 2, 3, or 4 nucleoside substitutions, additions, or deletions. In some embodiments, the antisense strand sequence comprises or consists of the sequence of SEQ ID NO: 11787, or a antisense strand sequence thereof having 1 or 2 nucleoside substitutions, additions, or deletions. In some embodiments, the antisense strand sequence comprises or consists of the sequence of SEQ ID NO: 11787. In some embodiments, the antisense strand comprises an overhang described herein. In some embodiments, the antisense strand comprises one or more modifications or modification patterns described herein.

[0270] Disclosed herein, in some embodiments, are siRNAs targeting ANGPTL7. The sense or antisense strand may comprise an oligonucleotide sequence of SEQ ID NO: 11805, an oligonucleotide sequence comprising 1 or 2 nucleoside substitutions, additions, or deletions of SEQ ID NO: 11805, or an oligonucleotide sequence comprising 3 or 4 nucleoside substitutions, additions, or deletions of SEQ ID NO: 11805.

[0271] Disclosed herein, in some embodiments, are siRNAs targeting ANGPTL7. The sense or antisense strand may comprise an oligonucleotide sequence of SEQ ID NO: 11806, an oligonucleotide sequence comprising 1 or 2 nucleoside substitutions, additions, or deletions of SEQ ID NO: 11806, or an oligonucleotide sequence comprising 3 or 4 nucleoside substitutions, additions, or deletions of SEQ ID NO: 11806.

[0272] Disclosed herein, in some embodiments, are siRNAs targeting ANGPTL7. The sense or antisense strand may comprise an oligonucleotide sequence of SEQ ID NO: 11807, an oligonucleotide sequence comprising 1 or 2 nucleoside substitutions, additions, or deletions of SEQ ID NO: 11807, or an oligonucleotide sequence comprising 3 or 4 nucleoside substitutions, additions, or deletions of SEQ ID NO: 11807.

[0273] Disclosed herein, in some embodiments, are siRNAs targeting ANGPTL7. The sense or antisense strand may comprise an oligonucleotide sequence of SEQ ID NO: 11808, an oligonucleotide sequence comprising 1 or 2 nucleoside substitutions, additions, or deletions of SEQ ID NO: 11808, or an oligonucleotide sequence comprising 3 or 4 nucleoside substitutions, additions, or deletions of SEQ ID NO: 11808.

[0274] Disclosed herein, in some embodiments, are siRNAs targeting ANGPTL7. The sense or antisense strand may comprise an oligonucleotide sequence of SEQ ID NO: 11809, an oligonucleotide sequence comprising 1 or 2 nucleoside substitutions, additions, or deletions of SEQ ID NO: 11809, or an oligonucleotide sequence comprising 3 or 4 nucleoside substitutions, additions, or deletions of SEQ ID NO: 11809.

[0275] Disclosed herein, in some embodiments, are siRNAs targeting ANGPTL7. The sense or antisense strand may comprise an oligonucleotide sequence of SEQ ID NO: 11810, an oligonucleotide sequence comprising 1 or 2 nucleoside substitutions, additions, or deletions of SEQ ID NO: 11810, or an oligonucleotide sequence comprising 3 or 4 nucleoside substitutions, additions, or deletions of SEQ ID NO: 11810.

[0276] Disclosed herein, in some embodiments, are siRNAs targeting ANGPTL7. The sense or antisense strand may comprise an oligonucleotide sequence of SEQ ID NO: 11811, an oligonucleotide sequence comprising 1 or 2 nucleoside substitutions, additions, or deletions of SEQ ID NO: 11811, or an oligonucleotide sequence comprising 3 or 4 nucleoside substitutions, additions, or deletions of SEQ ID NO: 11811.

[0277] Disclosed herein, in some embodiments, are siRNAs targeting ANGPTL7. The sense or antisense strand may comprise an oligonucleotide sequence of SEQ ID NO: 11812, an oligonucleotide sequence comprising 1 or 2 nucleoside substitutions, additions, or deletions of SEQ ID NO: 11812, or an oligonucleotide sequence comprising 3 or 4 nucleoside substitutions, additions, or deletions of SEQ ID NO: 11812.

[0278] Disclosed herein, in some embodiments, are siRNAs targeting ANGPTL7. The sense or antisense strand may comprise an oligonucleotide sequence of SEQ ID NO: 11813, an oligonucleotide sequence comprising 1 or 2 nucleoside substitutions, additions, or deletions of SEQ ID NO: 11813, or an oligonucleotide sequence comprising 3 or 4 nucleoside substitutions, additions, or deletions of SEQ ID NO: 11813.

[0279] Disclosed herein, in some embodiments, are siRNAs targeting ANGPTL7. The sense or antisense strand may comprise an oligonucleotide sequence of SEQ ID NO: 11814, an oligonucleotide sequence comprising 1 or 2 nucleoside substitutions, additions, or deletions of SEQ ID NO: 11814, or an oligonucleotide sequence comprising 3 or 4 nucleoside substitutions, additions, or deletions of SEQ ID NO: 11814.

[0280] Disclosed herein, in some embodiments, are siRNAs targeting ANGPTL7. The sense or antisense strand may comprise an oligonucleotide sequence of SEQ ID NO: 11815, an oligonucleotide sequence comprising 1 or 2 nucleoside substitutions, additions, or deletions of SEQ ID NO: 11815, or an oligonucleotide sequence comprising 3 or 4 nucleoside substitutions, additions, or deletions of SEQ ID NO: 11815.

[0281] Disclosed herein, in some embodiments, are siRNAs targeting ANGPTL7. The sense or antisense strand may comprise an oligonucleotide sequence of SEQ ID NO: 11816, an oligonucleotide sequence comprising 1 or 2 nucleoside substitutions, additions, or deletions of SEQ ID NO: 11816, or an oligonucleotide sequence comprising 3 or 4 nucleoside substitutions, additions, or deletions of SEQ ID NO: 11816.

[0282] Disclosed herein, in some embodiments, are siRNAs targeting ANGPTL7. The sense or antisense strand may comprise an oligonucleotide sequence of SEQ ID NO: 11817, an oligonucleotide sequence comprising 1 or 2 nucleoside substitutions, additions, or deletions of SEQ ID NO: 11817, or an oligonucleotide sequence comprising 3 or 4 nucleoside substitutions, additions, or deletions of SEQ ID NO: 11817.

[0283] Disclosed herein, in some embodiments, are siRNAs targeting ANGPTL7. The sense or antisense strand may comprise an oligonucleotide sequence of SEQ ID NO: 11818, an oligonucleotide sequence comprising 1 or 2 nucleoside substitutions, additions, or deletions of SEQ ID NO: 11818, or an oligonucleotide sequence comprising 3 or 4 nucleoside substitutions, additions, or deletions of SEQ ID NO: 11818.

[0284] Disclosed herein, in some embodiments, are siRNAs targeting ANGPTL7. The sense or antisense strand may comprise an oligonucleotide sequence of SEQ ID NO: 11819, an oligonucleotide sequence comprising 1 or 2 nucleoside substitutions, additions, or deletions of SEQ ID NO: 11819, or an oligonucleotide sequence comprising 3 or 4 nucleoside substitutions, additions, or deletions of SEQ ID NO: 11819.

[0285] Disclosed herein, in some embodiments, are siRNAs targeting ANGPTL7. The sense or antisense strand may comprise an oligonucleotide sequence of SEQ ID NO: 11820, an oligonucleotide sequence comprising 1 or 2 nucleoside substitutions, additions, or deletions of SEQ ID NO: 11820, or an oligonucleotide sequence comprising 3 or 4 nucleoside substitutions, additions, or deletions of SEQ ID NO: 11820.

[0286] Disclosed herein, in some embodiments, are siRNAs targeting ANGPTL7. The sense or antisense strand may comprise an oligonucleotide sequence of SEQ ID NO: 11821, an oligonucleotide sequence comprising 1 or 2 nucleoside substitutions, additions, or deletions of SEQ ID NO: 11821, or an oligonucleotide sequence comprising 3 or 4 nucleoside substitutions, additions, or deletions of SEQ ID NO: 11821.

[0287] Disclosed herein, in some embodiments, are siRNAs targeting ANGPTL7. The sense or antisense strand may comprise an oligonucleotide sequence of SEQ ID NO: 11822, an oligonucleotide sequence comprising 1 or 2 nucleoside substitutions, additions, or deletions of SEQ ID NO: 11822, or an oligonucleotide sequence comprising 3 or 4 nucleoside substitutions, additions, or deletions of SEQ ID NO: 11822.

[0288] Disclosed herein, in some embodiments, are siRNAs targeting ANGPTL7. The sense or antisense strand may comprise an oligonucleotide sequence of SEQ ID NO: 11823, an oligonucleotide sequence comprising 1 or 2 nucleoside substitutions, additions, or deletions of SEQ ID NO: 11823, or an oligonucleotide sequence comprising 3 or 4 nucleoside substitutions, additions, or deletions of SEQ ID NO: 11823.

[0289] Disclosed herein, in some embodiments, are siRNAs targeting ANGPTL7. The sense or antisense strand may comprise an oligonucleotide sequence of SEQ ID NO: 11824, an oligonucleotide sequence comprising 1 or 2 nucleoside substitutions, additions, or deletions of SEQ ID NO: 11824, or an oligonucleotide sequence comprising 3 or 4 nucleoside substitutions, additions, or deletions of SEQ ID NO: 11824.

[0290] Disclosed herein, in some embodiments, are siRNAs targeting ANGPTL7. The sense or antisense strand may comprise an oligonucleotide sequence of SEQ ID NO: 11825, an oligonucleotide sequence comprising 1 or 2 nucleoside substitutions, additions, or deletions of SEQ ID NO: 11825, or an oligonucleotide sequence comprising 3 or 4 nucleoside substitutions, additions, or deletions of SEQ ID NO: 11825.

[0291] Disclosed herein, in some embodiments, are siRNAs targeting ANGPTL7. The sense or antisense strand may comprise an oligonucleotide sequence of SEQ ID NO: 11826, an oligonucleotide sequence comprising 1 or 2 nucleoside substitutions, additions, or deletions of SEQ ID NO: 11826, or an oligonucleotide sequence comprising 3 or 4 nucleoside substitutions, additions, or deletions of SEQ ID NO: 11826.

[0292] Disclosed herein, in some embodiments, are siRNAs targeting ANGPTL7. The sense or antisense strand may comprise an oligonucleotide sequence of SEQ ID NO: 11827, an oligonucleotide sequence comprising 1 or 2 nucleoside substitutions, additions, or deletions of SEQ ID NO: 11827, or an oligonucleotide sequence comprising 3 or 4 nucleoside substitutions, additions, or deletions of SEQ ID NO: 11827.

[0293] Disclosed herein, in some embodiments, are siRNAs targeting ANGPTL7. The sense or antisense strand may comprise an oligonucleotide sequence of SEQ ID NO: 11828, an oligonucleotide sequence comprising 1 or 2 nucleoside substitutions, additions, or deletions of SEQ ID NO: 11828, or an oligonucleotide sequence comprising 3 or 4 nucleoside substitutions, additions, or deletions of SEQ ID NO: 11828.

[0294] Disclosed herein, in some embodiments, are siRNAs targeting ANGPTL7. The sense or antisense strand may comprise an oligonucleotide sequence of SEQ ID NO: 11829, an oligonucleotide sequence comprising 1 or 2 nucleoside substitutions, additions, or deletions of SEQ ID NO: 11829, or an oligonucleotide sequence comprising 3 or 4 nucleoside substitutions, additions, or deletions of SEQ ID NO: 11829.

[0295] Disclosed herein, in some embodiments, are siRNAs targeting ANGPTL7. The sense or antisense strand may comprise an oligonucleotide sequence of SEQ ID NO: 11830, an oligonucleotide sequence comprising 1 or 2 nucleoside substitutions, additions, or deletions of SEQ ID NO: 11830, or an oligonucleotide sequence comprising 3 or 4 nucleoside substitutions, additions, or deletions of SEQ ID NO: 11830.

[0296] Disclosed herein, in some embodiments, are siRNAs targeting ANGPTL7. The sense or antisense strand may comprise an oligonucleotide sequence of SEQ ID NO: 11831, an oligonucleotide sequence comprising 1 or 2 nucleoside substitutions, additions, or deletions of SEQ ID NO: 11831, or an oligonucleotide sequence comprising 3 or 4 nucleoside substitutions, additions, or deletions of SEQ ID NO: 11831.

[0297] Disclosed herein, in some embodiments, are siRNAs targeting ANGPTL7. The sense or antisense strand may comprise an oligonucleotide sequence of SEQ ID NO: 11832, an oligonucleotide sequence comprising 1 or 2 nucleoside substitutions, additions, or deletions of SEQ ID NO: 11832, or an oligonucleotide sequence comprising 3 or 4 nucleoside substitutions, additions, or deletions of SEQ ID NO: 11832.

[0298] Disclosed herein, in some embodiments, are siRNAs targeting ANGPTL7. The sense or antisense strand may comprise an oligonucleotide sequence of SEQ ID NO: 11833, an oligonucleotide sequence comprising 1 or 2 nucleoside substitutions, additions, or deletions of SEQ ID NO: 11833, or an oligonucleotide sequence comprising 3 or 4 nucleoside substitutions, additions, or deletions of SEQ ID NO: 11833.

[0299] Disclosed herein, in some embodiments, are siRNAs targeting ANGPTL7. The sense or antisense strand may comprise an oligonucleotide sequence of SEQ ID NO: 11834, an oligonucleotide sequence comprising 1 or 2 nucleoside substitutions, additions, or deletions of SEQ ID NO: 11834, or an oligonucleotide sequence comprising 3 or 4 nucleoside substitutions, additions, or deletions of SEQ ID NO: 11834.

siRNA Modification Patterns

[0300] An siRNA may include a modification pattern. The modification pattern may include any modification, or a combination of modifications described in the section on dsRNA modifications or elsewhere in the description provided here.

[0301] The oligonucleotides described herein (e.g. siRNAs, sense strands, antisense strands, siRNA agents, or dsRNA agents) may include any modification pattern disclosed herein, including but not limited to any one or more of modification patterns 1S, 2S, 3S, 4S, 5S, 6S, 7S, 8S, 9S, 10S, 11S, 12S, 13S, 14S, 15S, 16S, 17S, 18S, 19S, 20S, 22S, 23S, 24S, 25S, 26S, 27S, 28S, 29S, 30S, 31S, 32S, 33S, 34S, 35S, 36S, 37S, 38S, 39S, 40S, 41S, 42S, 43S, 44S, 45S, 46S, 47S, 48S, 49S, 50S, 1AS, 2AS, 3AS, 4AS, 6AS, 7AS, 8AS, 9AS, 10AS, 11AS, or 12AS.

[0302] In some embodiments, the composition comprises an oligonucleotide that inhibits the expression of ANGPTL7 wherein the oligonucleotide comprises a siRNA comprising a sense strand and an antisense strand, wherein the sense strand comprises modification pattern 1S: 5′-NfsnsNfnNfnNfNfNfnNfnNfnNfnNfnNfsnsn-3′ (SEQ ID NO: 11381), wherein “Nf” is a 2′-fluoro-modified nucleoside, “n” is a 2′-O-methyl modified nucleoside, and “s” is a phosphorothioate linkage. In some embodiments, the sense strand comprises modification pattern 2S: 5′-nsnsnnNfnNfNfNfnnnnnnnnnnsnsn-3′ (SEQ ID NO: 11382), wherein “Nf” is a 2′-fluoro-modified nucleoside, “n” is a 2′-O-methyl modified nucleoside, and “s” is a phosphorothioate linkage. In some embodiments, the sense strand comprises modification pattern 3S: 5′-nsnsnnNfnNfnNfnnnnnnnnnnsnsn-3′ (SEQ ID NO: 11383), wherein “Nf” is a 2′-fluoro-modified nucleoside, “n” is a 2′-O-methyl modified nucleoside, and “s” is a phosphorothioate linkage. In some embodiments, the sense strand comprises modification pattern 4S: 5′-NfsnsNfnNfnNfNfNfnNfnNfnNfnNfnNfsnsnN-Lipid-3′ (SEQ ID NO: 11384), wherein “Nf” is a 2′-fluoro-modified nucleoside, “n” is a 2′-O-methyl modified nucleoside, “s” is a phosphorothioate linkage, and N comprises a nucleoside. In some embodiments, the sense strand comprises modification pattern 5S: 5′-nsnsnnNfnNfNfNfnnnnnnnnnnsnsnN-Lipid-3′ (SEQ ID NO: 11385), wherein “Nf” is a 2′-fluoro-modified nucleoside, “n” is a 2′-O-methyl modified nucleoside, “s” is a phosphorothioate linkage, and N comprises a nucleoside. In some embodiments, the sense strand comprises modification pattern 6S: 5′-NfsnsNfnNfnNfnNfnNfnNfnNfnNfnNfsnsn-3′ (SEQ ID NO: 11394), wherein “Nf” is a 2′-fluoro-modified nucleoside, “n” is a 2′-O-methyl modified nucleoside, and “s” is a phosphorothioate linkage. In some embodiments, the sense strand comprises modification pattern 7S: 5′-NfsnsNfnNfnNfnNfnNfnNfnNfnNfnNfsnsn-Lipid-3′ (SEQ ID NO: 11395), wherein “Nf” is a 2′-fluoro-modified nucleoside, “n” is a 2′-O-methyl modified nucleoside, and “s” is a phosphorothioate linkage. In some embodiments, the sense strand comprises modification pattern 8S: 5′-nsnsnnNfnNfnNfnnnnnnnnnnsnsn-Lipid-3′ (SEQ ID NO: 11396), wherein “Nf” is a 2′-fluoro-modified nucleoside, “n” is a 2′-O-methyl modified nucleoside, and “s” is a phosphorothioate linkage. In some embodiments, the sense strand comprises modification pattern 9S: 5′-Lipid-NfsnsNfnNfnNfnNfnNfnNfnNfnNfnNfsnsn-3′ (SEQ ID NO: 11397), wherein “Nf” is a 2′-fluoro-modified nucleoside, “n” is a 2′-O-methyl modified nucleoside, and “s” is a phosphorothioate linkage. In some embodiments, the sense strand comprises modification pattern 10S: 5′-Lipid-nsnsnnNfnNfnNfnnnnnnnnnnsnsn-3′ (SEQ ID NO: 11398), wherein “Nf” is a 2′-fluoro-modified nucleoside, “n” is a 2′-O-methyl modified nucleoside, and “s” is a phosphorothioate linkage. In some embodiments, the sense strand comprises modification pattern 11S: 5′-NfsnsNfnNfnNfnNfnNfnNfnNfnNfnNfsnsnN-Lipid-3′ (SEQ ID NO: 11508), wherein “Nf” is a 2′-fluoro-modified nucleoside, “n” is a 2′-O-methyl modified nucleoside, “s” is a phosphorothioate linkage, and “N” is a nucleoside. In some embodiments, the sense strand comprises modification pattern 12S: 5′-nsnsnnNfnNfnNfnnnnnnnnnnsnsnN-Lipid-3′ (SEQ ID NO: 11509), wherein “Nf” is a 2′-fluoro-modified nucleoside, “n” is a 2′-O-methyl modified nucleoside, “s” is a phosphorothioate linkage, and “N” is a nucleoside. In some embodiments, the sense strand comprises modification pattern 13S: 5′-Lipid-NfsnsNfnNfnNfnNfnNfnNfnNfnNfnNfsnsnN-3′ (SEQ ID NO: 11510), wherein “Nf” is a 2′-fluoro-modified nucleoside, “n” is a 2′-O-methyl modified nucleoside, “s” is a phosphorothioate linkage, and “N” is a nucleoside. In some embodiments, the sense strand comprises modification pattern 14S: 5′-Lipid-nsnsnnNfnNfnNfnnnnnnnnnnsnsnN-3′ (SEQ ID NO: 11511), wherein “Nf” is a 2′-fluoro-modified nucleoside, “n” is a 2′-O-methyl modified nucleoside, “s” is a phosphorothioate linkage, and “N” is a nucleoside. In some embodiments, the sense strand comprises modification pattern 15S: 5′-nsNfsnNfnNfnNfNfnnnnnNfnNfNfnsnsn-3′ (SEQ ID NO: 11541), wherein “Nf” is a 2′-fluoro-modified nucleoside, “n” is a 2′-O-methyl modified nucleoside, “s” is a phosphorothioate linkage, and “N” is a nucleoside. In some embodiments, the sense strand comprises modification pattern 16S: 5′-NfsnsNfnNfnNfnnNfNfNfNfNfnNfnnNfsnsn-3′ (SEQ ID NO: 11542), wherein “Nf” is a 2′-fluoro-modified nucleoside, “n” is a 2′-O-methyl modified nucleoside, “s” is a phosphorothioate linkage, and “N” is a nucleoside. In some embodiments, the sense strand comprises modification pattern 17S: 5′-nnnnnnNfnNfnnnnnnnnnnsnsn-3′ (SEQ ID NO: 11711), wherein “Nf” is a 2′-fluoro-modified nucleoside, “n” is a 2′-O-methyl modified nucleoside, “s” is a phosphorothioate linkage, and “N” is a nucleoside. In some embodiments, the sense strand comprises modification pattern 18S: 5′-nnnnnnnNfNfNfNfnnnnnnnnsnsn-3′ (SEQ ID NO: 11712), wherein “Nf” is a 2′-fluoro-modified nucleoside, “n” is a 2′-O-methyl modified nucleoside, “s” is a phosphorothioate linkage, and “N” is a nucleoside. In some embodiments, the sense strand comprises modification pattern 19S: 5′-nnnnNfnnnNfnNfnnnnnnnnsnsn-3′ (SEQ ID NO: 11713), wherein “Nf” is a 2′-fluoro-modified nucleoside, “n” is a 2′-O-methyl modified nucleoside, “s” is a phosphorothioate linkage, and “N” is a nucleoside. In some embodiments, the sense strand comprises modification pattern 20S: 5′-nnnnnnnNfNfnNfnnnnnnnnsnsn-3′ (SEQ ID NO: 11714), wherein “Nf” is a 2′-fluoro-modified nucleoside, “n” is a 2′-O-methyl modified nucleoside, “s” is a phosphorothioate linkage, and “N” is a nucleoside. In some embodiments, the sense strand comprises modification pattern 21S: 5′-nnnnnnNfNfNfNfNfnnnnnnnnsnsn-3′ (SEQ ID NO: 11715), wherein “Nf” is a 2′-fluoro-modified nucleoside, “n” is a 2′-O-methyl modified nucleoside, “s” is a phosphorothioate linkage, and “N” is a nucleoside. In some embodiments, the sense strand comprises modification pattern 22S: 5′-nnnnNfnNfNfNfNfnnnnnnnnnsnsn-3′ (SEQ ID NO: 11716), wherein “Nf” is a 2′-fluoro-modified nucleoside, “n” is a 2′-O-methyl modified nucleoside, “s” is a phosphorothioate linkage, and “N” is a nucleoside. In some embodiments, the sense strand comprises modification pattern 23S: 5′-nnnnnNfNfNfNfnNfnnnnnnnnsnsn-3′ (SEQ ID NO: 11717), wherein “Nf” is a 2′-fluoro-modified nucleoside, “n” is a 2′-O-methyl modified nucleoside, “s” is a phosphorothioate linkage, and “N” is a nucleoside. In some embodiments, the sense strand comprises modification pattern 24S: 5′-nnnnnNfNfNfNfnnnnnnnnnnsnsn-3′ (SEQ ID NO: 11718), wherein “Nf” is a 2′-fluoro-modified nucleoside, “n” is a 2′-O-methyl modified nucleoside, “s” is a phosphorothioate linkage, and “N” is a nucleoside. In some embodiments, the sense strand comprises modification pattern 25S: 5′-nnnnNfNfNfNfNfnnnnnnnnnnsnsn-3′ (SEQ ID NO: 11719), wherein “Nf” is a 2′-fluoro-modified nucleoside, “n” is a 2′-O-methyl modified nucleoside, “s” is a phosphorothioate linkage, and “N” is a nucleoside. In some embodiments, the sense strand comprises modification pattern 26S: 5′-nnnnnnnnNfNfnnnnnnnnnsnsn-3′ (SEQ ID NO: 11720), wherein “Nf” is a 2′-fluoro-modified nucleoside, “n” is a 2′-O-methyl modified nucleoside, “s” is a phosphorothioate linkage, and “N” is a nucleoside. In some embodiments, the sense strand comprises modification pattern 27S: 5′-nnnnnnNfNfNfNfnnnnnnnnnsnsn-3′ (SEQ ID NO: 11721), wherein “Nf” is a 2′-fluoro-modified nucleoside, “n” is a 2′-O-methyl modified nucleoside, “s” is a phosphorothioate linkage, and “N” is a nucleoside. In some embodiments, the sense strand comprises modification pattern 28S: 5′-nnnnNfNfnnNfnNfnnnnnnnnsnsn-3′ (SEQ ID NO: 11722), wherein “Nf” is a 2′-fluoro-modified nucleoside, “n” is a 2′-O-methyl modified nucleoside, “s” is a phosphorothioate linkage, and “N” is a nucleoside. In some embodiments, the sense strand comprises modification pattern 29S: 5′-nnnnNfnNfnNfnNfnnnnnnnnsnsn-3′ (SEQ ID NO: 11723), wherein “Nf” is a 2′-fluoro-modified nucleoside, “n” is a 2′-O-methyl modified nucleoside, “s” is a phosphorothioate linkage, and “N” is a nucleoside. In some embodiments, the sense strand comprises modification pattern 30S: 5′-nnnnnNfnnNfnNfnnnnnnnnsnsn-3′ (SEQ ID NO: 11724), wherein “Nf” is a 2′-fluoro-modified nucleoside, “n” is a 2′-O-methyl modified nucleoside, “s” is a phosphorothioate linkage, and “N” is a nucleoside. In some embodiments, the sense strand comprises modification pattern 31S: 5′-nnnnnNfNfnNfnnnnnnnnnnsnsn-3′ (SEQ ID NO: 11725), wherein “Nf” is a 2′-fluoro-modified nucleoside, “n” is a 2′-O-methyl modified nucleoside, “s” is a phosphorothioate linkage, and “N” is a nucleoside. In some embodiments, the sense strand comprises modification pattern 32S: 5′-nnnnnnNfnNfNfnnnnnnnnnsnsn-3′ (SEQ ID NO: 11726), wherein “Nf” is a 2′-fluoro-modified nucleoside, “n” is a 2′-O-methyl modified nucleoside, “s” is a phosphorothioate linkage, and “N” is a nucleoside. In some embodiments, the sense strand comprises modification pattern 33S: 5′-nNfnNfnNfnNfNfnnnnnNfnNfNfnsnsn-3′ (SEQ ID NO: 11727), wherein “Nf” is a 2′-fluoro-modified nucleoside, “n” is a 2′-O-methyl modified nucleoside, “s” is a phosphorothioate linkage, and “N” is a nucleoside. In some embodiments, the sense strand comprises modification pattern 34S: 5′-snnnnnNfNfNfNfnNfnnnnnnnnsnsn-3′ (SEQ ID NO: 11728), wherein “Nf” is a 2′-fluoro-modified nucleoside, “n” is a 2′-O-methyl modified nucleoside, “s” is a phosphorothioate linkage, and “N” is a nucleoside. In some embodiments, the sense strand comprises modification pattern 35S: 5′-snnnnnNfNfNfNfnnnnnnnnnnsnsn-3′ (SEQ ID NO: 11729), wherein “Nf” is a 2′-fluoro-modified nucleoside, “n” is a 2′-O-methyl modified nucleoside, “s” is a phosphorothioate linkage, and “N” is a nucleoside. In some embodiments, the sense strand comprises modification pattern 36S: 5′-snnnnNfNfNfNfNfnnnnnnnnnnsnsn-3′ (SEQ ID NO: 11730), wherein “Nf” is a 2′-fluoro-modified nucleoside, “n” is a 2′-O-methyl modified nucleoside, “s” is a phosphorothioate linkage, and “N” is a nucleoside. In some embodiments, the sense strand comprises modification pattern 37S: 5′-snnnnnnnnNfNfnnnnnnnnnsnsn-3′ (SEQ ID NO: 11731), wherein “Nf” is a 2′-fluoro-modified nucleoside, “n” is a 2′-O-methyl modified nucleoside, “s” is a phosphorothioate linkage, and “N” is a nucleoside. In some embodiments, the sense strand comprises modification pattern 38S: 5′-snnnnNfNfnnNfnNfnnnnnnnnsnsn-3′ (SEQ ID NO: 11732), wherein “Nf” is a 2′-fluoro-modified nucleoside, “n” is a 2′-O-methyl modified nucleoside, “s” is a phosphorothioate linkage, and “N” is a nucleoside. In some embodiments, the sense strand comprises modification pattern 39S: 5′-snnnnnNfnnNfnNfnnnnnnnnsnsn-3′ (SEQ ID NO: 11733), wherein “Nf” is a 2′-fluoro-modified nucleoside, “n” is a 2′-O-methyl modified nucleoside, “s” is a phosphorothioate linkage, and “N” is a nucleoside. In some embodiments, the sense strand comprises modification pattern 40S: 5′-snnnnnnNfnNfNfnnnnnnnnnsnsn-3′ (SEQ ID NO: 11734), wherein “Nf” is a 2′-fluoro-modified nucleoside, “n” is a 2′-O-methyl modified nucleoside, “s” is a phosphorothioate linkage, and “N” is a nucleoside. In some embodiments, the sense strand comprises modification pattern 41S: 5′-snNfnNfnNfnNfNfnnnnnNfnNfNfnsnsn-3′ (SEQ ID NO: 11735), wherein “Nf” is a 2′-fluoro-modified nucleoside, “n” is a 2′-O-methyl modified nucleoside, “s” is a phosphorothioate linkage, and “N” is a nucleoside. In some embodiments, the sense strand comprises modification pattern 42S: 5′-NfsnNfnNfnNfNfNfnNfnNfnNfnNfnNfsnsn-3′ (SEQ ID NO: 11736), wherein “Nf” is a 2′-fluoro-modified nucleoside, “n” is a 2′-O-methyl modified nucleoside, “s” is a phosphorothioate linkage, and “N” is a nucleoside. In some embodiments, the sense strand comprises modification pattern 43S: 5′-NfsnNfnNfnNfnNfnNfnNfnNfnNfnNfsnsn-3′ (SEQ ID NO: 11737), wherein “Nf” is a 2′-fluoro-modified nucleoside, “n” is a 2′-O-methyl modified nucleoside, “s” is a phosphorothioate linkage, and “N” is a nucleoside. In some embodiments, the sense strand comprises modification pattern 44S: 5′-NfnNfnNfnNfnNfnNfnNfnNfnNfnNfsnsn-3′ (SEQ ID NO: 11738), wherein “Nf” is a 2′-fluoro-modified nucleoside, “n” is a 2′-O-methyl modified nucleoside, “s” is a phosphorothioate linkage, and “N” is a nucleoside. In some embodiments, the sense strand comprises modification pattern 45S: 5′-nnnnnNfnNfNfnnnnnnnnnnsnsn-3′ (SEQ ID NO: 11781), wherein “Nf” is a 2′-fluoro-modified nucleoside, “n” is a 2′-O-methyl modified nucleoside, “s” is a phosphorothioate linkage, and “N” is a nucleoside. In some embodiments, the sense strand comprises modification pattern 46S: 5′-nnnnNfnnNfNfnnnnnnnnnnsnsn-3′ (SEQ ID NO: 11782), wherein “Nf” is a 2′-fluoro-modified nucleoside, “n” is a 2′-O-methyl modified nucleoside, “s” is a phosphorothioate linkage, and “N” is a nucleoside. In some embodiments, the sense strand comprises modification pattern 47S: 5′-nnnnNfnNfnNfnnnnnnnnnnsnsn-3′ (SEQ ID NO: 11783), wherein “Nf” is a 2′-fluoro-modified nucleoside, “n” is a 2′-O-methyl modified nucleoside, “s” is a phosphorothioate linkage, and “N” is a nucleoside. In some embodiments, the sense strand comprises modification pattern 48S: 5′-nnnnNfNfnnNfnnnnnnnnnnsnsn-3′ (SEQ ID NO: 11784), wherein “Nf” is a 2′-fluoro-modified nucleoside, “n” is a 2′-O-methyl modified nucleoside, “s” is a phosphorothioate linkage, and “N” is a nucleoside. In some embodiments, the sense strand comprises modification pattern 49S: 5′-nnnnNfNfnNfNfnnnnnnnnnnsnsn-3′ (SEQ ID NO: 11785), wherein “Nf” is a 2′-fluoro-modified nucleoside, “n” is a 2′-O-methyl modified nucleoside, “s” is a phosphorothioate linkage, and “N” is a nucleoside. In some embodiments, the sense strand comprises modification pattern 50S: 5′-NfnNfnNfnNfNfNfnNfnNfnNfnNfnNfsnsn-3′ (SEQ ID NO: 11788), wherein “Nf” is a 2′-fluoro-modified nucleoside, “n” is a 2′-O-methyl modified nucleoside, “s” is a phosphorothioate linkage, and “N” is a nucleoside.

[0303] In some embodiments, the composition comprises an oligonucleotide that inhibits the expression of ANGPTL7 wherein the oligonucleotide comprises a siRNA comprising a sense strand and an antisense strand, wherein the antisense strand comprises modification pattern 1AS: 5′-nsNfsnNfnNfnNfnNfnnnNfnNfnNfnsnsn-3′ (SEQ ID NO: 11386), wherein “Nf” is a 2′-fluoro-modified nucleoside, “n” is a 2′-O-methyl modified nucleoside, and “s” is a phosphorothioate linkage. In some embodiments, the antisense strand comprises modification pattern 2AS: 5′-nsNfsnnnNfnNfNfnnnnNfnNfnnnsnsn-3′ (SEQ ID NO: 11387), wherein “Nf” is a 2′-fluoro-modified nucleoside, “n” is a 2′-O-methyl modified nucleoside, and “s” is a phosphorothioate linkage. In some embodiments, the antisense strand comprises modification pattern 3AS: 5′-nsNfsnnnNfnnnnnnnNfnNfnnnsnsn-3′ (SEQ ID NO: 11388), wherein “Nf” is a 2′-fluoro-modified nucleoside, “n” is a 2′-O-methyl modified nucleoside, and “s” is a phosphorothioate linkage. In some embodiments, the antisense strand comprises modification pattern 4AS: 5′-nsNfsnNfnNfnnnnnnnNfnNfnnnsnsn 3′ (SEQ ID NO: 11389), wherein “Nf” is a 2′-fluoro-modified nucleoside, “n” is a 2′-O-methyl modified nucleoside, and “s” is a phosphorothioate linkage. In some embodiments, the antisense strand comprises modification pattern 6AS: 5′-nsNfsnNfnNfnNfnNfnNfnNfnNfnNfnsnsn-3′ (SEQ ID NO: 11399), wherein “Nf” is a 2′-fluoro-modified nucleoside, “n” is a 2′-O-methyl modified nucleoside, and “s” is a phosphorothioate linkage. In some embodiments, the antisense strand comprises modification pattern 7AS: 5′-nsNfsnNfnNfnNfNfnnnnNfnNfnnnsnsn-3′ (SEQ ID NO: 11400), wherein “Nf” is a 2′-fluoro-modified nucleoside, “n” is a 2′-O-methyl modified nucleoside, and “s” is a phosphorothioate linkage. In some embodiments, the antisense strand comprises modification pattern 8AS: 5′-nsNfsnnnnnnnnnnnNfnnnnnsnsn-3′ (SEQ ID NO: 11401), wherein “Nf” is a 2′-fluoro-modified nucleoside, “n” is a 2′-O-methyl modified nucleoside, and “s” is a phosphorothioate linkage. In some embodiments, the antisense strand comprises modification pattern 9AS: 5′-nsNfsnnnnnnnnnNfnNfnNfnNfnsnsn-3′ (SEQ ID NO:11543), wherein “Nf” is a 2′-fluoro-modified nucleoside, “n” is a 2′-O-methyl modified nucleoside, and “s” is a phosphorothioate linkage. In some embodiments, the antisense strand comprises modification pattern 10AS: 5′-nsNfsNfnNfnnnnnnNfnNfnNfnNfnsnsn-3′ (SEQ ID NO:11544), wherein “Nf” is a 2′-fluoro-modified nucleoside, “n” is a 2′-O-methyl modified nucleoside, and “s” is a phosphorothioate linkage. In some embodiments, the antisense strand comprises modification pattern 11AS: 5′-nsnsnNfnNfnNfnNfnNfnNfnNfnNfnsnsn-3′ (SEQ ID NO: 11739), wherein “Nf” is a 2′-fluoro-modified nucleoside, “n” is a 2′-O-methyl modified nucleoside, “s” is a phosphorothioate linkage, and “N” is a nucleoside. In some embodiments, the antisense strand comprises modification pattern 12AS: 5′-nsNfsnnnnNfnnNfnNfnNfnNfnNfnsnsn-3′, wherein “Nf” is a 2′-fluoro-modified nucleoside, “n” is a 2′-O-methyl modified nucleoside, and “s” is a phosphorothioate linkage.

[0304] The antisense strand may be selected from modification pattern 1AS, 2AS, 3AS, 4AS, 6AS, 7AS, 8AS, 9AS, 10AS, 11AS, or 12AS. The antisense strand may be selected from modification pattern 1AS, 2AS, 3AS, 4AS, 6AS, 7AS, 8AS, 9AS, 10AS, or 11AS. In some embodiments, the composition comprises an oligonucleotide that inhibits the expression of ANGPTL7 wherein the oligonucleotide comprises a siRNA comprising a sense strand and an antisense strand, wherein the sense strand comprises pattern 1S and the antisense strand comprises pattern 1AS, 2AS, 3AS, 4AS, 6AS, 7AS, 8AS, 9AS, 10AS, 11AS, or 12AS. In some embodiments, the sense strand comprises pattern 2S and the antisense strand comprises pattern 1AS, 2AS, 3AS, 4AS, 6AS, 7AS, 8AS, 9AS, 10AS, 11AS, or 12AS. In some embodiments, the sense strand comprises pattern 3S and the antisense strand comprises pattern 1AS, 2AS, 3AS, 4AS, 6AS, 7AS, 8AS, 9AS, 10AS, 11AS, or 12AS. In some embodiments, the sense strand comprises pattern 4S and the antisense strand comprises pattern 1AS, 2AS, 3AS, 4AS, 6AS, 7AS, 8AS, 9AS, 10AS, 11AS, or 12AS. In some embodiments, the sense strand comprises pattern 5S and the antisense strand comprises pattern 1AS, 2AS, 3AS, 4AS, 6AS, 7AS, 8AS, 9AS, 10AS, 11AS, or 12AS. In some embodiments, the sense strand comprises pattern 6S and the antisense strand comprises pattern 1AS, 2AS, 3AS, 4AS, 6AS, 7AS, 8AS, 9AS, 10AS, 11AS, or 12AS. In some embodiments, the sense strand comprises pattern 7S and the antisense strand comprises pattern 1AS, 2AS, 3AS, 4AS, 6AS, 7AS, 8AS, 9AS, 10AS, 11AS, or 12AS. In some embodiments, the sense strand comprises pattern 8S and the antisense strand comprises pattern 1AS, 2AS, 3AS, 4AS, 6AS, 7AS, 8AS, 9AS, 10AS, 11AS, or 12AS. In some embodiments, the sense strand comprises pattern 9S and the antisense strand comprises pattern 1AS, 2AS, 3AS, 4AS, 6AS, 7AS, 8AS, 9AS, 10AS, 11AS, or 12AS. In some embodiments, the sense strand comprises pattern 10S and the antisense strand comprises pattern 1AS, 2AS, 3AS, 4AS, 6AS, 7AS, 8AS, 9AS, 10AS, 11AS, or 12AS. In some embodiments, the sense strand comprises pattern 11S and the antisense strand comprises pattern 1AS, 2AS, 3AS, 4AS, 6AS, 7AS, 8AS, 9AS, 10AS, 11AS, or 12AS. In some embodiments, the sense strand comprises pattern 12S and the antisense strand comprises pattern 1AS, 2AS, 3AS, 4AS, 6AS, 7AS, 8AS, 9AS, 10AS, 11AS, or 12AS. In some embodiments, the sense strand comprises pattern 13S and the antisense strand comprises pattern 1AS, 2AS, 3AS, 4AS, 6AS, 7AS, 8AS, 9AS, 10AS, 11AS, or 12AS. In some embodiments, the sense strand comprises pattern 14S and the antisense strand comprises pattern 1AS, 2AS, 3AS, 4AS, 6AS, 7AS, 8AS, 9AS, 10AS, 11AS, or 12AS. In some embodiments, the sense strand comprises pattern 15S and the antisense strand comprises patter 1AS, 2AS, 3AS, 4AS, 5AS, 6AS, 7AS, 8AS, 9AS, 10AS, 11AS, or 12AS. In some embodiments, the sense strand comprises pattern 16S and the antisense strand comprises pattern 1AS, 2AS, 3AS, 4AS, 5AS, 6AS, 7AS, 8AS, 9AS, 10AS, 11AS, or 12AS. In some embodiments, the sense strand comprises pattern 17S and the antisense strand comprises pattern 1AS, 2AS, 3AS, 4AS, 5AS, 6AS, 7AS, 8AS, 9AS, 10AS, 11AS, or 12AS. In some embodiments, the sense strand comprises pattern 18S and the antisense strand comprises pattern 1AS, 2AS, 3AS, 4AS, 5AS, 6AS, 7AS, 8AS, 9AS, 10AS, 11AS, or 12AS. In some embodiments, the sense strand comprises pattern 19S and the antisense strand comprises pattern 1AS, 2AS, 3AS, 4AS, 5AS, 6AS, 7AS, 8AS, 9AS, 10AS, 11AS, or 12AS. In some embodiments, the sense strand comprises pattern 20S and the antisense strand comprises pattern 1AS, 2AS, 3AS, 4AS, 5AS, 6AS, 7AS, 8AS, 9AS, 10AS, 11AS, or 12AS. In some embodiments, the sense strand comprises pattern 21S and the antisense strand comprises pattern 1AS, 2AS, 3AS, 4AS, 5AS, 6AS, 7AS, 8AS, 9AS, 10AS, 11AS, or 12AS. In some embodiments, the sense strand comprises pattern 22S and the antisense strand comprises pattern 1AS, 2AS, 3AS, 4AS, 5AS, 6AS, 7AS, 8AS, 9AS, 10AS, 11AS, or 12AS. In some embodiments, the sense strand comprises pattern 23S and the antisense strand comprises pattern 1AS, 2AS, 3AS, 4AS, 5AS, 6AS, 7AS, 8AS, 9AS, 10AS, 11AS, or 12AS. In some embodiments, the sense strand comprises pattern 24S and the antisense strand comprises pattern 1AS, 2AS, 3AS, 4AS, 5AS, 6AS, 7AS, 8AS, 9AS, 10AS, 11AS, or 12AS. In some embodiments, the sense strand comprises pattern 25S and the antisense strand comprises pattern 1AS, 2AS, 3AS, 4AS, 5AS, 6AS, 7AS, 8AS, 9AS, 10AS, 11AS, or 12AS. In some embodiments, the sense strand comprises pattern 26S and the antisense strand comprises pattern 1AS, 2AS, 3AS, 4AS, 5AS, 6AS, 7AS, 8AS, 9AS, 10AS, 11AS, or 12AS. In some embodiments, the sense strand comprises pattern 27S and the antisense strand comprises pattern 1AS, 2AS, 3AS, 4AS, 5AS, 6AS, 7AS, 8AS, 9AS, 10AS, 11AS, or 12AS. In some embodiments, the sense strand comprises pattern 28S and the antisense strand comprises pattern 1AS, 2AS, 3AS, 4AS, 5AS, 6AS, 7AS, 8AS, 9AS, 10AS, 11AS, or 12AS. In some embodiments, the sense strand comprises pattern 29S and the antisense strand comprises pattern 1AS, 2AS, 3AS, 4AS, 5AS, 6AS, 7AS, 8AS, 9AS, 10AS, 11AS, or 12AS. In some embodiments, the sense strand comprises pattern 30S and the antisense strand comprises pattern 1AS, 2AS, 3AS, 4AS, 5AS, 6AS, 7AS, 8AS, 9AS, 10AS, 11AS, or 12AS. In some embodiments, the sense strand comprises pattern 31S and the antisense strand comprises pattern 1AS, 2AS, 3AS, 4AS, 5AS, 6AS, 7AS, 8AS, 9AS, 10AS, 11AS, or 12AS. In some embodiments, the sense strand comprises pattern 32S and the antisense strand comprises pattern 1AS, 2AS, 3AS, 4AS, 5AS, 6AS, 7AS, 8AS, 9AS, 10AS, 11AS, or 12AS. In some embodiments, the sense strand comprises pattern 33S and the antisense strand comprises pattern 1AS, 2AS, 3AS, 4AS, 5AS, 6AS, 7AS, 8AS, 9AS, 10AS, 11AS, or 12AS. In some embodiments, the sense strand comprises pattern 34S and the antisense strand comprises pattern 1AS, 2AS, 3AS, 4AS, 5AS, 6AS, 7AS, 8AS, 9AS, 10AS, 11AS, or 12AS. In some embodiments, the sense strand comprises pattern 35S and the antisense strand comprises pattern 1AS, 2AS, 3AS, 4AS, 5AS, 6AS, 7AS, 8AS, 9AS, 10AS, 11AS, or 12AS. In some embodiments, the sense strand comprises pattern 36S and the antisense strand comprises pattern 1AS, 2AS, 3AS, 4AS, 5AS, 6AS, 7AS, 8AS, 9AS, 10AS, 11AS, or 12AS. In some embodiments, the sense strand comprises pattern 37S and the antisense strand comprises pattern 1AS, 2AS, 3AS, 4AS, 5AS, 6AS, 7AS, 8AS, 9AS, 10AS, 11AS, or 12AS. In some embodiments, the sense strand comprises pattern 38S and the antisense strand comprises pattern 1AS, 2AS, 3AS, 4AS, 5AS, 6AS, 7AS, 8AS, 9AS, 10AS, 11AS, or 12AS. In some embodiments, the sense strand comprises pattern 39S and the antisense strand comprises pattern 1AS, 2AS, 3AS, 4AS, 5AS, 6AS, 7AS, 8AS, 9AS, 10AS, 11AS, or 12AS. In some embodiments, the sense strand comprises pattern 40S and the antisense strand comprises pattern 1AS, 2AS, 3AS, 4AS, 5AS, 6AS, 7AS, 8AS, 9AS, 10AS, 11AS, or 12AS. In some embodiments, the sense strand comprises pattern 41S and the antisense strand comprises pattern 1AS, 2AS, 3AS, 4AS, 5AS, 6AS, 7AS, 8AS, 9AS, 10AS, 11AS, or 12AS. In some embodiments, the sense strand comprises pattern 42S and the antisense strand comprises pattern 1AS, 2AS, 3AS, 4AS, 5AS, 6AS, 7AS, 8AS, 9AS, 10AS, 11AS, or 12AS. In some embodiments, the sense strand comprises pattern 43S and the antisense strand comprises pattern 1AS, 2AS, 3AS, 4AS, 5AS, 6AS, 7AS, 8AS, 9AS, 10AS, 11AS, or 12AS. In some embodiments, the sense strand comprises pattern 44S and the antisense strand comprises pattern 1AS, 2AS, 3AS, 4AS, 5AS, 6AS, 7AS, 8AS, 9AS, 10AS, 11AS, or 12AS. In some embodiments, the sense strand comprises pattern 45S and the antisense strand comprises pattern 1AS, 2AS, 3AS, 4AS, 5AS, 6AS, 7AS, 8AS, 9AS, 10AS, 11AS, or 12AS. In some embodiments, the sense strand comprises pattern 46S and the antisense strand comprises pattern 1AS, 2AS, 3AS, 4AS, 5AS, 6AS, 7AS, 8AS, 9AS, 10AS, 11AS, or 12AS. In some embodiments, the sense strand comprises pattern 47S and the antisense strand comprises pattern 1AS, 2AS, 3AS, 4AS, 5AS, 6AS, 7AS, 8AS, 9AS, 10AS, 11AS, or 12AS. In some embodiments, the sense strand comprises pattern 48S and the antisense strand comprises pattern 1AS, 2AS, 3AS, 4AS, 5AS, 6AS, 7AS, 8AS, 9AS, 10AS, 11AS, or 12AS. In some embodiments, the sense strand comprises pattern 49S and the antisense strand comprises pattern 1AS, 2AS, 3AS, 4AS, 5AS, 6AS, 7AS, 8AS, 9AS, 10AS, 11AS, or 12AS. In some embodiments, the sense strand comprises pattern 50S and the antisense strand comprises pattern 1AS, 2AS, 3AS, 4AS, 5AS, 6AS, 7AS, 8AS, 9AS, 10AS, 11AS, or 12AS. In some embodiments, the sense strand comprises modification pattern 1AS, 2AS, 3AS, 4AS, 6AS, 7AS, 8AS, 9AS, 10AS, 11AS, or 12AS. In some embodiments, the antisense strand comprises modification pattern 1S, 2S, 3S, 4S, 5S, 6S, 7S, 8S, 9S, 10S, 11S, 12S, 13S, 14S, 15S, 16S, 17S, 18S, 19S, 20S, 21S, 22S, 23S, 24S, 25S, 26S, 27S, 28S, 29S, 30S, 31S, 32S, 33S, 34S, 35S, 36S, 37S, 38S, 39S, 40S, 41S, 42S, 43S, 44S, 45S, 46S, 47S, 48S, 49S, or 50S.

[0305] In some embodiments, the composition comprises an oligonucleotide that inhibits the expression of ANGPTL7, wherein the oligonucleotide comprises a siRNA comprising a sense strand and an antisense strand, wherein the sense strand and/or the antisense strand comprises one or more modifications or modification patterns. In some embodiments, the oligonucleotide comprises a nucleic acid sequence (e.g. a sense strand sequence or an antisense strand sequence) with one or more modifications or modification patterns.

[0306] In some embodiments, purines of the sense strand comprise 2′-fluoro modified purines. In some embodiments, purines of the sense strand comprise 2′-O-methyl modified purines. In some embodiments, purines of the sense strand comprise a mixture of 2′-fluoro and 2′-O-methyl modified purines. In some embodiments, all purines of the sense strand comprise 2′-fluoro modified purines. In some embodiments, all purines of the sense strand comprise 2′-O-methyl modified purines. In some embodiments, all purines of the sense strand comprise a mixture of 2′-fluoro and 2′-O-methyl modified purines.

[0307] In some embodiments, pyrimidines of the sense strand comprise 2′-fluoro modified pyrimidines. In some embodiments, pyrimidines of the sense strand comprise 2′-O-methyl modified pyrimidines. In some embodiments, pyrimidines of the sense strand comprise a mixture of 2′-fluoro and 2′-O-methyl modified pyrimidines. In some embodiments, all pyrimidines of the sense strand comprise 2′-fluoro modified pyrimidines. In some embodiments, all pyrimidines of the sense strand comprise 2′-O-methyl modified pyrimidines. In some embodiments, all pyrimidines of the sense strand comprise a mixture of 2′-fluoro and 2′-O-methyl modified pyrimidines.

[0308] In some embodiments, purines of the sense strand comprise 2′-fluoro modified purines, and pyrimidines of the sense strand comprise a mixture of 2′-fluoro and 2′-O-methyl modified pyrimidines. In some embodiments, purines of the sense strand comprise 2′-O-methyl modified purines, and pyrimidines of the sense strand comprise a mixture of 2′-fluoro and 2′-O-methyl modified pyrimidines. In some embodiments, purines of the sense strand comprise 2′-fluoro modified purines, and pyrimidines of the sense strand comprise 2′-O-methyl modified pyrimidines. In some embodiments, purines of the sense strand comprise 2′-O-methyl modified purines, and pyrimidines of the sense strand comprise 2′-fluoro modified pyrimidines. In some embodiments, pyrimidines of the sense strand comprise 2′-fluoro modified pyrimidines, and purines of the sense strand comprise a mixture of 2′-fluoro and 2′-O-methyl modified purines. In some embodiments, pyrimidines of the sense strand comprise 2′-O-methyl modified pyrimidines, and purines of the sense strand comprise a mixture of 2′-fluoro and 2′-O-methyl modified purines. In some embodiments, pyrimidines of the sense strand comprise 2′-fluoro modified pyrimidines, and purines of the sense strand comprise 2′-O-methyl modified purines. In some embodiments, pyrimidines of the sense strand comprise 2′-O-methyl modified pyrimidines, and purines of the sense strand comprise 2′-fluoro modified purines.

[0309] In some embodiments, all purines of the sense strand comprise 2′-fluoro modified purines, and all pyrimidines of the sense strand comprise a mixture of 2′-fluoro and 2′-O-methyl modified pyrimidines. In some embodiments, all purines of the sense strand comprise 2′-O-methyl modified purines, and all pyrimidines of the sense strand comprise a mixture of 2′-fluoro and 2′-O-methyl modified pyrimidines. In some embodiments, all purines of the sense strand comprise 2′-fluoro modified purines, and all pyrimidines of the sense strand comprise 2′-O-methyl modified pyrimidines. In some embodiments, all purines of the sense strand comprise 2′-O-methyl modified purines, and all pyrimidines of the sense strand comprise 2′-fluoro modified pyrimidines. In some embodiments, all pyrimidines of the sense strand comprise 2′-fluoro modified pyrimidines, and all purines of the sense strand comprise a mixture of 2′-fluoro and 2′-O-methyl modified purines. In some embodiments, all pyrimidines of the sense strand comprise 2′-O-methyl modified pyrimidines, and all purines of the sense strand comprise a mixture of 2′-fluoro and 2′-O-methyl modified purines. In some embodiments, all pyrimidines of the sense strand comprise 2′-fluoro modified pyrimidines, and all purines of the sense strand comprise 2′-O-methyl modified purines. In some embodiments, all pyrimidines of the sense strand comprise 2′-O-methyl modified pyrimidines, and all purines of the sense strand comprise 2′-fluoro modified purines.

[0310] In some embodiments, purines of the antisense strand comprise 2′-fluoro modified purines. In some embodiments, purines of the antisense strand comprise 2′-O-methyl modified purines. In some embodiments, purines of the antisense strand comprise a mixture of 2′-fluoro and 2′-O-methyl modified purines. In some embodiments, all purines of the antisense strand comprise 2′-fluoro modified purines. In some embodiments, all purines of the antisense strand comprise 2′-O-methyl modified purines. In some embodiments, all purines of the antisense strand comprise a mixture of 2′-fluoro and 2′-O-methyl modified purines.

[0311] In some embodiments, pyrimidines of the antisense strand comprise 2′-fluoro modified pyrimidines. In some embodiments, pyrimidines of the antisense strand comprise 2′-O-methyl modified pyrimidines. In some embodiments, pyrimidines of the antisense strand comprise a mixture of 2′-fluoro and 2′-O-methyl modified pyrimidines. In some embodiments, all pyrimidines of the antisense strand comprise 2′-fluoro modified pyrimidines. In some embodiments, all pyrimidines of the antisense strand comprise 2′-O-methyl modified pyrimidines. In some embodiments, all pyrimidines of the antisense strand comprise a mixture of 2′-fluoro and 2′-O-methyl modified pyrimidines.

[0312] In some embodiments, purines of the antisense strand comprise 2′-fluoro modified purines, and pyrimidines of the antisense strand comprise a mixture of 2′-fluoro and 2′-O-methyl modified pyrimidines. In some embodiments, purines of the antisense strand comprise 2′-O-methyl modified purines, and pyrimidines of the antisense strand comprise a mixture of 2′-fluoro and 2′-O-methyl modified pyrimidines. In some embodiments, purines of the antisense strand comprise 2′-fluoro modified purines, and pyrimidines of the antisense strand comprise 2′-O-methyl modified pyrimidines. In some embodiments, purines of the antisense strand comprise 2′-O-methyl modified purines, and pyrimidines of the antisense strand comprise 2′-fluoro modified pyrimidines. In some embodiments, pyrimidines of the antisense strand comprise 2′-fluoro modified pyrimidines, and purines of the antisense strand comprise a mixture of 2′-fluoro and 2′-O-methyl modified purines. In some embodiments, pyrimidines of the antisense strand comprise 2′-O-methyl modified pyrimidines, and purines of the antisense strand comprise a mixture of 2′-fluoro and 2′-O-methyl modified purines. In some embodiments, pyrimidines of the antisense strand comprise 2′-fluoro modified pyrimidines, and purines of the antisense strand comprise 2′-O-methyl modified purines. In some embodiments, pyrimidines of the antisense strand comprise 2′-O-methyl modified pyrimidines, and purines of the antisense strand comprise 2′-fluoro modified purines.

[0313] In some embodiments, all purines of the antisense strand comprise 2′-fluoro modified purines, and all pyrimidines of the antisense strand comprise a mixture of 2′-fluoro and 2′-O-methyl modified pyrimidines. In some embodiments, all purines of the antisense strand comprise 2′-O-methyl modified purines, and all pyrimidines of the antisense strand comprise a mixture of 2′-fluoro and 2′-O-methyl modified pyrimidines. In some embodiments, all purines of the antisense strand comprise 2′-fluoro modified purines, and all pyrimidines of the antisense strand comprise 2′-O-methyl modified pyrimidines. In some embodiments, all purines of the antisense strand comprise 2′-O-methyl modified purines, and all pyrimidines of the antisense strand comprise 2′-fluoro modified pyrimidines. In some embodiments, all pyrimidines of the antisense strand comprise 2′-fluoro modified pyrimidines, and all purines of the antisense strand comprise a mixture of 2′-fluoro and 2′-O-methyl modified purines. In some embodiments, all pyrimidines of the antisense strand comprise 2′-O-methyl modified pyrimidines, and all purines of the antisense strand comprise a mixture of 2′-fluoro and 2′-O-methyl modified purines. In some embodiments, all pyrimidines of the antisense strand comprise 2′-fluoro modified pyrimidines, and all purines of the antisense strand comprise 2′-O-methyl modified purines. In some embodiments, all pyrimidines of the antisense strand comprise 2′-O-methyl modified pyrimidines, and all purines of the antisense strand comprise 2′-fluoro modified purines.

[0314] In some embodiments, the antisense strand comprises one or two 3′ phosphorothioate linkages. For example, there may be a phosphorothioate linkage between the first and second nucleotides from the 3′ end of the antisense strand, or there may be phosphorothioate linkages between the first, second and third nucleotides from the 3′ end of the antisense strand. In some embodiments, the sense strand comprises one or two 5′ phosphorothioate linkages. For example, there may be a phosphorothioate linkage between the first and second nucleotides from the 5′ end of the sense strand, or there may be phosphorothioate linkages between the first, second and third nucleotides from the 5′ end of the sense strand. In some embodiments, the sense strand does not comprise one or two 5′ phosphorothioate linkages. For example, in some embodiments, there are no phosphorothioate linkages between the last 3 nucleotides at the 5′ end of the sense strand. In some embodiments, the sense strand comprises 5′ phosphate linkages. In some embodiments, the sense strand comprises one or two 3′ phosphorothioate linkages. For example, there may be a phosphorothioate linkage between the first and second nucleotides from the 3′ end of the sense strand, or there may be phosphorothioate linkages between the first, second and third nucleotides from the 3′ end of the sense strand.

[0315] In some embodiments, the composition comprises an oligonucleotide that inhibits the expression of a target nucleic acid, wherein the oligonucleotide comprises an siRNA comprising a sense strand and an antisense strand, wherein the oligonucleotide comprises a hydrophobic moiety. In some embodiments, the hydrophobic moiety may be attached at the 5′ end of the sense strand. In some embodiments, the hydrophobic moiety may be attached at the 3′ end of the sense strand. In some embodiments, the hydrophobic moiety may be attached at the 5′ end of the antisense strand. In some embodiments, the hydrophobic moiety may be attached at the 3′ end of the antisense strand.

[0316] In some embodiments, the composition comprises an oligonucleotide that inhibits the expression of a target nucleic acid, wherein the oligonucleotide comprises an siRNA comprising a sense strand and an antisense strand, wherein the oligonucleotide comprises one or more vinyl phosphonate. In some embodiments, the one or more vinyl phosphonate may be attached at the 5′ end of the sense strand. In some embodiments, the one or more vinyl phosphonate may be attached at the 3′ end of the sense strand. In some embodiments, the one or more vinyl phosphonate may be attached at the 5′ end of the antisense strand. In some embodiments, the one or more vinyl phosphonate may be attached at the 3′ end of the antisense strand.

[0317] In some embodiments, the nucleic acid sequence comprises or consists of a sequence at least 75% identical to of any one of SEQ ID NOs: 11093-11332, at least 80% identical to of any one of SEQ ID NOs: 11093-11332, at least 85% identical to of any one of SEQ ID NOs: 11093-11332, at least 90% identical to of any one of SEQ ID NOs: 11093-11332, or at least 95% identical to of any one of SEQ ID NOs: 11093-11332. In some embodiments, the nucleic acid sequence comprises or consists of the sequence of any one of SEQ ID NOs: 11093-11332, or a sequence thereof having 1, 2, 3, or 4 nucleoside substitutions, additions, or deletions. In some embodiments, the nucleic acid sequence comprises or consists of the sequence of any one of SEQ ID NOs: 11093-11332, or a sequence thereof having 1 or 2 nucleoside substitutions, additions, or deletions. In some embodiments, the nucleic acid sequence comprises or consists of the sequence of any one of SEQ ID NOs: 11093-11332. In some embodiments, the nucleic acid sequence is an unmodified version of a nucleic acid sequence described herein. In some embodiments, the nucleic acid sequence has more or different sequence modifications than a nucleic acid sequence described herein.

[0318] In some embodiments, the nucleic acid sequence comprises or consists of a sequence at least 75% identical to of any one of SEQ ID NOs: 11333-11376, at least 80% identical to of any one of SEQ ID NOs: 11333-11376, at least 85% identical to of any one of SEQ ID NOs: 11333-11376, at least 90% identical to of any one of SEQ ID NOs: 11333-11376, or at least 95% identical to of any one of SEQ ID NOs: 11333-11376. In some embodiments, the nucleic acid sequence comprises or consists of the sequence of any one of SEQ ID NOs: 11333-11376, or a sequence thereof having 1, 2, 3, or 4 nucleoside substitutions, additions, or deletions. In some embodiments, the nucleic acid sequence comprises or consists of the sequence of any one of SEQ ID NOs: 11333-11376, or a sequence thereof having 1 or 2 nucleoside substitutions, additions, or deletions. In some embodiments, the nucleic acid sequence comprises or consists of the sequence of any one of SEQ ID NOs: 11333-11376. In some embodiments, the nucleic acid sequence lacks the sequence modifications, or has different or additional sequence modifications, but otherwise is similar to a sequence described herein.

[0319] In some embodiments, the nucleic acid sequence comprises or consists of a sequence at least 75% identical to of any one of SEQ ID NOs: 11402-11449 or 11500-11507, at least 80% identical to of any one of SEQ ID NOs: 11402-11449 or 11500-11507, at least 85% identical to of any one of SEQ ID NOs: 11402-11449 or 11500-11507, at least 90% identical to of any one of SEQ ID NOs: 11402-11449 or 11500-11507, or at least 95% identical to of any one of SEQ ID NOs: 11402-11449 or 11500-11507. In some embodiments, the nucleic acid sequence comprises or consists of the sequence of any one of SEQ ID NOs: 11402-11449 or 11500-11507, or a sequence thereof having 1, 2, 3, or 4 nucleoside substitutions, additions, or deletions. In some embodiments, the nucleic acid sequence comprises or consists of the sequence of any one of SEQ ID NOs: 11402-11449 or 11500-11507, or a sequence thereof having 1 or 2 nucleoside substitutions, additions, or deletions. In some embodiments, the nucleic acid sequence comprises or consists of the sequence of any one of SEQ ID NOs: 11402-11449 or 11500-11507. In some embodiments, the nucleic acid sequence lacks the sequence modifications, or has different or additional sequence modifications, but otherwise is similar to a sequence described herein.

[0320] In some embodiments, the oligonucleotide comprises or consists of any one of the siRNAs disclosed in any of Tables 4-20, or an siRNA thereof having 1 or 2 nucleoside substitutions, additions, or deletions. In some embodiments, the oligonucleotide comprises or consists of any one of the siRNAs disclosed in any of Tables 4-20. In some embodiments, the oligonucleotide comprises a nucleoside sequence at least 85% identical the sense strand sequence of an siRNA in any of Tables 4-20.

[0321] In some embodiments, the oligonucleotide comprises or consists of any one of the siRNAs disclosed in any of Tables 4-9, 14, 15, 17, or 18, or an siRNA thereof having 1 or 2 nucleoside substitutions, additions, or deletions. In some embodiments, the oligonucleotide comprises or consists of any one of the siRNAs disclosed in any of Tables 4-9, 14, 15, 17, or 18. In some embodiments, the oligonucleotide comprises or consists of any one of the siRNAs disclosed in any of Tables 4-9, 14, 15, 17, or 18 where a relative ANGPTL expression in the table is below 1, or an siRNA thereof having 1 or 2 nucleoside substitutions, additions, or deletions. In some embodiments, the oligonucleotide comprises or consists of any one of the siRNAs disclosed in any of Tables 4-9, 14, 15, 17, or 18 where a relative ANGPTL expression in the table is below 1. In some embodiments, the oligonucleotide comprises or consists of any one of the siRNAs disclosed in any of Tables 4-9, 14, 15, 17, or 18 where a relative ANGPTL expression of the siRNA in the table is below the expression of a negative control in the table, or an siRNA thereof having 1 or 2 nucleoside substitutions, additions, or deletions. In some embodiments, the oligonucleotide comprises or consists of any one of the siRNAs disclosed in any of Tables 4-9, 14, 15, 17, or 18 where a relative ANGPTL expression of the siRNA in the table is below the expression of a negative control in the table. In some embodiments, the oligonucleotide comprises or consists of any one of the siRNAs disclosed in any of Tables 4-9, 14, 15, 17, or 18 where a relative ANGPTL expression in the table is below 0.5, or an siRNA thereof having 1 or 2 nucleoside substitutions, additions, or deletions. In some embodiments, the oligonucleotide comprises or consists of any one of the siRNAs disclosed in any of Tables 4-9, 14, 15, 17, or 18 where a relative ANGPTL expression in the table is below 0.5. In some embodiments, the oligonucleotide comprises or consists of any one of the siRNAs disclosed in any of Tables 4-9, 14, 15, 17, or 18 where a relative ANGPTL expression in the table is below 0.25, or an siRNA thereof having 1 or 2 nucleoside substitutions, additions, or deletions. In some embodiments, the oligonucleotide comprises or consists of any one of the siRNAs disclosed in any of Tables 4-9, 14, 15, 17, or 18 where a relative ANGPTL expression in the table is below 0.25. In some embodiments, the oligonucleotide comprises or consists of an unmodified version of any one of the siRNAs disclosed in any of Tables 4-9, 14, 15, 17, or 18. In some embodiments, the oligonucleotide comprises or consists of an siRNA with the nucleic acid sequence of any one of the siRNAs disclosed in any of Tables 4-9, 14, 15, 17, or 18, but with one or more additional or different modifications, or with a different modification pattern. In some embodiments, the nucleic acid sequence lacks the sequence modifications, or has different or additional sequence modifications, but otherwise is similar to a sequence described herein.

[0322] In some embodiments, the sense strand comprises a sense strand sequence with one or more modifications or modification patterns. In some embodiments, the sense strand sequence comprises or consists of a sequence at least 75% identical to of any one of SEQ ID NOs: 11093-11212, at least 80% identical to of any one of SEQ ID NOs: 11093-11212, at least 85% identical to of any one of SEQ ID NOs: 11093-11212, at least 90% identical to of any one of SEQ ID NOs: 11093-11212, or at least 95% identical to of any one of SEQ ID NOs: 11093-11212. In some embodiments, the sense strand sequence comprises or consists of the sequence of any one of SEQ ID NOs: 11093-11212, or a sequence thereof having 1, 2, 3, or 4 nucleoside substitutions, additions, or deletions. In some embodiments, the sense strand sequence comprises or consists of the sequence of any one of SEQ ID NOs: 11093-11212, or a sequence thereof having 1 or 2 nucleoside substitutions, additions, or deletions. In some embodiments, the sense strand sequence comprises or consists of the sequence of any one of SEQ ID NOs: 11093-11212. In some embodiments, the sense strand sequence is an unmodified version of a sense strand sequence described herein. In some embodiments, the sense strand sequence has more or different sequence modifications than a sense strand sequence described herein.

[0323] In some embodiments, the sense strand sequence comprises or consists of a sequence at least 75% identical to of any one of SEQ ID NOs: 11333-11354, at least 80% identical to of any one of SEQ ID NOs: 11333-11354, at least 85% identical to of any one of SEQ ID NOs: 11333-11354, at least 90% identical to of any one of SEQ ID NOs: 11333-11354, or at least 95% identical to of any one of SEQ ID NOs: 11333-11354. In some embodiments, the sense strand sequence comprises or consists of the sequence of any one of SEQ ID NOs: 11333-11354, or a sequence thereof having 1, 2, 3, or 4 nucleoside substitutions, additions, or deletions. In some embodiments, the sense strand sequence comprises or consists of the sequence of any one of SEQ ID NOs: 11333-11354, or a sequence thereof having 1 or 2 nucleoside substitutions, additions, or deletions. In some embodiments, the sense strand sequence comprises or consists of the sequence of any one of SEQ ID NOs: 11333-11354. In some embodiments, the sense strand sequence lacks the sequence modifications, or has different or additional sequence modifications, but otherwise is similar to a sequence described herein.

[0324] In some embodiments, the sense strand sequence comprises or consists of a sequence at least 75% identical to of any one of SEQ ID NOs: 11402-11421, 11442-11445, or 11500-11503; at least 80% identical to of any one of SEQ ID NOs: 11402-11421, 11442-11445, or 11500-11503; at least 85% identical to of any one of SEQ ID NOs: 11402-11421, 11442-11445, or 11500-11503; at least 90% identical to of any one of SEQ ID NOs: 11402-11421, 11442-11445, or 11500-11503; or at least 95% identical to of any one of SEQ ID NOs: 11402-11421, 11442-11445, or 11500-11503. In some embodiments, the sense strand sequence comprises or consists of the sequence of any one of SEQ ID NOs: 11402-11421, 11442-11445, or 11500-11503, or a sequence thereof having 1, 2, 3, or 4 nucleoside substitutions, additions, or deletions. In some embodiments, the sense strand sequence comprises or consists of the sequence of any one of SEQ ID NOs: 11402-11421, 11442-11445, or 11500-11503, or a sequence thereof having 1 or 2 nucleoside substitutions, additions, or deletions. In some embodiments, the sense strand sequence comprises or consists of the sequence of any one of SEQ ID NOs: 11402-11421, 11442-11445, or 11500-11503. In some embodiments, the sense strand sequence lacks the sequence modifications, or has different or additional sequence modifications, but otherwise is similar to a sequence described herein.

[0325] In some embodiments, the sense strand sequence comprises or consists of a sense strand sequence of a sense strand sequence of any one of the siRNAs disclosed in any of Tables 4-20, or an siRNA thereof having 1 or 2 nucleoside substitutions, additions, or deletions. In some embodiments, the sense strand sequence comprises or consists of a sense strand sequence of a sense strand sequence of any one of the siRNAs disclosed in any of Tables 4-20. In some embodiments, the sense strand sequence comprises or consists of a sequence at least 75% identical, at least 80% identical, at least 85% identical, at least 90% identical, or at least 95% identical to a sense strand sequence of an siRNA in any of Tables 4-20.

[0326] In some embodiments, the sense strand sequence comprises or consists of a sense strand sequence of a sense strand sequence of any one of the siRNAs disclosed in any of Tables 4-9, 14, 15, 17, or 18, or an siRNA thereof having 1 or 2 nucleoside substitutions, additions, or deletions. In some embodiments, the sense strand sequence comprises or consists of a sense strand sequence of any one of the siRNAs disclosed in any of Tables 4-9, 14, 15, 17, or 18. In some embodiments, the sense strand sequence comprises or consists of a sense strand sequence of any one of the siRNAs disclosed in any of Tables 4-9, 14, 15, 17, or 18 where a relative ANGPTL expression in the table is below 1, or an siRNA thereof having 1 or 2 nucleoside substitutions, additions, or deletions. In some embodiments, the sense strand sequence comprises or consists of a sense strand sequence of any one of the siRNAs disclosed in any of Tables 4-9, 14, 15, 17, or 18 where a relative ANGPTL expression in the table is below 1. In some embodiments, the sense strand sequence comprises or consists of a sense strand sequence of any one of the siRNAs disclosed in any of Tables 4-9, 14, 15, 17, or 18 where a relative ANGPTL expression of the siRNA in the table is below the expression of a negative control in the table, or an siRNA thereof having 1 or 2 nucleoside substitutions, additions, or deletions. In some embodiments, the sense strand sequence comprises or consists of a sense strand sequence of any one of the siRNAs disclosed in any of Tables 4-9, 14, 15, 17, or 18 where a relative ANGPTL expression of the siRNA in the table is below the expression of a negative control in the table. In some embodiments, the sense strand sequence comprises or consists of a sense strand sequence of any one of the siRNAs disclosed in any of Tables 4-9, 14, 15, 17, or 18 where a relative ANGPTL expression in the table is below 0.5, or an siRNA thereof having 1 or 2 nucleoside substitutions, additions, or deletions. In some embodiments, the sense strand sequence comprises or consists of a sense strand sequence of any one of the siRNAs disclosed in any of Tables 4-9, 14, 15, 17, or 18 where a relative ANGPTL expression in the table is below 0.5. In some embodiments, the sense strand sequence comprises or consists of a sense strand sequence of any one of the siRNAs disclosed in any of Tables 4-9, 14, 15, 17, or 18 where a relative ANGPTL expression in the table is below 0.25, or an siRNA thereof having 1 or 2 nucleoside substitutions, additions, or deletions. In some embodiments, the sense strand sequence comprises or consists of a sense strand sequence of any one of the siRNAs disclosed in any of Tables 4-9, 14, 15, 17, or 18 where a relative ANGPTL expression in the table is below 0.25. In some embodiments, the sense strand sequence comprises or consists of an unmodified version of a sense strand sequence of any one of the siRNAs disclosed in any of Tables 4-9, 14, 15, 17, or 18. In some embodiments, the sense strand sequence comprises or consists of an siRNA with the sense strand sequence of a sense strand sequence of any one of the siRNAs disclosed in any of Tables 4-9, 14, 15, 17, or 18, but with one or more additional or different modifications, or with a different modification pattern. In some embodiments, the sense strand sequence lacks the sequence modifications, or has different or additional sequence modifications, but otherwise is similar to a sequence described herein.

[0327] In some embodiments, the sense strand sequence comprises or consists of a sense strand sequence of any one of the siRNAs disclosed in Table 4, or an siRNA thereof having 1 or 2 nucleoside substitutions, additions, or deletions. In some embodiments, the sense strand sequence comprises or consists of a sense strand sequence of any one of the siRNAs disclosed in Table 4. In some embodiments, the sense strand sequence comprises or consists of a sense strand sequence of any one of the siRNAs disclosed in Table 4 where the relative ANGPTL expression in the table is below 1, or an siRNA thereof having 1 or 2 nucleoside substitutions, additions, or deletions. In some embodiments, the sense strand sequence comprises or consists of a sense strand sequence of any one of the siRNAs disclosed in Table 4 where the relative ANGPTL expression in the table is below 1. In some embodiments, the sense strand sequence comprises or consists of a sense strand sequence of any one of the siRNAs disclosed in Table 4 where the relative ANGPTL expression of the siRNA in the table is below the expression of the negative control siRNA in the table (e.g. below a relative expression level of 0.67), or an siRNA thereof having 1 or 2 nucleoside substitutions, additions, or deletions. In some embodiments, the sense strand sequence comprises or consists of a sense strand sequence of any one of the siRNAs disclosed in Table 4 where the relative ANGPTL expression of the siRNA in the table is below the expression of the negative control siRNA in the table (e.g. below a relative expression level of 0.67). In some embodiments, the sense strand sequence comprises or consists of a sense strand sequence of any one of the siRNAs disclosed in Table 4 where the relative ANGPTL expression in the table is below 0.5, or an siRNA thereof having 1 or 2 nucleoside substitutions, additions, or deletions. In some embodiments, the sense strand sequence comprises or consists of a sense strand sequence of any one of the siRNAs disclosed in Table 4 where the relative ANGPTL expression in the table is below 0.5. In some embodiments, the sense strand sequence comprises or consists of a sense strand sequence of any one of the siRNAs disclosed in Table 4 where the relative ANGPTL expression in the table is below 0.25, or an siRNA thereof having 1 or 2 nucleoside substitutions, additions, or deletions. In some embodiments, the sense strand sequence comprises or consists of a sense strand sequence of any one of the siRNAs disclosed in Table 4 where the relative ANGPTL expression in the table is below 0.25. In some embodiments, the sense strand sequence comprises or consists of an unmodified version of a sense strand sequence of any one of the siRNAs disclosed in Table 4. In some embodiments, the sense strand sequence comprises or consists of an siRNA with the sense strand sequence of a sense strand sequence of any one of the siRNAs disclosed in Table 4, but with one or more additional or different modifications, or with a different modification pattern. In some embodiments, the sense strand sequence lacks the sequence modifications, or has different or additional sequence modifications, but otherwise is similar to a sequence described herein.

[0328] In some embodiments, the sense strand sequence is incorporated into an siRNA that downregulates ANGPTL7. In some embodiments, the sense strand sequence comprises or consists of a sense strand sequence of any one of SEQ ID NOs: 11094, 11095, 11096, 11097, 11098, 11099, 11100, 11101, 11102, 11103, 11104, 11105, 11106, 11109, 11110, 11113, 11116, 11118, 11119, 11121, 11122, 11123, 11124, 11125, 11126, 11127, 11128, 11129, 11130, 11132, 11133, 11134, 11135, 11136, 11139, 11140, 11143, 11144, 11145, 11146, 11147, 11148, 11149, 11150, 11151, 11152, 11153, 11154, 11155, 11156, 11157, 11158, 11159, 11160, 11161, 11162, 11163, 11164, 11165, 11166, 11167, 11168, 11169, 11170, 11171, 11172, 11173, 11174, 11175, 11176, 11177, 11178, 11180, 11181, 11182, 11183, 11184, 11185, 11186, 11187, 11188, 11189, 11191, 11193, 11195, 11196, 11198, 11199, 11200, 11201, 11203, 11204, 11205, 11207, 11208, 11210, 11211, or 11212, 11377, 11442, 11445, 11500, 11501, 11502, 11503, or an siRNA thereof having 1 or 2 nucleoside substitutions, additions, or deletions. In some embodiments, the sense strand sequence comprises or consists of a sense strand sequence of any one of SEQ ID NOs: 11094, 11095, 11096, 11097, 11098, 11099, 11100, 11101, 11102, 11103, 11104, 11105, 11106, 11109, 11110, 11113, 11116, 11118, 11119, 11121, 11122, 11123, 11124, 11125, 11126, 11127, 11128, 11129, 11130, 11132, 11133, 11134, 11135, 11136, 11139, 11140, 11143, 11144, 11145, 11146, 11147, 11148, 11149, 11150, 11151, 11152, 11153, 11154, 11155, 11156, 11157, 11158, 11159, 11160, 11161, 11162, 11163, 11164, 11165, 11166, 11167, 11168, 11169, 11170, 11171, 11172, 11173, 11174, 11175, 11176, 11177, 11178, 11180, 11181, 11182, 11183, 11184, 11185, 11186, 11187, 11188, 11189, 11191, 11193, 11195, 11196, 11198, 11199, 11200, 11201, 11203, 11204, 11205, 11207, 11208, 11210, 11211, 11212, 11377, 11442, 11445, 11500, 11501, 11502, or 11503.

[0329] In some embodiments, the siRNA comprises a sense strand having a sequence in accordance with any of SEQ ID NOs: 11106, 11129, 11130, 11133, 11134, 11135, 11177, 11178, 11205, 11207, 11208, 11211, 11212, or 11643-11676. In some embodiments, the sense strand sequence comprises or consists of a sequence at least 75% identical to any one of SEQ ID NOs: 11106, 11129, 11130, 11133, 11134, 11135, 11177, 11178, 11205, 11207, 11208, 11211, 11212, or 11643-11676, at least 80% identical to any one of SEQ ID NOs: 11106, 11129, 11130, 11133, 11134, 11135, 11177, 11178, 11205, 11207, 11208, 11211, 11212, or 11643-11676, at least 85% identical to of any one of SEQ ID NOs: 11106, 11129, 11130, 11133, 11134, 11135, 11177, 11178, 11205, 11207, 11208, 11211, 11212, or 11643-11676, at least 90% identical to any one of SEQ ID NOs: 11529-11533, or at least 95% identical to any one of SEQ ID NOs: 11106, 11129, 11130, 11133, 11134, 11135, 11177, 11178, 11205, 11207, 11208, 11211, 11212, or 11643-11676. In some embodiments, the sense strand sequence comprises or consists of the sequence of any one of SEQ ID NOs: 11106, 11129, 11130, 11133, 11134, 11135, 11177, 11178, 11205, 11207, 11208, 11211, 11212, or 11643-11676, or a sense strand sequence thereof having 1, 2, 3, or 4 nucleoside substitutions, additions, or deletions. In some embodiments, the sense strand sequence comprises or consists of the sequence of any one of SEQ ID NOs: 11106, 11129, 11130, 11133, 11134, 11135, 11177, 11178, 11205, 11207, 11208, 11211, 11212, or 11643-11676, or a sense strand sequence thereof having 1 or 2 nucleoside substitutions, additions, or deletions. In some embodiments, the sense strand sequence comprises or consists of a sequence 100% identical to SEQ ID NOs: 11106, 11129, 11130, 11133, 11134, 11135, 11177, 11178, 11205, 11207, 11208, 11211, 11212, or 11643-11676. The sense strand may comprise a modification pattern described herein. The sense strand may comprise a lipid moiety such as a cholesterol moiety described herein.

[0330] In some embodiments, the siRNA comprises an antisense strand having a sequence in accordance with any of SEQ ID NOs: 11226, 11249, 11250, 11253, 11254, 11255, 11297, 11298, 11325, 11327, 11328, 11331, 11332, or 11677-11710. In some embodiments, the antisense strand sequence comprises or consists of a sequence at least 75% identical to any one of SEQ ID NOs: 11226, 11249, 11250, 11253, 11254, 11255, 11297, 11298, 11325, 11327, 11328, 11331, 11332, or 11677-11710, at least 80% identical to any one of SEQ ID NOs: 11534-11538, at least 85% identical to of any one of SEQ ID NOs: 11226, 11249, 11250, 11253, 11254, 11255, 11297, 11298, 11325, 11327, 11328, 11331, 11332, or 11677-11710, at least 90% identical to any one of SEQ ID NOs: 11534-11538, or at least 95% identical to any one of SEQ ID NOs: 11226, 11249, 11250, 11253, 11254, 11255, 11297, 11298, 11325, 11327, 11328, 11331, 11332, or 11677-11710. In some embodiments, the antisense strand sequence comprises or consists of the sequence of any one of SEQ ID NOs: 11226, 11249, 11250, 11253, 11254, 11255, 11297, 11298, 11325, 11327, 11328, 11331, 11332, or 11677-11710, or an antisense strand sequence thereof having 1, 2, 3, or 4 nucleoside substitutions, additions, or deletions. In some embodiments, the antisense strand sequence comprises or consists of the sequence of any one of SEQ ID NOs: 11226, 11249, 11250, 11253, 11254, 11255, 11297, 11298, 11325, 11327, 11328, 11331, 11332, or 11677-11710, or an antisense strand sequence thereof having 1 or 2 nucleoside substitutions, additions, or deletions. In some embodiments, the antisense strand sequence comprises or consists of a sequence 100% identical to SEQ ID NOs: 11226, 11249, 11250, 11253, 11254, 11255, 11297, 11298, 11325, 11327, 11328, 11331, 11332, or 11677-11710. The antisense strand may comprise a modification pattern described herein.

[0331] In some embodiments, the siRNA comprises a sense strand having a sequence in accordance with any of SEQ ID NOs: 1424, 1765, 1765, or 1796. In some embodiments, the sense strand sequence comprises or consists of a sequence at least 75% identical to any one of SEQ ID NOs: 1424, 1765, 1765, or 1796, at least 80% identical to any one of SEQ ID NOs: 1424, 1765, 1765, or 1796, at least 85% identical to of any one of SEQ ID NOs: 1424, 1765, 1765, or 1796, at least 90% identical to any one of SEQ ID NOs: 1424, 1765, 1765, or 1796, or at least 95% identical to any one of SEQ ID NOs: 1424, 1765, 1765, or 1796. In some embodiments, the sense strand sequence comprises or consists of the sequence of any one of SEQ ID NOs: 1424, 1765, 1765, or 1796, or a sense strand sequence thereof having 1, 2, 3, or 4 nucleoside substitutions, additions, or deletions. The sense strand may comprise a modification pattern described herein. In some embodiments, the sense strand sequence comprises or consists of the sequence of any one of SEQ ID NOs: 1424, 1765, 1765, or 1796, or a sense strand sequence thereof having 1 or 2 nucleoside substitutions, additions, or deletions. In some embodiments, the sense strand sequence comprises or consists of a sequence 100% identical to SEQ ID NOs: 1424, 1765, 1765, or 1796. The sense strand may comprise a lipid moiety such as a cholesterol moiety described herein.

[0332] In some embodiments, the siRNA comprises an antisense strand having a sequence in accordance with any of SEQ ID NOs: 3630, 3971, 3971, or 4002. In some embodiments, the antisense strand sequence comprises or consists of a sequence at least 75% identical to any one of SEQ ID NOs: 3630, 3971, 3971, or 4002, at least 80% identical to any one of SEQ ID NOs: 3630, 3971, 3971, or 4002, at least 85% identical to of any one of SEQ ID NOs: 3630, 3971, 3971, or 4002, at least 90% identical to any one of SEQ ID NOs: 3630, 3971, 3971, or 4002, or at least 95% identical to any one of SEQ ID NOs: 3630, 3971, 3971, or 4002. In some embodiments, the antisense strand sequence comprises or consists of the sequence of any one of SEQ ID NOs: 3630, 3971, 3971, or 4002, or an antisense strand sequence thereof having 1, 2, 3, or 4 nucleoside substitutions, additions, or deletions. In some embodiments, the antisense strand sequence comprises or consists of the sequence of any one of SEQ ID NOs: 3630, 3971, 3971, or 4002, or an antisense strand sequence thereof having 1 or 2 nucleoside substitutions, additions, or deletions. In some embodiments, the antisense strand sequence comprises or consists of a sequence 100% identical to SEQ ID NOs: 3630, 3971, 3971, or 4002. The antisense strand may comprise a modification pattern described herein.

[0333] In some embodiments, the nucleic acid sequence comprises or consists of a sequence at least 75% identical to of any one of SEQ ID NOs: 11549-11642, at least 80% identical to of any one of SEQ ID NOs: 11549-11642, at least 85% identical to of any one of SEQ ID NOs: 11549-11642, at least 90% identical to of any one of SEQ ID NOs: 11549-11642, or at least 95% identical to of any one of SEQ ID NOs: 11549-11642. In some embodiments, the nucleic acid sequence comprises or consists of the sequence of any one of SEQ ID NOs: 11549-11642, or a sequence thereof having 1, 2, 3, or 4 nucleoside substitutions, additions, or deletions. In some embodiments, the nucleic acid sequence comprises or consists of the sequence of any one of SEQ ID NOs: 11549-11642, or a sequence thereof having 1 or 2 nucleoside substitutions, additions, or deletions. In some embodiments, the nucleic acid sequence comprises or consists of the sequence of any one of SEQ ID NOs: 11549-11642. In some embodiments, the nucleic acid sequence is an unmodified version of a nucleic acid sequence described herein. In some embodiments, the nucleic acid sequence has more or different sequence modifications than a nucleic acid sequence described herein.

[0334] In some embodiments, the sense strand sequence comprises or consists of a sense strand sequence of any one of the siRNAs disclosed in Table 5, or an siRNA thereof having 1 or 2 nucleoside substitutions, additions, or deletions. In some embodiments, the sense strand sequence comprises or consists of a sense strand sequence of any one of the siRNAs disclosed in Table 5. In some embodiments, the sense strand sequence comprises or consists of a sense strand sequence of any one of the siRNAs disclosed in Table 5 where the relative ANGPTL expression in the table is below 1, or an siRNA thereof having 1 or 2 nucleoside substitutions, additions, or deletions. In some embodiments, the sense strand sequence comprises or consists of a sense strand sequence of any one of the siRNAs disclosed in Table 5 where the relative ANGPTL expression in the table is below 1. In some embodiments, the sense strand sequence comprises or consists of a sense strand sequence of any one of the siRNAs disclosed in Table 5 where the relative ANGPTL expression of the siRNA in the table is below the expression of the negative control siRNA in the table (e.g. below a relative expression level of 1.06), or an siRNA thereof having 1 or 2 nucleoside substitutions, additions, or deletions. In some embodiments, the sense strand sequence comprises or consists of a sense strand sequence of any one of the siRNAs disclosed in Table 5 where the relative ANGPTL expression of the siRNA in the table is below the expression of the negative control siRNA in the table (e.g. below a relative expression level of 1.06). In some embodiments, the sense strand sequence comprises or consists of a sense strand sequence of any one of the siRNAs disclosed in Table 5 where the relative ANGPTL expression in the table is below 0.5, or an siRNA thereof having 1 or 2 nucleoside substitutions, additions, or deletions. In some embodiments, the sense strand sequence comprises or consists of a sense strand sequence of any one of the siRNAs disclosed in Table 5 where the relative ANGPTL expression in the table is below 0.5. In some embodiments, the sense strand sequence comprises or consists of a sense strand sequence of any one of the siRNAs disclosed in Table 5 where the relative ANGPTL expression in the table is below 0.25, or an siRNA thereof having 1 or 2 nucleoside substitutions, additions, or deletions. In some embodiments, the sense strand sequence comprises or consists of a sense strand sequence of any one of the siRNAs disclosed in Table 5 where the relative ANGPTL expression in the table is below 0.25. In some embodiments, the sense strand sequence comprises or consists of an unmodified version of a sense strand sequence of any one of the siRNAs disclosed in Table 5. In some embodiments, the sense strand sequence comprises or consists of an siRNA with the sense strand sequence of a sense strand sequence of any one of the siRNAs disclosed in Table 5, but with one or more additional or different modifications, or with a different modification pattern. In some embodiments, the sense strand sequence lacks the sequence modifications, or has different or additional sequence modifications, but otherwise is similar to a sequence described herein.

[0335] In some embodiments, the sense strand sequence comprises or consists of a sense strand sequence of any one of the siRNAs disclosed in Table 6, or an siRNA thereof having 1 or 2 nucleoside substitutions, additions, or deletions. In some embodiments, the sense strand sequence comprises or consists of a sense strand sequence of any one of the siRNAs disclosed in Table 6. In some embodiments, the sense strand sequence comprises or consists of a sense strand sequence of any one of the siRNAs disclosed in Table 6 where the relative ANGPTL expression at 1 nM in the table is below 1, or an siRNA thereof having 1 or 2 nucleoside substitutions, additions, or deletions. In some embodiments, the sense strand sequence comprises or consists of a sense strand sequence of any one of the siRNAs disclosed in Table 6 where the relative ANGPTL expression at 1 nM in the table is below 1. In some embodiments, the sense strand sequence comprises or consists of a sense strand sequence of any one of the siRNAs disclosed in Table 6 where the relative ANGPTL expression at 1 nM of the siRNA in the table is below the expression of the negative control siRNA in the table (e.g. below a relative expression level of 0.66), or an siRNA thereof having 1 or 2 nucleoside substitutions, additions, or deletions. In some embodiments, the sense strand sequence comprises or consists of a sense strand sequence of any one of the siRNAs disclosed in Table 6 where the relative ANGPTL expression at 1 nM of the siRNA in the table is below the expression of the negative control siRNA in the table (e.g. below a relative expression level of 0.66). In some embodiments, the sense strand sequence comprises or consists of a sense strand sequence of any one of the siRNAs disclosed in Table 6 where the relative ANGPTL expression at 1 nM in the table is below 0.5, or an siRNA thereof having 1 or 2 nucleoside substitutions, additions, or deletions. In some embodiments, the sense strand sequence comprises or consists of a sense strand sequence of any one of the siRNAs disclosed in Table 6 where the relative ANGPTL expression at 1 nM in the table is below 0.5 (e.g. an siRNA with the sequence of ETD00245, ETD00247, or ETD00252). In some embodiments, the sense strand sequence comprises or consists of a sense strand sequence of any one of the siRNAs disclosed in Table 6 where the relative ANGPTL expression at 10 nM in the table is below 1, or an siRNA thereof having 1 or 2 nucleoside substitutions, additions, or deletions. In some embodiments, the sense strand sequence comprises or consists of a sense strand sequence of any one of the siRNAs disclosed in Table 6 where the relative ANGPTL expression at 10 nM in the table is below 1. In some embodiments, the sense strand sequence comprises or consists of an unmodified version of a sense strand sequence of any one of the siRNAs disclosed in Table 6. In some embodiments, the sense strand sequence comprises or consists of an siRNA with the sense strand sequence of a sense strand sequence of any one of the siRNAs disclosed in Table 6, but with one or more additional or different modifications, or with a different modification pattern. In some embodiments, the sense strand sequence lacks the sequence modifications, or has different or additional sequence modifications, but otherwise is similar to a sequence described herein.

[0336] In some embodiments, the sense strand sequence comprises or consists of a sense strand sequence of any one of the siRNAs disclosed in Table 7, or an siRNA thereof having 1 or 2 nucleoside substitutions, additions, or deletions. In some embodiments, the sense strand sequence comprises or consists of a sense strand sequence of any one of the siRNAs disclosed in Table 7. In some embodiments, the sense strand sequence comprises or consists of a sense strand sequence of any one of the siRNAs disclosed in Table 8, or an siRNA thereof having 1 or 2 nucleoside substitutions, additions, or deletions. In some embodiments, the sense strand sequence comprises or consists of a sense strand sequence of any one of the siRNAs disclosed in Table 8. In some embodiments, the sense strand sequence comprises or consists of a sense strand sequence of any one of the siRNAs disclosed in Table 9, or an siRNA thereof having 1 or 2 nucleoside substitutions, additions, or deletions. In some embodiments, the sense strand sequence comprises or consists of a sense strand sequence of any one of the siRNAs disclosed in Table 9. In some embodiments, the sense strand sequence lacks the sequence modifications, or has different or additional sequence modifications, but otherwise is similar to a sequence described herein.

[0337] In some embodiments, the sense strand sequence comprises or consists of a sense strand sequence of any one of the siRNAs disclosed in Table 10, or an siRNA thereof having 1 or 2 nucleoside substitutions, additions, or deletions. In some embodiments, the sense strand sequence comprises or consists of a sense strand sequence of any one of the siRNAs disclosed in Table 10. In some embodiments, the sense strand sequence comprises or consists of a sense strand sequence of any one of the siRNAs disclosed in Table 10 where the percent of the siRNA remaining at 4 hours in the table is at least 50%, or an siRNA thereof having 1 or 2 nucleoside substitutions, additions, or deletions. In some embodiments, the sense strand sequence comprises or consists of a sense strand sequence of any one of the siRNAs disclosed in Table 10 where the percent of the siRNA remaining at 4 hours in the table is at least 50%. In some embodiments, the sense strand sequence comprises or consists of a sense strand sequence of any one of the siRNAs disclosed in Table 10 where the percent of the siRNA remaining at 4 hours in the table is at least 75%, or an siRNA thereof having 1 or 2 nucleoside substitutions, additions, or deletions. In some embodiments, the sense strand sequence comprises or consists of a sense strand sequence of any one of the siRNAs disclosed in Table 10 where the percent of the siRNA remaining at 4 hours in the table is at least 75%. In some embodiments, the sense strand sequence comprises or consists of a sense strand sequence of any one of the siRNAs disclosed in Table 10 where the percent of the siRNA remaining at 24 hours in the table is at least 50%, or an siRNA thereof having 1 or 2 nucleoside substitutions, additions, or deletions. In some embodiments, the sense strand sequence comprises or consists of a sense strand sequence of any one of the siRNAs disclosed in Table 10 where the percent of the siRNA remaining at 24 hours in the table is at least 50%. In some embodiments, the sense strand sequence comprises or consists of a sense strand sequence of any one of the siRNAs disclosed in Table 10 where the percent of the siRNA remaining at 24 hours in the table is at least 75%, or an siRNA thereof having 1 or 2 nucleoside substitutions, additions, or deletions. In some embodiments, the sense strand sequence comprises or consists of a sense strand sequence of any one of the siRNAs disclosed in Table 10 where the percent of the siRNA remaining at 24 hours in the table is at least 75%. In some embodiments, the sense strand sequence comprises or consists of an unmodified version of a sense strand sequence of any one of the siRNAs disclosed in Table 10. In some embodiments, the sense strand sequence comprises or consists of an siRNA with the sense strand sequence of a sense strand sequence of any one of the siRNAs disclosed in Table 10, but with one or more additional or different modifications, or with a different modification pattern. In some embodiments, the sense strand sequence lacks the sequence modifications, or has different or additional sequence modifications, but otherwise is similar to a sequence described herein.

[0338] In some embodiments, the sense strand sequence comprises or consists of a sense strand sequence of any one of the siRNAs disclosed in Table 11, or an siRNA thereof having 1 or 2 nucleoside substitutions, additions, or deletions. In some embodiments, the sense strand sequence comprises or consists of a sense strand sequence of any one of the siRNAs disclosed in Table 11. In some embodiments, the sense strand sequence comprises or consists of a sense strand sequence of any one of the siRNAs disclosed in Table 12, or an siRNA thereof having 1 or 2 nucleoside substitutions, additions, or deletions. In some embodiments, the sense strand sequence comprises or consists of a sense strand sequence of any one of the siRNAs disclosed in Table 12. In some embodiments, the sense strand sequence lacks the sequence modifications, or has different or additional sequence modifications, but otherwise is similar to a sequence described herein.

[0339] In some embodiments, the sense strand sequence comprises or consists of the sequence of the sense strand of siRNA ETD00269, or an siRNA thereof having 1 or 2 nucleoside substitutions, additions, or deletions. In some embodiments, the sense strand sequence comprises or consists of the sequence of the sense strand of siRNA ETD00269. In some embodiments, the sense strand sequence comprises or consists of the sequence of the sense strand of siRNA ETD00270, or an siRNA thereof having 1 or 2 nucleoside substitutions, additions, or deletions. In some embodiments, the sense strand sequence comprises or consists of the sequence of the sense strand of siRNA ETD00270. In some embodiments, the sense strand sequence comprises or consists of the sequence of the sense strand of siRNA ETD00353, or an siRNA thereof having 1 or 2 nucleoside substitutions, additions, or deletions. In some embodiments, the sense strand sequence comprises or consists of the sequence of the sense strand of siRNA ETD00353. In some embodiments, the sense strand sequence comprises or consists of the sequence of the sense strand of siRNA ETD00356, or an siRNA thereof having 1 or 2 nucleoside substitutions, additions, or deletions. In some embodiments, the sense strand sequence comprises or consists of the sequence of the sense strand of siRNA ETD00356. In some embodiments, the sense strand sequence comprises or consists of the sequence of the sense strand of siRNA ETD00358, or an siRNA thereof having 1 or 2 nucleoside substitutions, additions, or deletions. In some embodiments, the sense strand sequence comprises or consists of the sequence of the sense strand of siRNA ETD00358. In some embodiments, the sense strand sequence comprises or consists of the sequence of the sense strand of siRNA ETD00370, or an siRNA thereof having 1 or 2 nucleoside substitutions, additions, or deletions. In some embodiments, the sense strand sequence comprises or consists of the sequence of the sense strand of siRNA ETD00370. In some embodiments, the sense strand sequence comprises or consists of the sequence of the sense strand of siRNA ETD00377, or an siRNA thereof having 1 or 2 nucleoside substitutions, additions, or deletions. In some embodiments, the sense strand sequence comprises or consists of the sequence of the sense strand of siRNA ETD00377. In some embodiments, the sense strand sequence comprises or consists of the sequence of the sense strand of siRNA ETD00378, or an siRNA thereof having 1 or 2 nucleoside substitutions, additions, or deletions. In some embodiments, the sense strand sequence comprises or consists of the sequence of the sense strand of siRNA ETD00378. In some embodiments, the sense strand sequence comprises or consists of the sequence of the sense strand of siRNA ETD00382, or an siRNA thereof having 1 or 2 nucleoside substitutions, additions, or deletions. In some embodiments, the sense strand sequence comprises or consists of the sequence of the sense strand of siRNA ETD00382. In some embodiments, the sense strand sequence comprises or consists of the sequence of SEQ ID NO: 11377, or an siRNA thereof having 1 or 2 nucleoside substitutions, additions, or deletions. In some embodiments, the sense strand sequence comprises or consists of the sequence of SEQ ID NO: 11377. In some embodiments, the sense strand sequence comprises or consists of the sequence of SEQ ID NO: 11378, or an siRNA thereof having 1 or 2 nucleoside substitutions, additions, or deletions. In some embodiments, the sense strand sequence comprises or consists of the sequence of SEQ ID NO: 11387. In some embodiments, the sense strand sequence lacks the sequence modifications, or has different or additional sequence modifications, but otherwise is similar to a sequence described herein.

[0340] In some embodiments, the sense strand sequence comprises or consists of the sequence of the sense strand of siRNA ETD00752, or an siRNA thereof having 1 or 2 nucleoside substitutions, additions, or deletions. In some embodiments, the sense strand sequence comprises or consists of the sequence of the sense strand of siRNA ETD00752. In some embodiments, the sense strand sequence comprises or consists of the sequence of the sense strand of siRNA ETD01040, or an siRNA thereof having 1 or 2 nucleoside substitutions, additions, or deletions. In some embodiments, the sense strand sequence comprises or consists of the sequence of the sense strand of siRNA ETD01040. In some embodiments, the sense strand sequence comprises or consists of the sequence of the sense strand of siRNA ETD01043, or an siRNA thereof having 1 or 2 nucleoside substitutions, additions, or deletions. In some embodiments, the sense strand sequence comprises or consists of the sequence of the sense strand of siRNA ETD01043. In some embodiments, the sense strand sequence comprises or consists of the sequence of SEQ ID NO: 11377, or an siRNA thereof having 1 or 2 nucleoside substitutions, additions, or deletions. In some embodiments, the sense strand sequence comprises or consists of the sequence of SEQ ID NO: 11377. In some embodiments, the sense strand sequence comprises or consists of the sequence of SEQ ID NO: 11442, or an siRNA thereof having 1 or 2 nucleoside substitutions, additions, or deletions. In some embodiments, the sense strand sequence comprises or consists of the sequence of SEQ ID NO: 11442. In some embodiments, the sense strand sequence comprises or consists of the sequence of SEQ ID NO: 11445, or an siRNA thereof having 1 or 2 nucleoside substitutions, additions, or deletions. In some embodiments, the sense strand sequence comprises or consists of the sequence of SEQ ID NO: 11445. In some embodiments, the sense strand sequence comprises or consists of the sequence of SEQ ID NO: 11500, or an siRNA thereof having 1 or 2 nucleoside substitutions, additions, or deletions. In some embodiments, the sense strand sequence comprises or consists of the sequence of SEQ ID NO: 11500. In some embodiments, the sense strand sequence comprises or consists of the sequence of SEQ ID NO: 11501, or an siRNA thereof having 1 or 2 nucleoside substitutions, additions, or deletions. In some embodiments, the sense strand sequence comprises or consists of the sequence of SEQ ID NO: 11501. In some embodiments, the sense strand sequence comprises or consists of the sequence of SEQ ID NO: 11502, or an siRNA thereof having 1 or 2 nucleoside substitutions, additions, or deletions. In some embodiments, the sense strand sequence comprises or consists of the sequence of SEQ ID NO: 11502. In some embodiments, the sense strand sequence comprises or consists of the sequence of SEQ ID NO: 11503, or an siRNA thereof having 1 or 2 nucleoside substitutions, additions, or deletions. In some embodiments, the sense strand sequence comprises or consists of the sequence of SEQ ID NO: 11503. In some embodiments, the sense strand sequence lacks the sequence modifications, or has different or additional sequence modifications, but otherwise is similar to a sequence described herein.

[0341] In some embodiments, the antisense strand comprises an antisense strand sequence with one or more modifications or modification patterns. In some embodiments, the antisense strand sequence comprises or consists of a sequence at least 75% identical to of any one of SEQ ID NOs: 11093-11212, at least 80% identical to of any one of SEQ ID NOs: 11093-11212, at least 85% identical to of any one of SEQ ID NOs: 11093-11212, at least 90% identical to of any one of SEQ ID NOs: 11093-11212, or at least 95% identical to of any one of SEQ ID NOs: 11093-11212. In some embodiments, the antisense strand sequence comprises or consists of the sequence of any one of SEQ ID NOs: 11093-11212, or a sequence thereof having 1, 2, 3, or 4 nucleoside substitutions, additions, or deletions. In some embodiments, the antisense strand sequence comprises or consists of the sequence of any one of SEQ ID NOs: 11093-11212, or a sequence thereof having 1 or 2 nucleoside substitutions, additions, or deletions. In some embodiments, the antisense strand sequence comprises or consists of the sequence of any one of SEQ ID NOs: 11093-11212. In some embodiments, the antisense strand sequence is an unmodified version of an antisense strand sequence described herein. In some embodiments, the antisense strand sequence has more or different sequence modifications than an antisense strand sequence described herein.

[0342] In some embodiments, the antisense strand sequence comprises or consists of a sequence at least 75% identical to of any one of SEQ ID NOs: 11333-11354, at least 80% identical to of any one of SEQ ID NOs: 11333-11354, at least 85% identical to of any one of SEQ ID NOs: 11333-11354, at least 90% identical to of any one of SEQ ID NOs: 11333-11354, or at least 95% identical to of any one of SEQ ID NOs: 11333-11354. In some embodiments, the antisense strand sequence comprises or consists of the sequence of any one of SEQ ID NOs: 11333-11354, or a sequence thereof having 1, 2, 3, or 4 nucleoside substitutions, additions, or deletions. In some embodiments, the antisense strand sequence comprises or consists of the sequence of any one of SEQ ID NOs: 11333-11354, or a sequence thereof having 1 or 2 nucleoside substitutions, additions, or deletions. In some embodiments, the antisense strand sequence comprises or consists of the sequence of any one of SEQ ID NOs: 11333-11354. In some embodiments, the antisense strand sequence lacks the sequence modifications, or has different or additional sequence modifications, but otherwise is similar to a sequence described herein.

[0343] In some embodiments, the antisense strand sequence comprises or consists of a sequence at least 75% identical to of any one of SEQ ID NOs: 11422-11441, 11446-11449, or 11504-11507; at least 80% identical to of any one of SEQ ID NOs: 11422-11441, 11446-11449, or 11504-11507; at least 85% identical to of any one of SEQ ID NOs: 11422-11441, 11446-11449, or 11504-11507; at least 90% identical to of any one of SEQ ID NOs: 11422-11441, 11446-11449, or 11504-11507; or at least 95% identical to of any one of SEQ ID NOs: 11422-11441, 11446-11449, or 11504-11507. In some embodiments, the antisense strand sequence comprises or consists of the sequence of any one of SEQ ID NOs: 11422-11441, 11446-11449, 11504-11507, or a sequence thereof having 1, 2, 3, or 4 nucleoside substitutions, additions, or deletions. In some embodiments, the antisense strand sequence comprises or consists of the sequence of any one of SEQ ID NOs: 11422-11441, 11446-11449, 11504-11507, or a sequence thereof having 1 or 2 nucleoside substitutions, additions, or deletions. In some embodiments, the antisense strand sequence comprises or consists of the sequence of any one of SEQ ID NOs: 11422-11441, 11446-11449, 11504-11507. In some embodiments, the antisense strand sequence lacks the sequence modifications, or has different or additional sequence modifications, but otherwise is similar to a sequence described herein.

[0344] In some embodiments, the antisense strand sequence comprises or consists of an antisense strand sequence of an antisense strand sequence of any one of the siRNAs disclosed in any of Tables 4-10, or an siRNA thereof having 1 or 2 nucleoside substitutions, additions, or deletions. In some embodiments, the antisense strand sequence comprises or consists of an antisense strand sequence of an antisense strand sequence of any one of the siRNAs disclosed in any of Tables 4-10. In some embodiments, the antisense strand sequence comprises or consists of a sequence at least 75% identical, at least 80% identical, at least 85% identical, at least 90% identical, or at least 95% identical to an antisense strand sequence of an siRNA in any of Tables 4-101.

[0345] In some embodiments, the antisense strand sequence comprises or consists of an antisense strand sequence of an antisense strand sequence of any one of the siRNAs disclosed in any of Tables 4-9, 14, 15, 17, or 18, or an siRNA thereof having 1 or 2 nucleoside substitutions, additions, or deletions. In some embodiments, the antisense strand sequence comprises or consists of an antisense strand sequence of any one of the siRNAs disclosed in any of Tables 4-9, 14, 15, 17, or 18. In some embodiments, the antisense strand sequence comprises or consists of an antisense strand sequence of any one of the siRNAs disclosed in any of Tables 4-9, 14, 15, 17, or 18 where a relative ANGPTL expression in the table is below 1, or a siRNA thereof having 1 or 2 nucleoside substitutions, additions, or deletions. In some embodiments, the antisense strand sequence comprises or consists of an antisense strand sequence of any one of the siRNAs disclosed in any of Tables 4-9, 14, 15, 17, or 18 where a relative ANGPTL expression in the table is below 1. In some embodiments, the antisense strand sequence comprises or consists of an antisense strand sequence of any one of the siRNAs disclosed in any of Tables 4-9, 14, 15, 17, or 18 where a relative ANGPTL expression of the siRNA in the table is below the expression of a negative control in the table, or an siRNA thereof having 1 or 2 nucleoside substitutions, additions, or deletions. In some embodiments, the antisense strand sequence comprises or consists of an antisense strand sequence of any one of the siRNAs disclosed in any of Tables 4-9, 14, 15, 17, or 18 where a relative ANGPTL expression of the siRNA in the table is below the expression of a negative control in the table. In some embodiments, the antisense strand sequence comprises or consists of an antisense strand sequence of any one of the siRNAs disclosed in any of Tables 4-9, 14, 15, 17, or 18 where a relative ANGPTL expression in the table is below 0.5, or an siRNA thereof having 1 or 2 nucleoside substitutions, additions, or deletions. In some embodiments, the antisense strand sequence comprises or consists of an antisense strand sequence of any one of the siRNAs disclosed in any of Tables 4-9, 14, 15, 17, or 18 where a relative ANGPTL expression in the table is below 0.5. In some embodiments, the antisense strand sequence comprises or consists of an antisense strand sequence of any one of the siRNAs disclosed in any of Tables 4-9, 14, 15, 17, or 18 where a relative ANGPTL expression in the table is below 0.25, or an siRNA thereof having 1 or 2 nucleoside substitutions, additions, or deletions. In some embodiments, the antisense strand sequence comprises or consists of an antisense strand sequence of any one of the siRNAs disclosed in any of Tables 4-9, 14, 15, 17, or 18 where a relative ANGPTL expression in the table is below 0.25. In some embodiments, the antisense strand sequence comprises or consists of an unmodified version of an antisense strand sequence of any one of the siRNAs disclosed in any of Tables 4-9, 14, 15, 17, or 18. In some embodiments, the antisense strand sequence comprises or consists of an siRNA with the antisense strand sequence of an antisense strand sequence of any one of the siRNAs disclosed in any of Tables 4-9, 14, 15, 17, or 18, but with one or more additional or different modifications, or with a different modification pattern. In some embodiments, the antisense strand sequence lacks the sequence modifications, or has different or additional sequence modifications, but otherwise is similar to a sequence described herein.

[0346] In some embodiments, the antisense strand sequence comprises or consists of an antisense strand sequence of any one of the siRNAs disclosed in Table 4, or an siRNA thereof having 1 or 2 nucleoside substitutions, additions, or deletions. In some embodiments, the antisense strand sequence comprises or consists of an antisense strand sequence of any one of the siRNAs disclosed in Table 4. In some embodiments, the antisense strand sequence comprises or consists of an antisense strand sequence of any one of the siRNAs disclosed in Table 4 where the relative ANGPTL expression in the table is below 1, or an siRNA thereof having 1 or 2 nucleoside substitutions, additions, or deletions. In some embodiments, the antisense strand sequence comprises or consists of an antisense strand sequence of any one of the siRNAs disclosed in Table 4 where the relative ANGPTL expression in the table is below 1. In some embodiments, the antisense strand sequence comprises or consists of an antisense strand sequence of any one of the siRNAs disclosed in Table 4 where the relative ANGPTL expression of the siRNA in the table is below the expression of the negative control siRNA in the table (e.g. below a relative expression level of 0.67), or an siRNA thereof having 1 or 2 nucleoside substitutions, additions, or deletions. In some embodiments, the antisense strand sequence comprises or consists of an antisense strand sequence of any one of the siRNAs disclosed in Table 4 where the relative ANGPTL expression of the siRNA in the table is below the expression of the negative control siRNA in the table (e.g. below a relative expression level of 0.67). In some embodiments, the antisense strand sequence comprises or consists of an antisense strand sequence of any one of the siRNAs disclosed in Table 4 where the relative ANGPTL expression in the table is below 0.5, or an siRNA thereof having 1 or 2 nucleoside substitutions, additions, or deletions. In some embodiments, the antisense strand sequence comprises or consists of an antisense strand sequence of any one of the siRNAs disclosed in Table 4 where the relative ANGPTL expression in the table is below 0.5. In some embodiments, the antisense strand sequence comprises or consists of an antisense strand sequence of any one of the siRNAs disclosed in Table 4 where the relative ANGPTL expression in the table is below 0.25, or an siRNA thereof having 1 or 2 nucleoside substitutions, additions, or deletions. In some embodiments, the antisense strand sequence comprises or consists of an antisense strand sequence of any one of the siRNAs disclosed in Table 4 where the relative ANGPTL expression in the table is below 0.25. In some embodiments, the antisense strand sequence comprises or consists of an unmodified version of an antisense strand sequence of any one of the siRNAs disclosed in Table 4. In some embodiments, the antisense strand sequence comprises or consists of an siRNA with the antisense strand sequence of an antisense strand sequence of any one of the siRNAs disclosed in Table 4, but with one or more additional or different modifications, or with a different modification pattern. In some embodiments, the antisense strand sequence lacks the sequence modifications, or has different or additional sequence modifications, but otherwise is similar to a sequence described herein.

[0347] In some embodiments, the antisense strand sequence is incorporated into an siRNA that downregulates ANGPTL7. In some embodiments, the antisense strand sequence comprises or consists of an antisense strand sequence of any one of SEQ ID NOs: 11214, 11215, 11216, 11217, 11218, 11219, 11220, 11221, 11222, 11223, 11224, 11225, 11226, 11229, 11230, 11233, 11236, 11238, 11239, 11241, 11242, 11243, 11244, 11245, 11246, 11247, 11248, 11249, 11250, 11252, 11253, 11254, 11255, 11256, 11259, 11260, 11263, 11264, 11265, 11266, 11267, 11268, 11269, 11270, 11271, 11272, 11273, 11274, 11275, 11276, 11277, 11278, 11279, 11280, 11281, 11282, 11283, 11284, 11285, 11286, 11287, 11288, 11289, 11290, 11291, 11292, 11293, 11294, 11295, 11296, 11297, 11298, 11300, 11301, 11302, 11303, 11304, 11305, 11306, 11307, 11308, 11309, 11311, 11313, 11315, 11316, 11318, 11319, 11320, 11321, 11323, 11324, 11325, 11327, 11328, 11330, 11331, 11332, 11446, 11449, 11504, 11505, 11506, 11507, or an siRNA thereof having 1 or 2 nucleoside substitutions, additions, or deletions. In some embodiments, the antisense strand sequence comprises or consists of an antisense strand sequence of any one of SEQ ID NOs: 11214, 11215, 11216, 11217, 11218, 11219, 11220, 11221, 11222, 11223, 11224, 11225, 11226, 11229, 11230, 11233, 11236, 11238, 11239, 11241, 11242, 11243, 11244, 11245, 11246, 11247, 11248, 11249, 11250, 11252, 11253, 11254, 11255, 11256, 11259, 11260, 11263, 11264, 11265, 11266, 11267, 11268, 11269, 11270, 11271, 11272, 11273, 11274, 11275, 11276, 11277, 11278, 11279, 11280, 11281, 11282, 11283, 11284, 11285, 11286, 11287, 11288, 11289, 11290, 11291, 11292, 11293, 11294, 11295, 11296, 11297, 11298, 11300, 11301, 11302, 11303, 11304, 11305, 11306, 11307, 11308, 11309, 11311, 11313, 11315, 11316, 11318, 11319, 11320, 11321, 11323, 11324, 11325, 11327, 11328, 11330, 11331, 11332, 11446, 11449, 11504, 11505, 11506, or 11507.

[0348] In some embodiments, the antisense strand sequence comprises or consists of an antisense strand sequence of any one of the siRNAs disclosed in Table 5, or an siRNA thereof having 1 or 2 nucleoside substitutions, additions, or deletions. In some embodiments, the antisense strand sequence comprises or consists of an antisense strand sequence of any one of the siRNAs disclosed in Table 5. In some embodiments, the antisense strand sequence comprises or consists of an antisense strand sequence of any one of the siRNAs disclosed in Table 5 where the relative ANGPTL expression in the table is below 1, or an siRNA thereof having 1 or 2 nucleoside substitutions, additions, or deletions. In some embodiments, the antisense strand sequence comprises or consists of an antisense strand sequence of any one of the siRNAs disclosed in Table 5 where the relative ANGPTL expression in the table is below 1. In some embodiments, the antisense strand sequence comprises or consists of an antisense strand sequence of any one of the siRNAs disclosed in Table 5 where the relative ANGPTL expression of the siRNA in the table is below the expression of the negative control siRNA in the table (e.g. below a relative expression level of 1.06), or an siRNA thereof having 1 or 2 nucleoside substitutions, additions, or deletions. In some embodiments, the antisense strand sequence comprises or consists of an antisense strand sequence of any one of the siRNAs disclosed in Table 5 where the relative ANGPTL expression of the siRNA in the table is below the expression of the negative control siRNA in the table (e.g. below a relative expression level of 1.06). In some embodiments, the antisense strand sequence comprises or consists of an antisense strand sequence of any one of the siRNAs disclosed in Table 5 where the relative ANGPTL expression in the table is below 0.5, or an siRNA thereof having 1 or 2 nucleoside substitutions, additions, or deletions. In some embodiments, the antisense strand sequence comprises or consists of an antisense strand sequence of any one of the siRNAs disclosed in Table 5 where the relative ANGPTL expression in the table is below 0.5. In some embodiments, the antisense strand sequence comprises or consists of an antisense strand sequence of any one of the siRNAs disclosed in Table 5 where the relative ANGPTL expression in the table is below 0.25, or an siRNA thereof having 1 or 2 nucleoside substitutions, additions, or deletions. In some embodiments, the antisense strand sequence comprises or consists of an antisense strand sequence of any one of the siRNAs disclosed in Table 5 where the relative ANGPTL expression in the table is below 0.25. In some embodiments, the antisense strand sequence comprises or consists of an unmodified version of an antisense strand sequence of any one of the siRNAs disclosed in Table 5. In some embodiments, the antisense strand sequence comprises or consists of an siRNA with the antisense strand sequence of an antisense strand sequence of any one of the siRNAs disclosed in Table 5, but with one or more additional or different modifications, or with a different modification pattern. In some embodiments, the antisense strand sequence lacks the sequence modifications, or has different or additional sequence modifications, but otherwise is similar to a sequence described herein.

[0349] In some embodiments, the antisense strand sequence comprises or consists of an antisense strand sequence of any one of the siRNAs disclosed in Table 6, or an siRNA thereof having 1 or 2 nucleoside substitutions, additions, or deletions. In some embodiments, the antisense strand sequence comprises or consists of an antisense strand sequence of any one of the siRNAs disclosed in Table 6. In some embodiments, the antisense strand sequence comprises or consists of an antisense strand sequence of any one of the siRNAs disclosed in Table 6 where the relative ANGPTL expression at 1 nM in the table is below 1, or an siRNA thereof having 1 or 2 nucleoside substitutions, additions, or deletions. In some embodiments, the antisense strand sequence comprises or consists of an antisense strand sequence of any one of the siRNAs disclosed in Table 6 where the relative ANGPTL expression at 1 nM in the table is below 1. In some embodiments, the antisense strand sequence comprises or consists of an antisense strand sequence of any one of the siRNAs disclosed in Table 6 where the relative ANGPTL expression at 1 nM of the siRNA in the table is below the expression of the negative control siRNA in the table (e.g. below a relative expression level of 0.66), or an siRNA thereof having 1 or 2 nucleoside substitutions, additions, or deletions. In some embodiments, the antisense strand sequence comprises or consists of an antisense strand sequence of any one of the siRNAs disclosed in Table 6 where the relative ANGPTL expression at 1 nM of the siRNA in the table is below the expression of the negative control siRNA in the table (e.g. below a relative expression level of 0.66). In some embodiments, the antisense strand sequence comprises or consists of an antisense strand sequence of any one of the siRNAs disclosed in Table 6 where the relative ANGPTL expression at 1 nM in the table is below 0.5, or an siRNA thereof having 1 or 2 nucleoside substitutions, additions, or deletions. In some embodiments, the antisense strand sequence comprises or consists of an antisense strand sequence of any one of the siRNAs disclosed in Table 6 where the relative ANGPTL expression at 1 nM in the table is below 0.5 (e.g. an siRNA with the sequence of ETD00245, ETD00247, or ETD00252). In some embodiments, the antisense strand sequence comprises or consists of an antisense strand sequence of any one of the siRNAs disclosed in Table 6 where the relative ANGPTL expression at 10 nM in the table is below 1, or an siRNA thereof having 1 or 2 nucleoside substitutions, additions, or deletions. In some embodiments, the antisense strand sequence comprises or consists of an antisense strand sequence of any one of the siRNAs disclosed in Table 6 where the relative ANGPTL expression at 10 nM in the table is below 1. In some embodiments, the antisense strand sequence comprises or consists of an unmodified version of an antisense strand sequence of any one of the siRNAs disclosed in Table 6. In some embodiments, the antisense strand sequence comprises or consists of an siRNA with the antisense strand sequence of an antisense strand sequence of any one of the siRNAs disclosed in Table 6, but with one or more additional or different modifications, or with a different modification pattern. In some embodiments, the antisense strand sequence lacks the sequence modifications, or has different or additional sequence modifications, but otherwise is similar to a sequence described herein.

[0350] In some embodiments, the antisense strand sequence comprises or consists of an antisense strand sequence of any one of the siRNAs disclosed in Table 7, or an siRNA thereof having 1 or 2 nucleoside substitutions, additions, or deletions. In some embodiments, the antisense strand sequence comprises or consists of an antisense strand sequence of any one of the siRNAs disclosed in Table 7. In some embodiments, the antisense strand sequence comprises or consists of an antisense strand sequence of any one of the siRNAs disclosed in Table 8, or an siRNA thereof having 1 or 2 nucleoside substitutions, additions, or deletions. In some embodiments, the antisense strand sequence comprises or consists of an antisense strand sequence of any one of the siRNAs disclosed in Table 8. In some embodiments, the antisense strand sequence comprises or consists of an antisense strand sequence of any one of the siRNAs disclosed in Table 9, or an siRNA thereof having 1 or 2 nucleoside substitutions, additions, or deletions. In some embodiments, the antisense strand sequence comprises or consists of an antisense strand sequence of any one of the siRNAs disclosed in Table 9. In some embodiments, the antisense strand sequence lacks the sequence modifications, or has different or additional sequence modifications, but otherwise is similar to a sequence described herein.

[0351] In some embodiments, the antisense strand sequence comprises or consists of an antisense strand sequence of any one of the siRNAs disclosed in Table 10, or an siRNA thereof having 1 or 2 nucleoside substitutions, additions, or deletions. In some embodiments, the antisense strand sequence comprises or consists of an antisense strand sequence of any one of the siRNAs disclosed in Table 10. In some embodiments, the antisense strand sequence comprises or consists of an antisense strand sequence of any one of the siRNAs disclosed in Table 10 where the percent of the siRNA remaining at 4 hours in the table is at least 50%, or an siRNA thereof having 1 or 2 nucleoside substitutions, additions, or deletions. In some embodiments, the antisense strand sequence comprises or consists of an antisense strand sequence of any one of the siRNAs disclosed in Table 10 where the percent of the siRNA remaining at 4 hours in the table is at least 50%. In some embodiments, the antisense strand sequence comprises or consists of an antisense strand sequence of any one of the siRNAs disclosed in Table 10 where the percent of the siRNA remaining at 4 hours in the table is at least 75%, or an siRNA thereof having 1 or 2 nucleoside substitutions, additions, or deletions. In some embodiments, the antisense strand sequence comprises or consists of an antisense strand sequence of any one of the siRNAs disclosed in Table 10 where the percent of the siRNA remaining at 4 hours in the table is at least 75%. In some embodiments, the antisense strand sequence comprises or consists of an antisense strand sequence of any one of the siRNAs disclosed in Table 10 where the percent of the siRNA remaining at 24 hours in the table is at least 50%, or an siRNA thereof having 1 or 2 nucleoside substitutions, additions, or deletions. In some embodiments, the antisense strand sequence comprises or consists of an antisense strand sequence of any one of the siRNAs disclosed in Table 10 where the percent of the siRNA remaining at 24 hours in the table is at least 50%. In some embodiments, the antisense strand sequence comprises or consists of an antisense strand sequence of any one of the siRNAs disclosed in Table 10 where the percent of the siRNA remaining at 24 hours in the table is at least 75%, or an siRNA thereof having 1 or 2 nucleoside substitutions, additions, or deletions. In some embodiments, the antisense strand sequence comprises or consists of an antisense strand sequence of any one of the siRNAs disclosed in Table 10 where the percent of the siRNA remaining at 24 hours in the table is at least 75%. In some embodiments, the antisense strand sequence comprises or consists of an unmodified version of an antisense strand sequence of any one of the siRNAs disclosed in Table 10. In some embodiments, the antisense strand sequence comprises or consists of an siRNA with the antisense strand sequence of an antisense strand sequence of any one of the siRNAs disclosed in Table 10, but with one or more additional or different modifications, or with a different modification pattern. In some embodiments, the antisense strand sequence lacks the sequence modifications, or has different or additional sequence modifications, but otherwise is similar to a sequence described herein.

[0352] In some embodiments, the antisense strand sequence comprises or consists of an antisense strand sequence of any one of the siRNAs disclosed in Table 11, or an siRNA thereof having 1 or 2 nucleoside substitutions, additions, or deletions. In some embodiments, the antisense strand sequence comprises or consists of an antisense strand sequence of any one of the siRNAs disclosed in Table 11. In some embodiments, the antisense strand sequence comprises or consists of an antisense strand sequence of any one of the siRNAs disclosed in Table 12, or an siRNA thereof having 1 or 2 nucleoside substitutions, additions, or deletions. In some embodiments, the antisense strand sequence comprises or consists of an antisense strand sequence of any one of the siRNAs disclosed in Table 12. In some embodiments, the antisense strand sequence lacks the sequence modifications, or has different or additional sequence modifications, but otherwise is similar to a sequence described herein.

[0353] In some embodiments, the sense or antisense strand sequence comprises or consists of a sense or antisense strand sequence of a sense or antisense strand sequence of any one of the siRNAs disclosed in Table 27, or an siRNA thereof having 1 or 2 nucleoside substitutions, additions, or deletions. In some embodiments, the sense or antisense strand sequence comprises or consists of a sense or antisense strand sequence of a sense or antisense strand sequence of any one of the siRNAs disclosed in Table 27. In some embodiments, the sense or antisense strand sequence comprises or consists of a sequence at least 75% identical, at least 80% identical, at least 85% identical, at least 90% identical, or at least 95% identical to a sense or antisense strand sequence of an siRNA in Table 27. The sense or antisense strand may exclude the nucleoside or internucleoside linkage modifications, or may include different modifications than the sense or antisense strand sequence of the siRNA in Table 27. The sense or antisense strand may exclude a 3′ overhang (e.g. a UU overhang) of the sense or antisense strand sequence of the siRNA in Table 27.

[0354] In some embodiments, the sense or antisense strand sequence comprises or consists of a sense or antisense strand sequence of a sense or antisense strand sequence of any one of the siRNAs disclosed in Table 28, or an siRNA thereof having 1 or 2 nucleoside substitutions, additions, or deletions. In some embodiments, the sense or antisense strand sequence comprises or consists of a sense or antisense strand sequence of a sense or antisense strand sequence of any one of the siRNAs disclosed in Table 28. In some embodiments, the sense or antisense strand sequence comprises or consists of a sequence at least 75% identical, at least 80% identical, at least 85% identical, at least 90% identical, or at least 95% identical to a sense or antisense strand sequence of an siRNA in Table 28. The sense or antisense strand may exclude the nucleoside or internucleoside linkage modifications, or may include different modifications than the sense or antisense strand sequence of the siRNA in Table 28. The sense or antisense strand may exclude a 3′ overhang (e.g. a UU overhang) of the sense or antisense strand sequence of the siRNA in Table 28.

[0355] In some embodiments, the sense or antisense strand sequence comprises or consists of a sense or antisense strand sequence of a sense or antisense strand sequence of any one of the siRNAs disclosed in Table 29, or an siRNA thereof having 1 or 2 nucleoside substitutions, additions, or deletions. In some embodiments, the sense or antisense strand sequence comprises or consists of a sense or antisense strand sequence of a sense or antisense strand sequence of any one of the siRNAs disclosed in Table 29. In some embodiments, the sense or antisense strand sequence comprises or consists of a sequence at least 75% identical, at least 80% identical, at least 85% identical, at least 90% identical, or at least 95% identical to a sense or antisense strand sequence of an siRNA in Table 29. The sense or antisense strand may exclude the nucleoside or internucleoside linkage modifications, or may include different modifications than the sense or antisense strand sequence of the siRNA in Table 29. The sense or antisense strand may exclude a 3′ overhang (e.g. a UU overhang) of the sense or antisense strand sequence of the siRNA in Table 29.

[0356] In some embodiments, the antisense strand sequence comprises or consists of the sequence of the antisense strand of siRNA ETD00269, or an siRNA thereof having 1 or 2 nucleoside substitutions, additions, or deletions. In some embodiments, the antisense strand sequence comprises or consists of the sequence of the antisense strand of siRNA ETD00269. In some embodiments, the antisense strand sequence comprises or consists of the sequence of the antisense strand of siRNA ETD00270, or an siRNA thereof having 1 or 2 nucleoside substitutions, additions, or deletions. In some embodiments, the antisense strand sequence comprises or consists of the sequence of the antisense strand of siRNA ETD00270. In some embodiments, the antisense strand sequence comprises or consists of the sequence of the antisense strand of siRNA ETD00353, or an siRNA thereof having 1 or 2 nucleoside substitutions, additions, or deletions. In some embodiments, the antisense strand sequence comprises or consists of the sequence of the antisense strand of siRNA ETD00353. In some embodiments, the antisense strand sequence comprises or consists of the sequence of the antisense strand of siRNA ETD00356, or an siRNA thereof having 1 or 2 nucleoside substitutions, additions, or deletions. In some embodiments, the antisense strand sequence comprises or consists of the sequence of the antisense strand of siRNA ETD00356. In some embodiments, the antisense strand sequence comprises or consists of the sequence of the antisense strand of siRNA ETD00358, or an siRNA thereof having 1 or 2 nucleoside substitutions, additions, or deletions. In some embodiments, the antisense strand sequence comprises or consists of the sequence of the antisense strand of siRNA ETD00358. In some embodiments, the antisense strand sequence comprises or consists of the sequence of the antisense strand of siRNA ETD00370, or an siRNA thereof having 1 or 2 nucleoside substitutions, additions, or deletions. In some embodiments, the antisense strand sequence comprises or consists of the sequence of the antisense strand of siRNA ETD00370. In some embodiments, the antisense strand sequence comprises or consists of the sequence of the antisense strand of siRNA ETD00377, or an siRNA thereof having 1 or 2 nucleoside substitutions, additions, or deletions. In some embodiments, the antisense strand sequence comprises or consists of the sequence of the antisense strand of siRNA ETD00377. In some embodiments, the antisense strand sequence comprises or consists of the sequence of the antisense strand of siRNA ETD00378, or an siRNA thereof having 1 or 2 nucleoside substitutions, additions, or deletions. In some embodiments, the antisense strand sequence comprises or consists of the sequence of the antisense strand of siRNA ETD00378. In some embodiments, the antisense strand sequence comprises or consists of the sequence of the antisense strand of siRNA ETD00382, or an siRNA thereof having 1 or 2 nucleoside substitutions, additions, or deletions. In some embodiments, the antisense strand sequence comprises or consists of the sequence of the antisense strand of siRNA ETD00382. In some embodiments, the antisense strand sequence comprises or consists of the sequence of the antisense strand of siRNA ETD00752, or an siRNA thereof having 1 or 2 nucleoside substitutions, additions, or deletions. In some embodiments, the antisense strand sequence comprises or consists of the sequence of the antisense strand of siRNA ETD00752. In some embodiments, the antisense strand sequence comprises or consists of the sequence of SEQ ID NO: 11379, or an siRNA thereof having 1 or 2 nucleoside substitutions, additions, or deletions. In some embodiments, the antisense strand sequence comprises or consists of the sequence of SEQ ID NO: 11379. In some embodiments, the antisense strand sequence lacks the sequence modifications, or has different or additional sequence modifications, but otherwise is similar to a sequence described herein.

[0357] In some embodiments, the antisense strand sequence comprises or consists of the sequence of the antisense strand of siRNA ETD00752, or an siRNA thereof having 1 or 2 nucleoside substitutions, additions, or deletions. In some embodiments, the antisense strand sequence comprises or consists of the sequence of the antisense strand of siRNA ETD00752. In some embodiments, the antisense strand sequence comprises or consists of the sequence of the antisense strand of siRNA ETD01040, or an siRNA thereof having 1 or 2 nucleoside substitutions, additions, or deletions. In some embodiments, the antisense strand sequence comprises or consists of the sequence of the antisense strand of siRNA ETD01040. In some embodiments, the antisense strand sequence comprises or consists of the sequence of the antisense strand of siRNA ETD01043, or an siRNA thereof having 1 or 2 nucleoside substitutions, additions, or deletions. In some embodiments, the antisense strand sequence comprises or consists of the sequence of the antisense strand of siRNA ETD01043. In some embodiments, the antisense strand sequence comprises or consists of the sequence of SEQ ID NO: 11306, or an siRNA thereof having 1 or 2 nucleoside substitutions, additions, or deletions. In some embodiments, the antisense strand sequence comprises or consists of the sequence of SEQ ID NO: 11306. In some embodiments, the antisense strand sequence comprises or consists of the sequence of SEQ ID NO: 11446, or an siRNA thereof having 1 or 2 nucleoside substitutions, additions, or deletions. In some embodiments, the antisense strand sequence comprises or consists of the sequence of SEQ ID NO: 11446. In some embodiments, the antisense strand sequence comprises or consists of the sequence of SEQ ID NO: 11449, or an siRNA thereof having 1 or 2 nucleoside substitutions, additions, or deletions. In some embodiments, the antisense strand sequence comprises or consists of the sequence of SEQ ID NO: 11449. In some embodiments, the antisense strand sequence comprises or consists of the sequence of SEQ ID NO: 11504, or an siRNA thereof having 1 or 2 nucleoside substitutions, additions, or deletions. In some embodiments, the antisense strand sequence comprises or consists of the sequence of SEQ ID NO: 11504. In some embodiments, the antisense strand sequence comprises or consists of the sequence of SEQ ID NO: 11505, or an siRNA thereof having 1 or 2 nucleoside substitutions, additions, or deletions. In some embodiments, the antisense strand sequence comprises or consists of the sequence of SEQ ID NO: 11505. In some embodiments, the antisense strand sequence comprises or consists of the sequence of SEQ ID NO: 11506, or an siRNA thereof having 1 or 2 nucleoside substitutions, additions, or deletions. In some embodiments, the antisense strand sequence comprises or consists of the sequence of SEQ ID NO: 11506. In some embodiments, the antisense strand sequence comprises or consists of the sequence of SEQ ID NO: 11507, or an siRNA thereof having 1 or 2 nucleoside substitutions, additions, or deletions. In some embodiments, the antisense strand sequence comprises or consists of the sequence of SEQ ID NO: 11507. In some embodiments, the antisense strand sequence lacks the sequence modifications, or has different or additional sequence modifications, but otherwise is similar to a sequence described herein.

[0358] In some embodiments, the siRNA a sense strand comprising the sequence of SEQ ID NO: 11500, or a nucleic acid sequence thereof having 3 or 4 nucleoside substitutions, additions, or deletions. In some embodiments, the siRNA a sense strand comprising the sequence of SEQ ID NO: 11500, or a nucleic acid sequence thereof having 1 or 2 nucleoside substitutions, additions, or deletions. In some embodiments, the siRNA a sense strand comprising the sequence of SEQ ID NO: 11500. In some embodiments, the sense strand comprises one or more internucleoside linkage or nucleoside modifications.

[0359] In some embodiments, the siRNA a sense strand comprising the sequence of SEQ ID NO: 11545, or a nucleic acid sequence thereof having 3 or 4 nucleoside substitutions, additions, or deletions. In some embodiments, the siRNA a sense strand comprising the sequence of SEQ ID NO: 11545, or a nucleic acid sequence thereof having 1 or 2 nucleoside substitutions, additions, or deletions. In some embodiments, the siRNA a sense strand comprising the sequence of SEQ ID NO: 11545. In some embodiments, the sense strand comprises one or more internucleoside linkage or nucleoside modifications.

[0360] In some embodiments, the siRNA a sense strand comprising the sequence of SEQ ID NO: 11546, or a nucleic acid sequence thereof having 3 or 4 nucleoside substitutions, additions, or deletions. In some embodiments, the siRNA a sense strand comprising the sequence of SEQ ID NO: 11546, or a nucleic acid sequence thereof having 1 or 2 nucleoside substitutions, additions, or deletions. In some embodiments, the siRNA a sense strand comprising the sequence of SEQ ID NO: 11546. In some embodiments, the sense strand comprises one or more internucleoside linkage or nucleoside modifications.

[0361] In some embodiments, the siRNA a sense strand comprising the sequence of SEQ ID NO: 11549-1595, or a nucleic acid sequence thereof having 3 or 4 nucleoside substitutions, additions, or deletions. In some embodiments, the siRNA a sense strand comprising the sequence of SEQ ID NO: 11549-1595, or a nucleic acid sequence thereof having 1 or 2 nucleoside substitutions, additions, or deletions. In some embodiments, the siRNA a sense strand comprising the sequence of SEQ ID NO: 11549-1595. In some embodiments, the sense strand comprises one or more internucleoside linkage or nucleoside modifications.

[0362] In some embodiments, the siRNA a sense strand comprising the sequence of SEQ ID NO: 11186, or a nucleic acid sequence thereof having 3 or 4 nucleoside substitutions, additions, or deletions. In some embodiments, the siRNA a sense strand comprising the sequence of SEQ ID NO: 11186, or a nucleic acid sequence thereof having 1 or 2 nucleoside substitutions, additions, or deletions. In some embodiments, the siRNA a sense strand comprising the sequence of SEQ ID NO: 11186. In some embodiments, the sense strand comprises one or more internucleoside linkage or nucleoside modifications.

[0363] In some embodiments, the siRNA a sense strand comprising the sequence of SEQ ID NO: 11205, or a nucleic acid sequence thereof having 3 or 4 nucleoside substitutions, additions, or deletions. In some embodiments, the siRNA a sense strand comprising the sequence of SEQ ID NO: 11205, or a nucleic acid sequence thereof having 1 or 2 nucleoside substitutions, additions, or deletions. In some embodiments, the siRNA a sense strand comprising the sequence of SEQ ID NO: 11205. In some embodiments, the sense strand comprises one or more internucleoside linkage or nucleoside modifications.

[0364] In some embodiments, the siRNA a sense strand comprising the sequence of SEQ ID NO: 11207, or a nucleic acid sequence thereof having 3 or 4 nucleoside substitutions, additions, or deletions. In some embodiments, the siRNA a sense strand comprising the sequence of SEQ ID NO: 11207, or a nucleic acid sequence thereof having 1 or 2 nucleoside substitutions, additions, or deletions. In some embodiments, the siRNA a sense strand comprising the sequence of SEQ ID NO: 11207. In some embodiments, the sense strand comprises one or more internucleoside linkage or nucleoside modifications.

[0365] In some embodiments, the siRNA an antisense strand comprising the sequence of SEQ ID NO: 11306, or a nucleic acid sequence thereof having 3 or 4 nucleoside substitutions, additions, or deletions. In some embodiments, the siRNA an antisense strand comprising the sequence of SEQ ID NO: 11306, or a nucleic acid sequence thereof having 1 or 2 nucleoside substitutions, additions, or deletions. In some embodiments, the siRNA an antisense strand comprising the sequence of SEQ ID NO: 11306. In some embodiments, the antisense strand comprises one or more internucleoside linkage or nucleoside modifications.

[0366] In some embodiments, the siRNA an antisense strand comprising the sequence of SEQ ID NO: 11547, or a nucleic acid sequence thereof having 3 or 4 nucleoside substitutions, additions, or deletions. In some embodiments, the siRNA an antisense strand comprising the sequence of SEQ ID NO: 11547, or a nucleic acid sequence thereof having 1 or 2 nucleoside substitutions, additions, or deletions. In some embodiments, the siRNA an antisense strand comprising the sequence of SEQ ID NO: 11547. In some embodiments, the antisense strand comprises one or more internucleoside linkage or nucleoside modifications.

[0367] In some embodiments, the siRNA an antisense strand comprising the sequence of SEQ ID NO: 11548, or a nucleic acid sequence thereof having 3 or 4 nucleoside substitutions, additions, or deletions. In some embodiments, the siRNA an antisense strand comprising the sequence of SEQ ID NO: 11548, or a nucleic acid sequence thereof having 1 or 2 nucleoside substitutions, additions, or deletions. In some embodiments, the siRNA an antisense strand comprising the sequence of SEQ ID NO: 11548. In some embodiments, the antisense strand comprises one or more internucleoside linkage or nucleoside modifications.

[0368] In some embodiments, the siRNA an antisense strand comprising the sequence of SEQ ID NO: 11596-11642, or a nucleic acid sequence thereof having 3 or 4 nucleoside substitutions, additions, or deletions. In some embodiments, the siRNA an antisense strand comprising the sequence of SEQ ID NO: 11596-11642, or a nucleic acid sequence thereof having 1 or 2 nucleoside substitutions, additions, or deletions. In some embodiments, the siRNA an antisense strand comprising the sequence of SEQ ID NO: 11596-11642. In some embodiments, the antisense strand comprises one or more internucleoside linkage or nucleoside modifications.

[0369] In some embodiments, the siRNA an antisense strand comprising the sequence of SEQ ID NO: 11424, or a nucleic acid sequence thereof having 3 or 4 nucleoside substitutions, additions, or deletions. In some embodiments, the siRNA an antisense strand comprising the sequence of SEQ ID NO: 11424, or a nucleic acid sequence thereof having 1 or 2 nucleoside substitutions, additions, or deletions. In some embodiments, the siRNA an antisense strand comprising the sequence of SEQ ID NO: 11424. In some embodiments, the antisense strand comprises one or more internucleoside linkage or nucleoside modifications.

[0370] In some embodiments, the siRNA an antisense strand comprising the sequence of SEQ ID NO: 11325, or a nucleic acid sequence thereof having 3 or 4 nucleoside substitutions, additions, or deletions. In some embodiments, the siRNA an antisense strand comprising the sequence of SEQ ID NO: 11325, or a nucleic acid sequence thereof having 1 or 2 nucleoside substitutions, additions, or deletions. In some embodiments, the siRNA an antisense strand comprising the sequence of SEQ ID NO: 11325. In some embodiments, the antisense strand comprises one or more internucleoside linkage or nucleoside modifications.

[0371] In some embodiments, the siRNA an antisense strand comprising the sequence of SEQ ID NO: 11327, or a nucleic acid sequence thereof having 3 or 4 nucleoside substitutions, additions, or deletions. In some embodiments, the siRNA an antisense strand comprising the sequence of SEQ ID NO: 11327, or a nucleic acid sequence thereof having 1 or 2 nucleoside substitutions, additions, or deletions. In some embodiments, the siRNA an antisense strand comprising the sequence of SEQ ID NO: 11327. In some embodiments, the antisense strand comprises one or more internucleoside linkage or nucleoside modifications.

[0372] In some embodiments, the siRNA comprises a sense strand having a sequence in accordance with any of SEQ ID NOs: 11583 or 11593-11595. In some embodiments, the sense strand sequence comprises or consists of a sequence at least 75% identical to any one of SEQ ID NOs: 11583 or 11593-11595, at least 80% identical to any one of SEQ ID NOs: 11583 or 11593-11595, at least 85% identical to of any one of SEQ ID NOs: 11583 or 11593-11595, at least 90% identical to any one of SEQ ID NOs: 11583 or 11593-11595, or at least 95% identical to any one of SEQ ID NOs: 11583 or 11593-11595. In some embodiments, the sense strand sequence comprises or consists of the sequence of any one of SEQ ID NOs: 11583 or 11593-11595, or a sense strand sequence thereof having 1, 2, 3, or 4 nucleoside substitutions, additions, or deletions. In some embodiments, the sense strand sequence comprises or consists of the sequence of any one of SEQ ID NOs: 11583 or 11593-11595, or a sense strand sequence thereof having 1 or 2 nucleoside substitutions, additions, or deletions. In some embodiments, the sense strand sequence comprises or consists of a sequence 100% identical to SEQ ID NOs: 11583 or 11593-11595. The sense strand may comprise different modifications than SEQ ID NOs: 11583 or 11593-11595. The sense strand may comprise a lipid moiety such as a 5′ carbocycle-linked lipid. In some embodiments, the siRNA comprises an antisense strand having a sequence in accordance with any of SEQ ID NOs: 11630 or 11640-11642. In some embodiments, the antisense strand sequence comprises or consists of a sequence at least 75% identical to any one of SEQ ID NOs: 11630 or 11640-11642, at least 80% identical to any one of SEQ ID NOs: 11630 or 11640-11642, at least 85% identical to of any one of SEQ ID NOs: 11630 or 11640-11642, at least 90% identical to any one of SEQ ID NOs: 11630 or 11640-11642, or at least 95% identical to any one of SEQ ID NOs: 11630 or 11640-11642. In some embodiments, the antisense strand sequence comprises or consists of the sequence of any one of SEQ ID NOs: 11630 or 11640-11642, or an antisense strand sequence thereof having 1, 2, 3, or 4 nucleoside substitutions, additions, or deletions. In some embodiments, the antisense strand sequence comprises or consists of the sequence of any one of SEQ ID NOs: 11630 or 11640-11642, or an antisense strand sequence thereof having 1 or 2 nucleoside substitutions, additions, or deletions. In some embodiments, the antisense strand sequence comprises or consists of a sequence 100% identical to SEQ ID NOs: 11630 or 11640-11642. The antisense strand may comprise different modifications than in SEQ ID NOs: 11630 or 11640-11642. The antisense strand may comprise a 5′ vinyl phosphonate.

[0373] In some embodiments, the siRNA comprises a sense strand having a sequence in accordance with any of SEQ ID NO: 11583. In some embodiments, the sense strand sequence comprises or consists of a sequence at least 75% identical to SEQ ID NO: 11583, at least 80% identical to SEQ ID NO: 11583, at least 85% identical to of SEQ ID NO: 11583, at least 90% identical to SEQ ID NO: 11583, or at least 95% identical to SEQ ID NO: 11583. In some embodiments, the sense strand sequence comprises or consists of the sequence of SEQ ID NO: 11583, or a sense strand sequence thereof having 1, 2, 3, or 4 nucleoside substitutions, additions, or deletions. In some embodiments, the sense strand sequence comprises or consists of the sequence of SEQ ID NO: 11583, or a sense strand sequence thereof having 1 or 2 nucleoside substitutions, additions, or deletions. In some embodiments, the sense strand sequence comprises or consists of a sequence 100% identical to SEQ ID NO: 11583. The sense strand may comprise different modifications than SEQ ID NO: 11583. The sense strand may comprise a lipid moiety such as a 5′ carbocycle-linked lipid. In some embodiments, the siRNA comprises an antisense strand having a sequence in accordance with any of SEQ ID NO: 11630. In some embodiments, the antisense strand sequence comprises or consists of a sequence at least 75% identical to SEQ ID NO: 11630, at least 80% identical to SEQ ID NO: 11630, at least 85% identical to of SEQ ID NO: 11630, at least 90% identical to SEQ ID NO: 11630, or at least 95% identical to SEQ ID NO: 11630. In some embodiments, the antisense strand sequence comprises or consists of the sequence of SEQ ID NO: 11630, or an antisense strand sequence thereof having 1, 2, 3, or 4 nucleoside substitutions, additions, or deletions. In some embodiments, the antisense strand sequence comprises or consists of the sequence of SEQ ID NO: 11630, or an antisense strand sequence thereof having 1 or 2 nucleoside substitutions, additions, or deletions. In some embodiments, the antisense strand sequence comprises or consists of a sequence 100% identical to SEQ ID NO: 11630. The antisense strand may comprise different modifications than in SEQ ID NO: 11630. The antisense strand may comprise a 5′ vinyl phosphonate.

[0374] In some embodiments, the siRNA comprises a sense strand having a sequence in accordance with any of SEQ ID NO: 11593. In some embodiments, the sense strand sequence comprises or consists of a sequence at least 75% identical to SEQ ID NO: 11593, at least 80% identical to SEQ ID NO: 11593, at least 85% identical to of SEQ ID NO: 11593, at least 90% identical to SEQ ID NO: 11593, or at least 95% identical to SEQ ID NO: 11593. In some embodiments, the sense strand sequence comprises or consists of the sequence of SEQ ID NO: 11593, or a sense strand sequence thereof having 1, 2, 3, or 4 nucleoside substitutions, additions, or deletions. In some embodiments, the sense strand sequence comprises or consists of the sequence of SEQ ID NO: 11593, or a sense strand sequence thereof having 1 or 2 nucleoside substitutions, additions, or deletions. In some embodiments, the sense strand sequence comprises or consists of a sequence 100% identical to SEQ ID NO: 11593. The sense strand may comprise different modifications than SEQ ID NO: 11593. The sense strand may comprise a lipid moiety such as a 5′ carbocycle-linked lipid. In some embodiments, the siRNA comprises an antisense strand having a sequence in accordance with any of SEQ ID NO: 11640. In some embodiments, the antisense strand sequence comprises or consists of a sequence at least 75% identical to SEQ ID NO: 11640, at least 80% identical to SEQ ID NO: 11640, at least 85% identical to of SEQ ID NO: 11640, at least 90% identical to SEQ ID NO: 11640, or at least 95% identical to SEQ ID NO: 11640. In some embodiments, the antisense strand sequence comprises or consists of the sequence of SEQ ID NO: 11640, or an antisense strand sequence thereof having 1, 2, 3, or 4 nucleoside substitutions, additions, or deletions. In some embodiments, the antisense strand sequence comprises or consists of the sequence of SEQ ID NO: 11640, or an antisense strand sequence thereof having 1 or 2 nucleoside substitutions, additions, or deletions. In some embodiments, the antisense strand sequence comprises or consists of a sequence 100% identical to SEQ ID NO: 11640. The antisense strand may comprise different modifications than in SEQ ID NO: 11640. The antisense strand may comprise a 5′ vinyl phosphonate.

[0375] In some embodiments, the siRNA comprises a sense strand having a sequence in accordance with any of SEQ ID NO: 11594. In some embodiments, the sense strand sequence comprises or consists of a sequence at least 75% identical to SEQ ID NO: 11594, at least 80% identical to SEQ ID NO: 11594, at least 85% identical to of SEQ ID NO: 11594, at least 90% identical to SEQ ID NO: 11594, or at least 95% identical to SEQ ID NO: 11594. In some embodiments, the sense strand sequence comprises or consists of the sequence of SEQ ID NO: 11594, or a sense strand sequence thereof having 1, 2, 3, or 4 nucleoside substitutions, additions, or deletions. In some embodiments, the sense strand sequence comprises or consists of the sequence of SEQ ID NO: 11594, or a sense strand sequence thereof having 1 or 2 nucleoside substitutions, additions, or deletions. In some embodiments, the sense strand sequence comprises or consists of a sequence 100% identical to SEQ ID NO: 11594. The sense strand may comprise different modifications than SEQ ID NO: 11594. The sense strand may comprise a lipid moiety such as a 5′ carbocycle-linked lipid. In some embodiments, the siRNA comprises an antisense strand having a sequence in accordance with any of SEQ ID NO: 11640. In some embodiments, the antisense strand sequence comprises or consists of a sequence at least 75% identical to SEQ ID NO: 11640, at least 80% identical to SEQ ID NO: 11640, at least 85% identical to of SEQ ID NO: 11640, at least 90% identical to SEQ ID NO: 11640, or at least 95% identical to SEQ ID NO: 11640. In some embodiments, the antisense strand sequence comprises or consists of the sequence of SEQ ID NO: 11640, or an antisense strand sequence thereof having 1, 2, 3, or 4 nucleoside substitutions, additions, or deletions. In some embodiments, the antisense strand sequence comprises or consists of the sequence of SEQ ID NO: 11640, or an antisense strand sequence thereof having 1 or 2 nucleoside substitutions, additions, or deletions. In some embodiments, the antisense strand sequence comprises or consists of a sequence 100% identical to SEQ ID NO: 11640. The antisense strand may comprise different modifications than in SEQ ID NO: 11640. The antisense strand may comprise a 5′ vinyl phosphonate.

[0376] In some embodiments, the siRNA comprises a sense strand having a sequence in accordance with any of SEQ ID NO: 11595. In some embodiments, the sense strand sequence comprises or consists of a sequence at least 75% identical to SEQ ID NO: 11595, at least 80% identical to SEQ ID NO: 11595, at least 85% identical to of SEQ ID NO: 11595, at least 90% identical to SEQ ID NO: 11595, or at least 95% identical to SEQ ID NO: 11595. In some embodiments, the sense strand sequence comprises or consists of the sequence of SEQ ID NO: 11595, or a sense strand sequence thereof having 1, 2, 3, or 4 nucleoside substitutions, additions, or deletions. In some embodiments, the sense strand sequence comprises or consists of the sequence of SEQ ID NO: 11595, or a sense strand sequence thereof having 1 or 2 nucleoside substitutions, additions, or deletions. In some embodiments, the sense strand sequence comprises or consists of a sequence 100% identical to SEQ ID NO: 11595. The sense strand may comprise different modifications than SEQ ID NO: 11595. The sense strand may comprise a lipid moiety such as a 5′ carbocycle-linked lipid. In some embodiments, the siRNA comprises an antisense strand having a sequence in accordance with any of SEQ ID NO: 11642. In some embodiments, the antisense strand sequence comprises or consists of a sequence at least 75% identical to SEQ ID NO: 11642, at least 80% identical to SEQ ID NO: 11642, at least 85% identical to of SEQ ID NO: 11642, at least 90% identical to SEQ ID NO: 11642, or at least 95% identical to SEQ ID NO: 11642. In some embodiments, the antisense strand sequence comprises or consists of the sequence of SEQ ID NO: 11642, or an antisense strand sequence thereof having 1, 2, 3, or 4 nucleoside substitutions, additions, or deletions. In some embodiments, the antisense strand sequence comprises or consists of the sequence of SEQ ID NO: 11642, or an antisense strand sequence thereof having 1 or 2 nucleoside substitutions, additions, or deletions. In some embodiments, the antisense strand sequence comprises or consists of a sequence 100% identical to SEQ ID NO: 11642. The antisense strand may comprise different modifications than in SEQ ID NO: 11642. The antisense strand may comprise a 5′ vinyl phosphonate.

[0377] In some embodiments, the siRNA comprises a sense strand having a sequence in accordance with any of SEQ ID NO: 11593. In some embodiments, the sense strand sequence comprises or consists of a sequence at least 75% identical to SEQ ID NO: 11593, at least 80% identical to SEQ ID NO: 11593, at least 85% identical to of SEQ ID NO: 11593, at least 90% identical to SEQ ID NO: 11593, or at least 95% identical to SEQ ID NO: 11593. In some embodiments, the sense strand sequence comprises or consists of the sequence of SEQ ID NO: 11593, or a sense strand sequence thereof having 1, 2, 3, or 4 nucleoside substitutions, additions, or deletions. In some embodiments, the sense strand sequence comprises or consists of the sequence of SEQ ID NO: 11593, or a sense strand sequence thereof having 1 or 2 nucleoside substitutions, additions, or deletions. In some embodiments, the sense strand sequence comprises or consists of a sequence 100% identical to SEQ ID NO: 11593. The sense strand may comprise different modifications than SEQ ID NO: 11593. The sense strand may comprise a lipid moiety such as a 5′ carbocycle-linked lipid. In some embodiments, the antisense strand sequence comprises or consists of a sequence at least 75% identical to 5′-VPusUfsguagAfcuCfaAfgAfuAfaUfususu-3′(SEQ ID NO: 11803), at least 80% identical to SEQ ID NO: 11803, at least 85% identical to SEQ ID NO: 11803, at least 90% identical to SEQ ID NO: 11803, or at least 95% identical to SEQ ID NO: 11803. In some embodiments, the antisense strand sequence comprises or consists of the sequence of SEQ ID NO: 11803, or an antisense strand sequence thereof having 1, 2, 3, or 4 nucleoside substitutions, additions, or deletions. In some embodiments, the antisense strand sequence comprises or consists of the sequence of SEQ ID NO: 11803, or an antisense strand sequence thereof having 1 or 2 nucleoside substitutions, additions, or deletions. In some embodiments, the antisense strand sequence comprises or consists of a sequence 100% identical to SEQ ID NO: 11803. The antisense strand may comprise different modifications than in SEQ ID NO: 11803.

[0378] An siRNA may comprise the base sequence of any modified siRNA sequence described herein, with or without any or all of the modifications. For example, an siRNA sense or antisense strand sequence described herein may include a base sequence in addition to various modifications such as phosphorothioate linkages, 2′-O-methyl, and 2′fluoro modifications at certain positions. The base sequence may be used with or without the sequences, or may be used with any other modification pattern or set of modifications as the modifications and modification patterns described herein. Likewise, a base sequence may be used, but omit 1, 2, or 3 5′ or 3′ bases of the base sequence. For example, a sense strand base sequence of an siRNA may include a 5′ A and 3′ UU. The sense strand base sequence may be included or used in a composition or method described herein with or without the 5′ A and 3′ UU. An antisense strand base sequence of an siRNA may include a 3′ UUU. The antisense strand base sequence may be included or used in a composition or method described herein with or without the 3′ UUU.

### Ligands

[0379] A wide variety of entities can be coupled to the oligonucleotides described herein. In some embodiments, the entities are ligands, which are coupled, e.g., covalently, either directly or indirectly via an intervening tether. In some embodiments, a ligand is coupled to a dsRNA agent.

[0380] In some embodiments, a ligand alters the distribution, targeting or lifetime of the molecule into which it is incorporated. In some embodiments a ligand provides an enhanced affinity for a selected target, e.g., molecule, cell or cell type, compartment, receptor e.g., a cellular or organ compartment, tissue, organ or region of the body, as, e.g., compared to a species absent such a ligand. Ligands providing enhanced affinity for a selected target are also termed targeting ligands. These moieties or conjugates can include conjugate groups covalently bound to functional groups such as primary or secondary hydroxyl groups. Conjugate groups include intercalators, reporter molecules, polyamines, polyamides, polyethylene glycols, polyethers, groups that enhance the pharmacodynamic properties of oligomers, and groups that enhance the pharmacokinetic properties of oligomers. Typical conjugate groups include cholesterols, lipids, phospholipids, biotin, phenazine, folate, phenanthridine, anthraquinone, acridine, fluoresceins, rh«Jamines, coumarins, and dyes. Groups that enhance the pharmacodynamic properties include groups that improve uptake, enhance resistance to degradation, and or strengthen sequence-specific hybridization with the target nucleic acid. Groups that enhance the pharmacokinetic properties include groups that improve uptake, distribution, metabolism or excretion of the compounds herein. Conjugate moieties include, but are not limited to, lipid moieties such as a cholesterol moiety, cholic acid, a thioether, e.g., hexyl-5-tritylthiol, a thiocholesterol, an aliphatic chain, e.g., dodecandiol or undecyl residues, a phospholipid, e.g., di-hexadecyl-rac-glycerol or triethylammonium 1,2-di-O-hexadecyl-rac-glycero-3-Hphosphonate, a polyamine or a polyethylene glycol chain, or Adamantane acetic acid, a palmityl moiety, or an octadecylamine or hexylamino-carbonyl-oxycholesterol moiety. Oligonucleotides may also be conjugated to active drug substances, for example, aspirin, warfarin, phenylbutazone, ibuprofen, suprofen, fenbufen, ketoprofen, (S)-(+)-pranoprofen, carprofen, dansylsarcosine, 2,3,5-triiodobenzoic acid, flufenamic acid, folinic acid, a benzolhiadiazide, chlorothiazide, a diazepine, indomethicin, a barbiturate, a cephalosporin, a sulfa drug, an antidiabetic, an antibacterial or an antibiotic.

[0381] Some ligands can have endosomolytic properties. The endosomolytic ligands promote the lysis of the endosome and/or transport of the composition, or its components, from the endosome to the cytoplasm of the cell. The endosomolytic ligand may be a polyanionic peptide or peptidomimetic which shows pH-dependent membrane activity and fusogenicity. In some embodiments, the endosomolytic ligand assumes its active conformation at endosomal pH. The “active” conformation is that conformation in which the endosomolytic ligand promotes lysis of the endosome and/or transport of the composition, or its components, from the endosome to the cytoplasm of the cell. Exemplary endosomolytic ligands include the GALA peptide, the EALA peptide, and their derivatives. In some embodiments, the endosomolytic component may contain a chemical group (e.g., an amino acid) which will undergo a change in charge or protonation in response to a change in pH. The endosomolytic component may be linear or branched. Ligands can improve transport, hybridization, and specificity properties and may also improve nuclease resistance of the resultant natural or modified oligoribonucleotide, or a polymeric molecule comprising any combination of monomers described herein and/or natural or modified ribonucleotides.

[0382] Ligands in general can include therapeutic modifiers, e.g., for enhancing uptake; diagnostic compounds or reporter groups e.g., for monitoring distribution; cross-linking agents; and nuclease-resistance conferring moieties. General examples include lipids, steroids, vitamins, sugars, proteins, peptides, polyamines, and peptide mimics.

[0383] Ligands can include a naturally occurring substance, such as a protein (e.g., human serum albumin (HSA), low-density lipoprotein (LDL), high-density lipoprotein (HDL), or globulin); a carbohydrate (e.g., a dextran, pullulan, chitin, chitosan, inulin, cyclodextrin or hyaluronic acid); or a lipid. The ligand may also be a recombinant or synthetic molecule, such as a synthetic polymer, e.g., a synthetic polyamino acid, an oligonucleotide (e.g. an aptamer). Examples of polyamino acids include polyamino acid is a polylysine (PLL), poly L-aspartic acid, poly L-glutamic acid, styrene-maleic acid anhydride copolymer, poly(L-lactide-co-glycolied) copolymer, divinyl ether-maleic anhydride copolymer, N-(2-hydroxypropyl)methacrylamide copolymer (HMPA), polyethylene glycol (PEG), polyvinyl alcohol (PVA), polyurethane, poly(2-ethylacryllic acid), N-isopropylacrylamide polymers, or polyphosphazine. Example of polyamines include: polyethylenimine, polylysine (PLL), spermine, spermidine, polyamine, pseudopeptide-polyamine, peptidomimetic polyamine, dendrimer polyamine, arginine, amidine, protamine, cationic lipid, cationic porphyrin, quaternary salt of a polyamine, or an alpha helical peptide.

[0384] Ligands can also include targeting groups, e.g., a cell or tissue targeting agent, e.g., a lectin, glycoprotein, lipid or protein, e.g., an antibody, that binds to a specified cell type such as a kidney cell. A targeting group can be a thyrotropin, melanotropin, lectin, glycoprotein, surfactant protein A, Mucin carbohydrate, multivalent lactose, multivalent galactose, N-acetyl-galactosamine, N-acetyl-gulucosamine multivalent mannose, multivalent fucose, glycosylated polyaminoacids, multivalent galactose, transferrin, bisphosphonate, polyglutamate, polyaspartate, a lipid, cholesterol, a steroid, bile acid, folate, vitamin B12, biotin, an arginine-glycine-aspartic acid (RGD) peptide, an RGD peptide mimetic or an aptamer.

[0385] Additional examples of ligands include dyes, intercalating agents (e.g. acridines), cross-linkers (e.g. psoralene, mitomycin C), porphyrins (TPPC4, texaphyrin, Sapphyrin), polycyclic aromatic hydrocarbons (e.g., phenazine, dihydrophenazine), artificial endonucleases or a chelator (e.g. EDTA), lipophilic molecules (e.g., cholesterol, cholic acid, adamantane acetic acid, 1-pyrene butyric acid, dihydrotestosterone, 1,3-Bis-O-(hexadecyl)glycerol, geranyloxyhexyl group, hexadecylglycerol, borneol, menthol, 1,3-propanediol, heptadecyl group, palmitic acid, myristic acid, 03-(oleoyl)lithocholic acid, 03-(oleoyl)cholenic acid, dimethoxytrityl, or phenoxazine), and peptide conjugates (e.g., antennapedia peptide, Tat peptide), alkylating agents, phosphate, amino, mercapto, PEG (e.g., PEG-40K), MPEG, [MPEG]2, polyamino, alkyl, substituted alkyl, radiolabeled markers, enzymes, haptens (e.g. biotin), transport/absorption facilitators (e.g., aspirin, vitamin E, folic acid), synthetic ribonucleases (e.g., imidazole, bisimidazole, histamine, imidazole clusters, acridine-imidazole conjugates, Eu3+ complexes of tetraazamacrocycles), dinitrophenyl, HRP, or AP.

[0386] Ligands can be proteins, e.g., glycoproteins, or peptides, e.g., molecules having a specific affinity for a co-ligand, or antibodies e.g., an antibody, that binds to a specified cell type such as a cancer cell, endothelial cell, or bone cell. Ligands may also include hormones and hormone receptors. They can also include non-peptidic species, such as lipids, lectins, carbohydrates, vitamins, cofactors, multivalent lactose, multivalent galactose, N-acetyl-galactosamine, N-acetyl-gulucosamine multivalent mannose, multivalent fucose, or aptamers. The ligand can be, for example, a lipopolysaccharide, an activator of p38 MAP kinase, or an activator of NF-KB.

[0387] The ligand can be a substance, e.g., a drug, which can increase the uptake of the siRNA agent into the cell, for example, by disrupting the cell's cytoskeleton, e.g., by disrupting the cell's microtubules, microfilaments, and/or intermediate filaments. The drug can be, for example, taxon, vincristine, vinblastine, cytochalasin, nocodazole, japlakinolide, latrunculin A, phalloidin, swinholide A, indanocine, or myoservin.

[0388] The ligand can increase the uptake of the oligonucleotide into the cell by activating an inflammatory response, for example. Exemplary ligands that would have such an effect include tumor necrosis factor alpha (TNF alpha), interleukin-1 beta, or gamma interferon.

[0389] In another aspect, the ligand is a moiety, e.g., a vitamin, which is taken up by a target cell, e.g., a proliferating cell. These are particularly useful for treating disorders characterized by unwanted cell proliferation, e.g., of the malignant or non-malignant type, e.g., cancer cells. Exemplary vitamins include vitamin A, E, and K. Other exemplary vitamins include B vitamins, e.g., folic acid, B12, riboflavin, biotin, pyridoxal or other vitamins or nutrients taken up by cancer cells. Also included are HAS, low density lipoprotein (LDL) and high-density lipoprotein (HDL). In another aspect, the ligand is a cell-permeation agent, e.g., a helical cell-permeation agent. In some cases, the agent is amphipathic. An exemplary agent is a peptide such as tat or antennopedia. If the agent is a peptide, it can be modified, including a peptidylmimetic, invertomers, non-peptide or pseudo-peptide linkages, and use of D-amino acids. The helical agent is may be an alpha-helical agent, which may have a lipophilic and a lipophobic phase.

[0390] The ligand can be a peptide or peptidomimetic. A peptidomimetic (also referred to herein as an oligopeptidomimetic) is a molecule capable of folding into a defined three-dimensional structure similar to a natural peptide. The peptide or peptidomimetic moiety can be about 3-50 amino acids long, e.g., about 3, 5, 10, 15, 20, 25, 30, 35, 40, 45, or 50 amino acids long. A peptide or peptidomimetic can be, for example, a cell permeation peptide, cationic peptide, amphipathic peptide, or hydrophobic peptide (e.g., consisting primarily of Tyr, Trp or Phe). The peptide moiety can be a dendrimer peptide, constrained peptide or crosslinked peptide. In some cases, the peptide moiety can include a hydrophobic membrane translocation sequence (MTS). An exemplary hydrophobic MTS-containing peptide is RFGF derived from human fibroblast growth factor 4 and having the amino acid sequence AAVALLPAVLLALLAP (SEQ ID NO: 11390), an RFGF analogue (e.g., amino acid sequence AALLPVLLAAP (SEQ ID NO: 11391) containing a hydrophobic MTS can also be a targeting moiety. The peptide moiety can be a “delivery” peptide, which can carry large polar molecules including peptides, oligonucleotides, and protein across cell membranes. For example, sequences from the HIV Tat protein (GRKKRRQRRRPPQ, SEQ ID NO: 11392) and the Drosophila Antennapedia protein (RQIKIWFQNRRMKWK, SEQ ID NO: 11393) are capable of functioning as delivery peptides. A peptide or peptidomimetic can be encoded by a random sequence of DNA, such as a peptide identified from a phage-display library, or one-bead-one-compound (OBOC) combinatorial library. In some cases, the peptide or peptidomimetic tethered to an siRNA agent via an incorporated monomer unit is a cell targeting peptide such as an arginine-glycine-aspartic acid (RGD)-peptide, or RGD mimic. A peptide moiety can range in length from about 3 amino acids to about 40 amino acids. The peptide moieties can have a structural modification, such as to increase stability or direct conformational properties. Any of the structural modifications described below can be utilized. An RGD peptide moiety can be used to target a tumor cell, such as an endothelial tumor cell or a breast cancer tumor cell. An RGD peptide can facilitate targeting of an siRNA agent to tumors of a variety of other tissues, including the lung, kidney, spleen, or liver. In some cases, the RGD peptide will facilitate targeting of an siRNA agent to the kidney. The RGD peptide may also be used to facilitate targeting of an siRNA agent to different cell types in the eye. RGD-binding integrins, such as the avb3 integrin pair, are expressed in trabecular meshwork, sclera, and ciliary body of the mouse anterior segment. The RGD peptide can be linear or cyclic, and can be modified, e.g., glycosylated or methylated to facilitate targeting to specific tissues. For example, a glycosylated RGD peptide can deliver an siRNA agent to a tumor cell expressing yB3. Peptides that target markers enriched in proliferating cells can be used. For example, RGD containing peptides and peptidomimetics can target cancer cells, in particular cells that exhibit an integrin. Thus, one could use RGD peptides, cyclic peptides containing RGD, RGD peptides that include D-amino acids, as well as synthetic RGD mimics. In addition to RGD, one can use other moieties that target the integrin ligand. Generally, such ligands can be used to control proliferating cells and angiogenesis. Exemplary conjugates of this type ligands that targets PECAM-1, VEGF, or other cancer gene, e.g., a cancer gene described herein. Cell binding ligands may be composed of multiple ligands (multivalency) to increase binding affinity. For example, more than one integrin-binding ligand may be combined. Without limiting the structures that bind to integrins, an example of a cyclic peptide RGD ligand is Cyclo(-Arg-Gly-Asp-D-Phe-Xaa) where Xaa is an amino acid with a sidechain that is amenable to conjugation. Naturally occurring examples of X include cysteine where a thiol is used for conjugation or lysine where an amine is used for conjugation. In addition, non-natural amino acids may have other functional groups such as alkynes, azides, or maleimides for conjugation.

[chemical structure]

[0391] An example of a noncyclic, peptidomimetic is an amino benzoic acid derivative where in X is a site of conjugation.

[chemical structure]

[0392] Some embodiments include an RGD ligand attached at either a 3′ terminus or a 5′ terminus. Some embodiments include an RGD ligand attached at a 3′ terminus and a 5′ terminus. In some embodiments, the RGD ligand comprises Cyclo(-Arg-Gly-Asp-D-Phe-Cys), Cyclo(-Arg-Gly-Asp-D-Phe-Lys), Cyclo(-Arg-Gly-Asp-D-Phe-azido), Cyclo(-Arg-Gly-Asp-D-Phe-alkynyl), amino benzoic acid-based RGD, or a combination thereof. In some embodiments, the RGD ligand is composed of 2, 3 or 4 RGD ligands. In some embodiments, the RGD is positioned on the sense strand. In some embodiments, the RGD is positioned at the 5′ end of the sense strand. In some embodiments, the RGD is positioned at the 3′ end of the sense strand. In some embodiments, the RGD is positioned on the antisense strand. In some embodiments, the RGD ligand is positioned at the 5′ end of the antisense strand. In some embodiments, the RGD ligand is positioned at the 3′ end of the antisense strand.

[0393] In some embodiments, a “cell permeation peptide” is capable of permeating a cell, e.g., a microbial cell, such as a bacterial or fungal cell, or a mammalian cell, such as a human cell. A microbial cell-permeating peptide can be, for example, an α-helical linear peptide (e.g., LL-37 or Ceropin PI), a disulfide bond-containing peptide (e.g., a-defensin, p3-defensin or bactenecin), or a peptide containing only one or two dominating amino acids (e.g., PR-39 or indolicidin). A cell permeation peptide can also include a nuclear localization signal (NLS). For example, a cell permeation peptide can be a bipartite amphipathic peptide, such as MPG, which is derived from the fusion peptide domain of HIV-1 gp41 and the NLS of SV40 large T antigen.

[0394] In some embodiments, a targeting peptide can be an amphipathic α-helical peptide. Exemplary amphipathic α-helical peptides include, but are not limited to, cecropins, lycotoxins, paradaxins, buforin, CPF, bombinin-like peptide (BLP), cathelicidins, ceratotoxins, S. clava peptides, hagfish intestinal antimicrobial peptides (HFIAPs), magainines, brevinins-2, dermaseptins, melittins, pleurocidin, H2A peptides, Xenopus peptides, esculentinis-1, and caerins. A number of factors may be considered to maintain the integrity of helix stability. For example, a maximum number of helix stabilization residues will be utilized (e.g., leu, ala, or lys), and a minimum number of helix destabilization residues will be utilized (e.g., proline, or cyclic monomeric units. The capping residue will be considered (for example Gly is an exemplary N-capping residue and/or C-terminal amidation can be used to provide an extra H-bond to stabilize the helix. Formation of salt bridges between residues with opposite charges, separated by i±3, or i±4 positions can provide stability. For example, cationic residues such as lysine, arginine, homo-arginine, ornithine or histidine can form salt bridges with the anionic residues glutamate or aspartate.

[0395] Peptide and peptidomimetic ligands include those having naturally occurring or modified peptides, e.g., D or L peptides; α, β, or γ peptides; N-methyl peptides; azapeptides; peptides having one or more amide, i.e., peptide, linkages replaced with one or more urea, thiourea, carbamate, or sulfonyl urea linkages; or cyclic peptides.

[0396] The targeting ligand can be any ligand that is capable of targeting a specific receptor. Examples include, but are not limited to, folate, GalNAc, galactose, mannose, mannose-6P, clusters of sugars such as GalNAc cluster, mannose cluster, galactose cluster, or an aptamer. A cluster is a combination of two or more sugar units. The targeting ligands also include integrin receptor ligands, Chemokine receptor ligands, transferrin, biotin, serotonin receptor ligands, PSMA, endothelin, GCPII, somatostatin, LDL and HDL ligands. The ligands can also be based on nucleic acid, e.g., an aptamer. The aptamer can be unmodified or have any combination of modifications disclosed herein.

[0397] Endosomal release agents include imidazoles, poly or oligoimidazoles, PEIs, peptides, fusogenic peptides, polycarboxylates, polycations, masked oligo or poly cations or anions, acetals, polyacetals, ketals/polyketyals, orthoesters, polymers with masked or unmasked cationic or anionic charges, dendrimers with masked or unmasked cationic or anionic charges.

[0398] PK modulator stands for pharmacokinetic modulator. PK modulator include lipophiles, bile acids, steroids, phospholipid analogues, peptides, protein binding agents, PEG, vitamins etc. Exemplary PK modulator include, but are not limited to, cholesterol, fatty acids, cholic acid, lithocholic acid, dialkylglycerides, diacylglyceride, phospholipids, sphingo lipids, naproxen, ibuprofen, vitamin E, biotin etc. Oligonucleotides that comprise a number of phosphorothioate linkages are also known to bind to serum protein, thus short oligonucleotides, e.g. oligonucleotides of about 5 bases, 10 bases, 15 bases or 20 bases, comprising multiple of phosphorothioate linkages in the backbone are also amenable as ligands (e.g. as PK modulating ligands).

[0399] In addition, aptamers that bind serum components (e.g. serum proteins) are also amenable as PK modulating ligands.

[0400] When two or more ligands are present, the ligands can all have same properties, all have different properties or some ligands have the same properties while others have different properties. For example, a ligand can have targeting properties, have endosomolytic activity or have PK modulating properties. In some embodiments, all the ligands have different properties.

[0401] Ligands can be coupled to the oligonucleotides at various places, for example, 3′-end, 5′-end, and/or at an internal position. In some embodiments, the ligand is attached at a 2′ position. In some embodiments, the ligand is attached to the oligonucleotides via an intervening tether, e.g., a carrier described herein. The ligand or tethered ligand may be present on a monomer when said monomer is incorporated into the growing strand. In some embodiments, the ligand may be incorporated via coupling to a “precursor” monomer after said “precursor” monomer is incorporated into the growing strand. For example, a monomer having, e.g., an amino-terminated tether (i.e., having no associated ligand), e.g., TAP-(CH2)nNH2 may be incorporated into a growing oligonucleotide strand. In a subsequent operation, i.e., after incorporation of the precursor monomer into the strand, a ligand having an electrophilic group, e.g., a pentafluorophenyl ester or aldehyde group, can subsequently be attached to the precursor monomer by coupling the electrophilic group of the ligand with the terminal nucleophilic group of the precursor monomer's tether. In another example, a monomer having a chemical group suitable for taking part in Click Chemistry reaction may be incorporated e.g., an azide or alkyne terminated tether/linker. In a subsequent operation, i.e., after incorporation of the precursor monomer into the strand, a ligand having complementary chemical group, e.g. an alkyne or azide can be attached to the precursor monomer by coupling the alkyne and the azide together.

[0402] For double-stranded oligonucleotides, ligands can be attached to one or both strands. In some embodiments, a double-stranded siRNA agent contains a ligand conjugated to the sense strand. In some embodiments, a double-stranded siRNA agent contains a ligand conjugated to the antisense strand.

[0403] In some embodiments, ligand can be conjugated to nucleobases, sugar moieties, or internucleosidic linkages of nucleic acid molecules. Conjugation to purine nucleobases or derivatives thereof can occur at any position including, endocyclic and exocyclic atoms. In some embodiments, the 2-, 6-, 7-, or 8-positions of a purine nucleobase are attached to a conjugate moiety. Conjugation to pyrimidine nucleobases or derivatives thereof can also occur at any position. In some embodiments, the 2-, 5-, and 6-positions of a pyrimidine nucleobase can be substituted with a conjugate moiety. Conjugation to sugar moieties of nucleosides can occur at any carbon atom. Example carbon atoms of a sugar moiety that can be attached to a conjugate moiety include the 2′, 3′, and 5′ carbon atoms. The F position can also be attached to a conjugate moiety, such as in an abasic residue. Internucleosidic linkages can also bear conjugate moieties. For phosphorus-containing linkages (e.g., phosphodiester, phosphorothioate, phosphorodithiotate, phosphoroamidate, and the like), the conjugate moiety can be attached directly to the phosphorus atom or to an O, N, or S atom bound to the phosphorus atom. For amine- or amide-containing internucleosidic linkages (e.g., PNA), the conjugate moiety can be attached to the nitrogen atom of the amine or amide or to an adjacent carbon atom.

[0404] In some embodiments, the ligand is attached at a 5′ end of a nucleotide. In some embodiments, the ligand is attached at a 3′ end of a nucleotide, for example at a 3′ position of a ribose. In some embodiments, the ligand is attached at a 2′ position of a ribose or other nucleosidic sugar. In some embodiments, a combination of ligands are attached.

[0405] Any suitable ligand in the field of RNA interference may be used, although the ligand is typically a carbohydrate e.g. monosaccharide (such as GalNAc), disaccharide, trisaccharide, tetrasaccharide, polysaccharide. Linkers that conjugate the ligand to the nucleic acid include those discussed above. For example, the ligand can be one or more GalNAc (N-acetylglucosamine) derivatives attached through a bivalent or trivalent branched linker.

[0406] In some embodiments, the composition comprises an oligonucleotide that inhibits the expression of ANGPTL7, wherein the oligonucleotide comprises a sugar moiety. The sugar moiety may include an N-acetyl galactose moiety (e.g. a N-acetylgalactosamine (GalNAc) moiety), an N-acetyl glucose moiety (e.g. an N-acetylglucosamine (GlcNAc) moiety), a fucose moiety, or a mannose moiety. The sugar moiety may include 1, 2, 3, or more sugar molecules. The sugar moiety may be attached at a 3′ or 5′ terminus of the oligonucleotide. The sugar moiety may include an N-acetyl galactose moiety. The sugar moiety may include an N-acetylgalactosamine (GalNAc) moiety. The sugar moiety may include an N-acetyl glucose moiety. The sugar moiety may include N-acetylglucosamine (GlcNAc) moiety. The sugar moiety may include a fucose moiety. The sugar moiety may include a mannose moiety. N-acetyl glucose, GlcNAc, fucose, or mannose may be useful for targeting macrophages since they may target or bind a mannose receptor such as CD206.

[0407] In some embodiments, the composition comprises an oligonucleotide that inhibits the expression of ANGPTL7, wherein the oligonucleotide comprises an N-acetylgalactosamine (GalNAc) moiety. GalNAc may be useful for hepatocyte targeting, neural (e.g., CNS (e.g., brain), or CSF targeting. The GalNAc moiety may include 1, 2, 3, or more GalNAc molecules. The GalNAc moiety may be attached at a 3′ or 5′ terminus of the oligonucleotide.

[0408] Non-limiting examples of GalNAc ligands are shown in FIG. 9 and FIG. 10. In some embodiments, the oligonucleotide is conjugated to the GalNAc ligand in FIG. 9. In the GalNAc ligand shown in FIG. 9, J indicates a point of attachment to an oligonucleotide. In some embodiments, J is at a 5′ end of the oligonucleotide. In some embodiments, J is at a 3′ end of the oligonucleotide. In the GalNAc ligand shown in FIG. 9, n may be any number. For example, n may be 1-10. In some embodiments, n is 1, 2, 3, 4, 5, 6, 7, 8, 9, or 10, or a range defined by any two of the aforementioned integers. In some embodiments, n is 2. In embodiments in which n is 2 and the oligonucleotide is connected at J, the GalNAc moiety may be referred to as “GalNAc #1” or “GalNAc1.”

[0409] In some embodiments, the oligonucleotide is conjugated to the GalNAc ligand in FIG. 10. The wavy line in FIG. 9 indicates a point of attachment to an oligonucleotide. In some embodiments, the wavy line is at a 5′ end of the oligonucleotide. In some embodiments, the wavy line is at a 3′ end of the oligonucleotide. In embodiments in which the oligonucleotide is connected at the wavy line, the GalNAc moiety may be referred to as “GalNAc #23” or “GalNAc23.”

### Cleavable Linking Groups

[0410] In some embodiments, an oligonucleotide compound or composition comprising an oligonucleotide compound comprises a cleavable linking group. In some cases, a dsRNA agent comprises or is connected to a cleavable linking group.

[0411] In some embodiments, a cleavable linking group is one which is sufficiently stable outside the cell, but which upon entry into a target cell is cleaved to release the two parts the linker is holding together. In some embodiments, the cleavable linking group is cleaved at least 10 times or more, or at least 100 times faster in the target cell or under a first reference condition (which can, e.g., be selected to mimic or represent intracellular conditions) than in the blood of a subject, or under a second reference condition (which can, e.g., be selected to mimic or represent conditions found in the blood or serum).

[0412] Cleavable linking groups are susceptible to cleavage agents, e.g., pH, redox potential or the presence of degradative agents. Generally, cleavage agents are more prevalent or found at higher levels or activities inside cells than in serum or blood.

[0413] Examples of such degradative agents include: redox agents which are selected for particular substrates or which have no substrate specificity, including, e.g., oxidative or reductive enzymes or reductive agents such as mercaptans, present in cells, that can degrade a redox cleavable linking group by reduction; esterases; endosomes or agents that can create an acidic environment, e.g., those that result in a pH of five or lower; enzymes that can hydrolyze or degrade an acid cleavable linking group by acting as a general acid, peptidases (which can be substrate specific), and phosphatases.

[0414] A cleavable linkage group, such as a disulfide bond can be susceptible to pH. The pH of human serum is 7.4, while the average intracellular pH is slightly lower, ranging from about 7.1-7.3. Endosomes have a more acidic pH, in the range of 5.5-6.0, and lysosomes have an even more acidic pH at around 5.0. Some linkers will have a cleavable linking group that is cleaved at a particular pH, thereby releasing the cationic lipid from the ligand inside the cell, or into the desired compartment of the cell.

[0415] A linker can include a cleavable linking group that is cleavable by a particular enzyme. The type of cleavable linking group incorporated into a linker can depend on the cell to be targeted. For example, liver targeting ligands can be linked to the cationic lipids through a linker that includes an ester group. Liver cells are rich in esterases, and therefore the linker will be cleaved more efficiently in liver cells than in cell types that are not esterase-rich. Other cell-types rich in esterases include cells of the lung, renal cortex, and testis.

[0416] Linkers that contain peptide bonds can be used when targeting cell types rich in peptidases, such as liver cells and synoviocytes. In general, the suitability of a candidate cleavable linking group can be evaluated by testing the ability of a degradative agent (or condition) to cleave the candidate linking group. It will also be desirable to also test the candidate cleavable linking group for the ability to resist cleavage in the blood or when in contact with other non-target tissue. Thus one can determine the relative susceptibility to cleavage between a first and a second condition, where the first is selected to be indicative of cleavage in a target cell and the second is selected to be indicative of cleavage in other tissues or biological fluids, e.g., blood or serum. The evaluations can be carried out in cell free systems, in cells, in cell culture, in organ or tissue culture, or in whole animals. It may be useful to make initial evaluations in cell-free or culture conditions and to confirm by further evaluations in whole animals. In some embodiments, useful candidate compounds are cleaved at least 2, 4, 10 or 100 times faster in the cell (or under in vitro conditions selected to mimic intracellular conditions) as compared to blood or serum (or under in vitro conditions selected to mimic extracellular conditions).

### Redox Cleavable Linking Groups

[0417] One class of cleavable linking groups are redox cleavable linking groups that are cleaved upon reduction or oxidation. An example of reductively cleavable linking group is a disulfide linking group (—S—S—). To determine if a candidate cleavable linking group is a suitable “reductively cleavable linking group,” or for example is suitable for use with a particular oligonucleotide and particular targeting agent one can look to methods described herein. For example, a candidate can be evaluated by incubation with dithiothreitol (DTT), or other reducing agent using reagents know in the art, which mimic the rate of cleavage which would be observed in a cell, e.g., a target cell. The candidates can also be evaluated under conditions which are selected to mimic blood or serum conditions. In some embodiments, candidate compounds are cleaved by at most 10% in the blood. In some embodiments, useful candidate compounds are degraded at least 2, 4, 10 or 100 times faster in the cell (or under in vitro conditions selected to mimic intracellular conditions) as compared to blood (or under in vitro conditions selected to mimic extracellular conditions). The rate of cleavage of candidate compounds can be determined using standard enzyme kinetics assays under conditions chosen to mimic intracellular media and compared to conditions chosen to mimic extracellular media.

### Phosphate-Based Cleavable Linking Groups

[0418] Phosphate-based cleavable linking groups are cleaved by agents that degrade or hydrolyze the phosphate group. An example of an agent that cleaves phosphate groups in cells are enzymes such as phosphatases in cells. Examples of phosphate-based linking groups are —OzP(O)(ORk)-O—, —O—P(S)(ORk)-O—, —O—P(S)(SRk)-O—, —S—P(O)(ORk)-O—, —O—P(O)(ORk)-S—, —S—P(O)(ORk)-S—, —O—P(S)(ORk)-S—, —S—P(S)(ORk)-O—, —O—P(O)(Rk)-O—, —O—P(S)(Rk)-O—, —S—P(O)(Rk)-O—, —S—P(S)(Rk)-O—, —S—P(O)(Rk)-S—, —O—P(S)(Rk)-S—. Some embodiments are —O—P(O)(OH)—O—, —O—P(S)(OH)—O—, —O—P(S)(SH)—O—, —S—P(O)(OH)—O—, —O—P(O)(OH)—S—, —S—P(O)(OH)—S—, —O—P(S)(OH)—S—, —S—P(S)(OH)—O—, —O—P(O)(H)—O—, —O—P(S)(H)—O—, —S—P(O)(H)—O—, —S—P(S)(H)—O—, —S—P(O)(H)—S—, —O—P(S)(H)—S—. An exemplary embodiment is —O—P(O)(OH)—O—. These candidates can be evaluated using methods analogous to those described above.

### Acid Cleavable Linking Groups

[0419] Acid cleavable linking groups are linking groups that are cleaved under acidic conditions. In some embodiments acid cleavable linking groups are cleaved in an acidic environment with a pH of about 6.5 or lower (e.g., about 6.0, 5.5, 5.0, or lower), or by agents such as enzymes that can act as a general acid. In a cell, specific low pH organelles, such as endosomes and lysosomes can provide a cleaving environment for acid cleavable linking groups. Examples of acid cleavable linking groups include but are not limited to hydrazones, esters, and esters of amino acids. Acid cleavable groups can have the general formula —C═NN—C(O)O, or —OC(O). An exemplary embodiment is when the carbon attached to the oxygen of the ester (the alkoxy group) is an aryl group, substituted alkyl group, or tertiary alkyl group such as dimethyl pentyl or t-butyl. These candidates can be evaluated using methods analogous to those described above.

### Ester-Based Linking Groups

[0420] Ester-based cleavable linking groups are cleaved by enzymes such as esterases and amidases in cells. Examples of ester-based cleavable linking groups include, but are not limited to, esters of alkylene, alkenylene and alkynylene groups. Ester cleavable linking groups have the general formula —C(O)O—, or —OC(O)—. These candidates can be evaluated using methods analogous to those described above.

### Peptide-Based Cleaving Groups

[0421] Peptide-based cleavable linking groups are cleaved by enzymes such as peptidases and proteases in cells. Peptide-based cleavable linking groups are peptide bonds formed between amino acids to yield oligopeptides (e.g., dipeptides, tripeptides etc.) and polypeptides. Peptide-based cleavable groups do not include the amide group (—C(O)NH—). The amide group can be formed between any alkylene, alkenylene or alkynelene. A peptide bond is a special type of amide bond formed between amino acids to yield peptides and proteins. The peptide-based cleavage group is generally limited to the peptide bond (i.e., the amide bond) formed between amino acids yielding peptides and proteins and does not include the entire amide functional group. Peptide-based cleavable linking groups have the general formula —NHCHRAC(O)NHCHRBC(O)—, where RA and RB are the R groups of the two adjacent amino acids. These candidates can be evaluated using methods analogous to those described above. As used herein, “carbohydrate” refers to a compound which is either a carbohydrate per se made up of one or more monosaccharide units having at least 6 carbon atoms (which may be linear, branched or cyclic) with an oxygen, nitrogen or sulfur atom bonded to each carbon atom; or a compound having as a part thereof a carbohydrate moiety made up of one or more monosaccharide units each having at least six carbon atoms (which may be linear, branched or cyclic), with an oxygen, nitrogen or sulfur atom bonded to each carbon atom. Representative carbohydrates include the sugars (mono-, di-, tri- and oligosaccharides containing from about 4-9 monosaccharide units), and polysaccharides such as starches, glycogen, cellulose and polysaccharide gums. Specific monosaccharides include C5 and above (e.g., C5-C8) sugars; di- and trisaccharides include sugars having two or three monosaccharide units (e.g., C5-C8).

### Nucleotide Mimics

[0422] In some embodiments, an oligonucleotide disclosed herein is a naked oligonucleotide. Naked oligonucleotides are defined as systems that contain no agents that are associated with the nucleic acid either covalently or non-covalently. The absence of any delivery vehicle may require that the oligonucleotide itself be sufficiently nuclease resistant, sufficiently long circulating and cell targeted. For small, solid-phase synthesized oligonucleotides such as those used in antisense oligonucleotides, RNAi, and innate immune stimulators, the use of nucleotide mimics may provide the required drug-like properties.

[0423] In some embodiments, an oligonucleotide of the present disclosure comprises nucleotides that replace phosphodiester group. The substitution of one non-bridging oxygen of a phosphodiester with a sulfur atom creates the phosphorothioate (PS) linkage. A PS bond creates a new stereocenter in the nucleotide and when synthesized under standard achiral conditions creates diastereomeric mixtures of Rp and Sp at the phosphorous atom.

[0424] There are other functional groups identified as replacements of the phosphodiester group in the oligonucleotide. Like phosphates and phosphorothioates, there are a variety of functional groups that are negatively charged such as phosphorodithioate (PS2) and thio-phosphoramidates. There are number of analogues that are uncharged such as phosphorodiamidate morpholino oligomer (PMO), peptide nucleic acid (PNA), phosphotriesters, and phosphonates. It is postulated that the uncharged analogues are not only nuclease resistant, but may also be more membrane permeable; however, the size and hydrophilicity of uncharged oligonucleotides still preclude their passive diffusion across membranes.

[0425] Morpholino oligos (PMOs) use a hydrolytically stable, uncharged phosphordiamidate functional group.

[0426] Peptide nucleic acids (PNAs) are—as their name suggests—based upon the amide functional group.

[0427] Enemas and intramuscular, intravitreal, intrathecal injections may be used for the administration of a variety of oligonucleotides with and without PS bonds.

[0428] In some embodiments, an oligonucleotide of the present disclosure comprises a nucleoside analogue that alters the structure of ribose. There are a variety of nucleotide mimics wherein the ribose or deoxyribose is modified to increase affinity for target and/or increase nuclease resistance. In some cases, there are modifications to all five positions of the ribose ring. In some cases, modifications are made to the 2′ position of ribose.

[0429] In some embodiments, an oligonucleotide of the present disclosure comprises a modification at the 1′ position. In some cases, the oligonucleotide comprises a cytidine mimic that is designed to have increased affinity for guanosine bases due to hydrogen bonding through an aminoethyl group. In some cases, the oligonucleotide comprises a C-5 propynyl pyrimidines.

[0430] In some embodiments, an oligonucleotide of the present disclosure comprises a 2′ modification. Modifications of the hydroxyl group at the 2′ position of ribose may be used to mimic the structure of the ribose ring while inhibiting ribonucleases that require the 2′-OH group for hydrolysis of RNA. In some cases, the oligonucleotide comprises a 2′-O-Methyl ribonucleic acid that is naturally occurring and may increase binding affinity to RNA itself while being resistant to ribonuclease. In some cases, the oligonucleotide comprises a 2′-O-Methyl group. In some cases, the oligonucleotide comprises a 2′-O-Methoxyethyl(MOE) modification, which may mimic the ribonuclease resistance of O-methyl, attenuate protein-oligonucleotide interactions and have increased affinity for RNA.

[0431] In some embodiments, an oligonucleotide of the present disclosure comprises a 2′-deoxy-2′-fluoro (2′-F) analogue of nucleosides that adopt a C3′-endo conformation characteristic of the sugars in RNA helices.

[0432] In some embodiments, an oligonucleotide of the present disclosure comprises 4′- and 5′-modifications, where alkoxy substituents at the 4′ position of 2′deoxyribose mimic the conformation of ribose.

[0433] In some embodiments, an oligonucleotide of the present disclosure comprises a bicyclic 2′-4′-modification. There are a variety of ribose derivatives that lock the carbohydrate ring into the 3′ endo conformation by the formation of bicyclic structures with a bridge between the 2′ oxygen and the 4′ position. The original bicyclic structure has a methylene bridging group and are termed locked nucleic acids (LNAs). The bicyclic structure “locks” the ribose into its preferred 3′ endo conformation and increases base pairing affinity. Incorporation of LNAs into a DNA duplex can increase melting points up to 8° C. per LNA. Subsequently, a variety of bicyclic nucleotides have been developed such as Bridged Nucleic Acids (BNAs), Ethyl-bridged (ENAs), constrained ethyl (cEt) nucleic acids and tricyclic structures with varying affinity for target sites. LNAs can be incorporated into antagomirs, splice blocking oligonucleotides, either strand of an RNAi duplex; however, like other 3′ endo conformers, LNAs are not substrates for RNAse H.

[0434] In some embodiments, an oligonucleotide of the present disclosure comprises an acyclic nucleic acid analog. In some cases, the analog comprises an alternative ribose ring structure. These include those in which the bond between 2′ and 3′ carbons in the ribose is absent, as well as those containing substitution of the ribose ring with a three-carbon backbone. Examples of acyclic nucleic acid analogs include unlocked nucleic acid (UNA) and glycol nucleic acids (GNA). Incorporation of these analogs reduce the melting temperature of the RNAi duplex and can be incorporated into either strand. Incorporation at the 5′ end of the sense strand, or passenger strand, inhibits incorporation into this strand into RISC. Incorporation into the seed region of the antisense strand, or guide strand, can reduce off-target activity. Acyclic nucleic acid analogs may also increase resistance of the RNAi duplex to 3′-exonuclease activity.

[0435] In some embodiments, an oligonucleotide of the present disclosure comprises modification patterns. Without being bound by theory, for RNAi duplexes, recognition by RISC requires RNA-like 3′-endo nucleotides and some patterns of RNA analogues. A pattern of alternating 2′-O-methyl groups may provide stability against nucleases, but not all permutations of alternating 2′-O-methyl are active RNAi agents. The fact that one may remove all 2′-hydroxy groups with alternating 2′-fluoro and 2′-O-methyl groups to produce duplexes that are resistant to nucleases and active in RNAi may suggest the 2′-hydroxy group is not absolutely required for activity, but that some sites in the RNAi duplex are sensitive to the added steric bulk of the methyl group.

### Conjugated Oligonucleotides

[0436] Oligonucleotides may have groups conjugated via covalent bonds that prolong circulation, provide targeting to tissues and facilitate intracellular delivery.

[0437] In some embodiments, an oligonucleotide of the present disclosure is conjugated to polyethylene glycol (PEG), which may prevent clearance by two mechanisms: the increase in molecular weight above threshold for renal clearance and the prevention of non-specific interactions with extracellular surfaces and serum components. PEG may be incorporated into nucleic acid delivery vehicles by attachment to components that non-covalently associate with the nucleic acids, e.g., PEGylated lipids and polymers. PEG may also be directly conjugated to increase nucleic acid circulation times, decrease nonspecific interactions and alter biodistribution. In some cases, the targeting is passive and the potency of the nucleic may be compromised as PEG MW increases.

[0438] Another class of molecules that can be conjugated in order to increases circulation times is the attachment of lipophilic groups such as cholesterol or other lipophilic moiety with >12 carbons which interact with serum components such as albumen and lipoproteins thereby increasing circulation times and passive accumulation in the liver. In some cases, extensive PS modification increases circulation times through associations with serum components, with roughly 10 PS groups required for serum binding.

### Formulations, Compositions, and Delivery

[0439] In some embodiments, the dsRNA is administered in buffer.

[0440] In some embodiments, dsRNA agent (sometimes referred to as siRNA) compounds described herein can be formulated for administration to a subject. A formulated siRNA composition can assume a variety of states. In some examples, the composition is at least partially crystalline, uniformly crystalline, and/or anhydrous (e.g., less than 80, 50, 30, 20, or 10% water). In another example, the siRNA is in an aqueous phase, e.g., in a solution that includes water.

[0441] The aqueous phase or the crystalline compositions can, e.g., be incorporated into a delivery vehicle, e.g., a liposome (particularly for the aqueous phase) or a particle (e.g., a microparticle as can be appropriate for a crystalline composition). Generally, the siRNA composition is formulated in a manner that is compatible with the intended method of administration, as described herein. For example, in particular embodiments, the composition is prepared by at least one of the following methods: spray drying, lyophilization, vacuum drying, evaporation, fluid bed drying, or a combination of these techniques; or sonication with a lipid, freeze-drying, condensation and other self-assembly.

[0442] An siRNA preparation can be formulated in combination with another agent, e.g., another therapeutic agent or an agent that stabilizes an siRNA, e.g., a protein that complexes with siRNA to form an iRNP. Still other agents include chelators, e.g., EDTA (e.g., to remove divalent cations such as Mg2+), salts, RNAse inhibitors (e.g., a broad specificity RNAse inhibitor such as RNAsin) and so forth.

[0443] In some embodiments, the siRNA preparation includes another siRNA compound, e.g., a second siRNA that can mediate RNAi with respect to a second gene, or with respect to the same gene. Still other preparation can include at least 3, 5, ten, twenty, fifty, or a hundred or more different siRNA species. Such siRNAs can mediate RNAi with respect to a similar number of different genes.

[0444] In some embodiments, the siRNA preparation includes at least a second therapeutic agent (e.g., an agent other than a RNA or a DNA). For example, an siRNA composition for the treatment of a viral disease, e.g., HIV, might include a known antiviral agent (e.g., a protease inhibitor or reverse transcriptase inhibitor). In another example, a siRNA composition for the treatment of a cancer might further comprise a chemotherapeutic agent.

### Liposomes

[0445] For ease of exposition the formulations, compositions and methods in this section are discussed largely with regard to unmodified siRNA compounds. It may be understood, however, that these formulations, compositions and methods can be practiced with other siRNA compounds, e.g., modified siRNAs. An siRNA compound, e.g., a double-stranded siRNA compound, or ssiRNA compound, (e.g., a precursor, e.g., a larger siRNA compound which can be processed into a ssiRNA compound, or a DNA which encodes an siRNA compound, e.g., a double-stranded siRNA compound, or ssiRNA compound, or precursor thereof) preparation can be formulated for delivery in a membranous molecular assembly, e.g., a liposome or a micelle. In some embodiments, the term “liposome” refers to a vesicle with amphiphilic lipids arranged in at least one bilayer, e.g., one bilayer or a plurality of bilayers. Liposomes include unilamellar and multilamellar vesicles that have a membrane formed from a lipophilic material and an aqueous interior. The aqueous portion contains the siRNA composition. The lipophilic material isolates the aqueous interior from an aqueous exterior, which typically does not include the siRNA composition, although in some examples, it may. Liposomes are useful for the transfer and delivery of active ingredients to the site of action. Because the liposomal membrane is structurally similar to biological membranes, when liposomes are applied to a tissue, the liposomal bilayer fuses with bilayer of the cellular membranes. As the merging of the liposome and cell progresses, the internal aqueous contents that include the siRNA are delivered into the cell where the siRNA can specifically bind to a target RNA. In some cases, the liposomes are also specifically targeted, e.g., to direct the siRNA to particular cell types.

[0446] A liposome containing an siRNA can be prepared by a variety of methods. In one example, the lipid component of a liposome is dissolved in a detergent so that micelles are formed with the lipid component. For example, the lipid component can be an amphipathic cationic lipid or lipid conjugate. The detergent can have a high critical micelle concentration and may be nonionic. Exemplary detergents include cholate, CHAPS, octylglucoside, deoxycholate, and lauroyl sarcosine. The siRNA preparation is then added to the micelles that include the lipid component. The cationic groups on the lipid interact with the siRNA and condense around the siRNA to form a liposome. After condensation, the detergent is removed, e.g., by dialysis, to yield a liposomal preparation of siRNA.

[0447] If necessary, a carrier compound that assists in condensation can be added during the condensation reaction, e.g., by controlled addition. For example, the carrier compound can be a polymer other than a nucleic acid {e.g., spermine or spermidine). pH can also be adjusted to favor condensation.

[0448] Commonly used techniques for preparing lipid aggregates of appropriate size for use as delivery vehicles include sonication and freeze-thaw plus extrusion. Microfluidization can be used when consistently small (50 to 200 nm) and relatively uniform aggregates are desired. These methods are readily adapted to packaging siRNA preparations into liposomes.

[0449] Liposomes that are pH-sensitive or negatively-charged entrap nucleic acid molecules rather than complex with them. Since both the nucleic acid molecules and the lipid are similarly charged, repulsion rather than complex formation occurs.

[0450] Nevertheless, some nucleic acid molecules are entrapped within the aqueous interior of these liposomes. pH-sensitive liposomes may be used to deliver DNA encoding the thymidine kinase gene to cell monolayers in culture where expression of the exogenous gene was detected in the target cells.

[0451] One type of liposomal composition includes phospholipids other than naturally-derived phosphatidylcholine. Neutral liposome compositions, for example, can be formed from dimyristoyl phosphatidylcholine (DMPC) or dipalmitoyl phosphatidylcholine (DPPC). Anionic liposome compositions generally are formed from dimyristoyl phosphatidylglycerol, while anionic fusogenic liposomes are formed primarily from dioleoyl phosphatidylethanolamine (DOPE). Another type of liposomal composition is formed from phosphatidylcholine (PC) such as, for example, soybean PC, and egg PC. Another type is formed from mixtures of phospholipid and/or phosphatidylcholine and/or cholesterol.

[0452] In some embodiments, cationic liposomes are used. Cationic liposomes possess the advantage of being able to fuse to the cell membrane. Non-cationic liposomes, although not able to fuse as efficiently with the plasma membrane, are taken up by macrophages in vivo and can be used to deliver siRNAs to macrophages.

[0453] Further advantages of liposomes include: liposomes obtained from natural phospholipids are biocompatible and biodegradable; liposomes can incorporate a wide range of water and lipid soluble drugs; liposomes can protect encapsulated siRNAs in their internal compartments from metabolism and degradation. Some considerations in the preparation of liposome formulations are the lipid surface charge, vesicle size and the aqueous volume of the liposomes.

[0454] A positively charged synthetic cationic lipid, N-[1-(2,3-dioleyloxy)propyl]-N,N,N-trimethylammonium chloride (DOTMA) can be used to form small liposomes that interact spontaneously with nucleic acid to form lipid-nucleic acid complexes which are capable of fusing with the negatively charged lipids of the cell membranes of tissue culture cells, resulting in delivery of siRNA.

[0455] A DOTMA analogue, 1,2-bis(oleoyloxy)-3-(trimethylammonia)propane (DOTAP) can be used in combination with a phospholipid to form DNA-complexing vesicles. Lipofectin™ Bethesda Research Laboratories, Gaithersburg, Md.) is an effective agent for the delivery of highly anionic nucleic acids into living tissue culture cells that comprise positively charged DOTMA liposomes which interact spontaneously with negatively charged polynucleotides to form complexes. When enough positively charged liposomes are used, the net charge on the resulting complexes is also positive. Positively charged complexes prepared in this way spontaneously attach to negatively charged cell surfaces, fuse with the plasma membrane, and efficiently deliver functional nucleic acids into, for example, tissue culture cells. Another commercially available cationic lipid, 1,2-bis(oleoyloxy)-3,3-(trimethylammonia)propane (“DOTAP”) (Boehringer Mannheim, Indianapolis, Indiana) differs from DOTMA in that the oleoyl moieties are linked by ester, rather than ether linkages.

[0456] Other reported cationic lipid compounds include those that conjugate to a variety of moieties including, for example, carboxyspermine which may be conjugated to one of two types of lipids and includes compounds such as 5-carboxyspermylglycine dioctaoleoylamide (“DOGS”) (Transfectam™, Promega, Madison, Wisconsin) and dipalmitoylphosphatidylethanolamine 5-carboxyspermyl-amide (“DPPES”).

[0457] Another cationic lipid conjugate includes derivatization of the lipid with cholesterol (“DC-Choi”) which may be formulated into liposomes in combination with DOPE. Lipopolylysine, made by conjugating polylysine to DOPE, may be effective for transfection in the presence of serum. For certain cell lines, these liposomes containing conjugated cationic lipids, are said to exhibit lower toxicity and provide more efficient transfection than the DOTMA-containing compositions. Other commercially available cationic lipid products include DMRIE and DMRIE-HP (Vical, La Jo 11a, California) and Lipofectamine (DOSPA) (Life Technology, Inc., Gaithersburg, Maryland).

[0458] Liposomal formulations may be particularly suited for topical administration, and may present an advantage over other formulations. Such advantages include reduced side effects related to high systemic absorption of the administered drug, increased accumulation of the administered drug at the desired target, and the ability to administer an siRNA into the skin. In some implementations, liposomes are used for delivering siRNA to epidermal cells and also to enhance the penetration of siRNA into dermal tissues, e.g., into skin. For example, the liposomes can be applied topically.

[0459] In some embodiments, non-ionic liposomal systems are used to deliver an oligonucleotide to the skin, e.g., using non-ionic surfactant and cholesterol. Non-ionic liposomal formulations comprising Novasome I (glyceryl dilaurate/cholesterol/polyoxyethylene-10-stearyl ether) and Novasome II (glyceryl distearate/cholesterol/polyoxyethylene-10-stearyl ether) may be used to deliver an oligonucleotide. Such formulations with siRNA are useful for treating a dermatological disorder.

[0460] Liposomes that include siRNA can be made highly deformable. Such deformability can enable the liposomes to penetrate through pore that are smaller than the average radius of the liposome. For example, transfersomes are a type of deformable liposomes. Transfersomes can be made by adding surface edge activators, usually surfactants, to a standard liposomal composition. Transfersomes that include siRNA can be delivered, for example, subcutaneously by infection in order to deliver siRNA to keratinocytes in the skin. In order to cross intact mammalian skin, lipid vesicles must pass through a series of fine pores, each with a diameter less than 50 nm, under the influence of a suitable transdermal gradient. In addition, due to the lipid properties, these transfersomes can be self-optimizing (adaptive to the shape of pores, e.g., in the skin), self-repairing, and can frequently reach their targets without fragmenting, and often self-loading.

[0461] In some embodiments, an oligonucleotide is formulated with a surfactant. Surfactants find wide application in formulations such as emulsions (including microemulsions) and liposomes (see above). In some embodiments, the siRNA is formulated as an emulsion that includes a surfactant. The most common way of classifying and ranking the properties of the many different types of surfactants, both natural and synthetic, is through the use of the hydrophile/lipophile balance (HLB). The nature of the hydrophilic group provides a useful means for categorizing the different surfactants used in formulations.

[0462] If the surfactant molecule is not ionized, it is classified as a nonionic surfactant. Nonionic surfactants find wide application in pharmaceutical products and are usable over a wide range of pH values. In general, their HLB values range from 2 to about 18 depending on their structure. Nonionic surfactants include nonionic esters such as ethylene glycol esters, propylene glycol esters, glyceryl esters, polyglyceryl esters, sorbitan esters, sucrose esters, and ethoxylated esters. Nonionic alkanolamides and ethers such as fatty alcohol ethoxylates, propoxylated alcohols, and ethoxylated/propoxylated block polymers are also included in this class. The polyoxy ethylene surfactants are the most popular members of the nonionic surfactant class.

[0463] If the surfactant molecule carries a negative charge when it is dissolved or dispersed in water, the surfactant is classified as anionic. Anionic surfactants include carboxylates such as soaps, acyl lactylates, acyl amides of amino acids, esters of sulfuric acid such as alkyl sulfates and ethoxylated alkyl sulfates, sulfonates such as alkyl benzene sulfonates, acyl isethionates, acyl taurates and sulfo succinates, and phosphates. The most important members of the anionic surfactant class are the alkyl sulfates and the soaps. If the surfactant molecule carries a positive charge when it is dissolved or dispersed in water, the surfactant is classified as cationic. Cationic surfactants include quaternary ammonium salts and ethoxylated amines. The quaternary ammonium salts are the most used members of this class.

[0464] If the surfactant molecule has the ability to carry either a positive or negative charge, the surfactant is classified as amphoteric. Amphoteric surfactants include acrylic acid derivatives, substituted alkylamides, N-alkylbetaines and phosphatides.

### Micelles and Other Membranous Formulations

[0465] For ease of exposition the micelles and other formulations, compositions and methods in this section are discussed largely with regard to unmodified siRNA compounds. It may be understood, however, that these micelles and other formulations, compositions and methods can be practiced with other siRNA compounds, e.g., modified siRNA compounds. The siRNA compound, e.g., a double-stranded siRNA compound, or ssiRNA compound, (e.g., a precursor, e.g., a larger siRNA compound which can be processed into an ssiRNA compound, or a DNA which encodes an siRNA compound, e.g., a double-stranded siRNA compound, or ssiRNA compound, or precursor thereof) composition can be provided as a micellar formulation. In some embodiments, “micelles” are a particular type of molecular assembly in which amphipathic molecules are arranged in a spherical structure such that all the hydrophobic portions of the molecules are directed inward, leaving the hydrophilic portions in contact with the surrounding aqueous phase. The converse arrangement exists if the environment is hydrophobic.

[0466] A mixed micellar formulation suitable for delivery through transdermal membranes may be prepared by mixing an aqueous solution of the siRNA composition, an alkali metal Cs to C22 alkyl sulphate, and micelle forming compounds. Exemplary micelle forming compounds include lecithin, hyaluronic acid, pharmaceutically acceptable salts of hyaluronic acid, glycolic acid, lactic acid, chamomile extract, cucumber extract, oleic acid, linoleic acid, linolenic acid, monoolein, monooleates, monolaurates, borage oil, evening of primrose oil, menthol, trihydroxy oxo cholanyl glycine and pharmaceutically acceptable salts thereof, glycerin, polyglycerin, lysine, polylysine, triolein, polyoxy ethylene ethers and analogues thereof, polidocanol alkyl ethers and analogues thereof, chenodeoxycholate, deoxycholate, and mixtures thereof. The micelle forming compounds may be added at the same time or after addition of the alkali metal alkyl sulphate. Mixed micelles will form with substantially any kind of mixing of the ingredients but vigorous mixing in order to provide smaller size micelles.

[0467] In one method a first micellar composition is prepared which contains the siRNA composition and at least the alkali metal alkyl sulphate. The first micellar composition is then mixed with at least three micelle forming compounds to form a mixed micellar composition. In another method, the micellar composition is prepared by mixing the siRNA composition, the alkali metal alkyl sulphate and at least one of the micelle forming compounds, followed by addition of the remaining micelle forming compounds, with vigorous mixing.

[0468] Phenol and/or m-cresol may be added to the mixed micellar composition to stabilize the formulation and protect against bacterial growth. In some cases, phenol and/or m-cresol may be added with the micelle forming ingredients. An isotonic agent such as glycerin may also be added after formation of the mixed micellar composition.

[0469] For delivery of the micellar formulation as a spray, the formulation can be put into an aerosol dispenser and the dispenser is charged with a propellant. The propellant, which is under pressure, is in liquid form in the dispenser. The ratios of the ingredients are adjusted so that the aqueous and propellant phases become one, i.e., there is one phase. If there are two phases, it is necessary to mix or shake the dispenser prior to dispensing a portion of the contents, e.g., through a metered valve. The dispensed dose of pharmaceutical agent is propelled from the metered valve in a fine spray.

[0470] Propellants may include hydrogen-containing chlorofluorocarbons, hydrogen-containing fluorocarbons, dimethyl ether and diethyl ether. In certain embodiments, HFA 134a (1,1,1,2 tetrafluoroethane) may be used.

### Pharmaceutical Compositions

[0471] In some embodiments, the composition is a pharmaceutical composition. In some embodiments, the composition is sterile. In some embodiments, the composition further comprises a pharmaceutically acceptable carrier.

[0472] In some embodiments, the pharmaceutically acceptable carrier comprises water. In some embodiments, the pharmaceutically acceptable carrier comprises a buffer. In some embodiments, the pharmaceutically acceptable carrier comprises a saline solution. In some embodiments, the pharmaceutically acceptable carrier comprises water, a buffer, or a saline solution. In some embodiments, the composition comprises a liposome. In some embodiments, the pharmaceutically acceptable carrier comprises liposomes, lipids, nanoparticles, proteins, protein-antibody complexes, peptides, cellulose, nanogel, or a combination thereof.

[0473] In some embodiments, the composition is formulated for administration. The administration may be systemic. In some embodiments, the administration is intravenous. In some embodiments, the administration is by injection. In some embodiments, the injection is subcutaneous. In some embodiments, the injection is subcutaneous. In some embodiments, the injection is intraperitoneal. In some embodiments, the injection is intramuscular. The administration may be to an eye (e.g. intravitreal). In some embodiments, the formulation allows for delivery of a compound such as an oligonucleotide to an eye cell. In some embodiments, the formulation allows for delivery of a compound such as an oligonucleotide to a neural cell.

[0474] The oligonucleotides disclosed herein may be formulated in a pharmaceutical composition. The specific concentrations of the oligonucleotide can be determined by experimentation.

[0475] For ease of exposition the particles, formulations, compositions and methods in this section are discussed largely with regard to siRNA compounds. It may be understood, however, that these particles, formulations, compositions and methods can be practiced with modified siRNA compounds. In some embodiments, an siRNA compound, e.g., a double-stranded siRNA compound, or ssiRNA compound, (e.g., a precursor, e.g., a larger siRNA compound which can be processed into a ssiRNA compound, or a DNA which encodes an siRNA compound, e.g., a double-stranded siRNA compound, or ssiRNA compound, or precursor thereof) preparations may be incorporated into a particle, e.g., a microparticle. Microparticles can be produced by spray-drying but may also be produced by other methods including lyophilization, evaporation, fluid bed drying, vacuum drying, or a combination of these techniques.

[0476] The siRNA agents may be formulated for pharmaceutical use. Pharmaceutically acceptable compositions comprise a therapeutically-effective amount of one or more of the dsRNA agents in any of the preceding embodiments, taken alone or formulated together with one or more pharmaceutically acceptable carriers (additives), excipient and/or diluents.

[0477] The pharmaceutical compositions may be specially formulated for administration in solid or liquid form, including those adapted for the following: (1) oral administration, for example, drenches (aqueous or non-aqueous solutions or suspensions), tablets, e.g., those targeted for buccal, sublingual, and systemic absorption, boluses, powders, granules, pastes for application to the tongue; (2) parenteral administration, for example, by subcutaneous, intramuscular, intravenous or epidural injection as, for example, a sterile solution or suspension, or sustained-release formulation; (3) topical application, for example, as a cream, ointment, or a controlled-release patch or spray applied to the skin; (4) intravaginally or intrarectally, for example, as a pessary, cream or foam; (5) sublingually; (6) ocularly; (7) transdermally; (8) nasally; (9) inhalation; or (10) endotracheally.

[0478] In some embodiments, a “therapeutically-effective amount” is an amount of a compound, material, or composition comprising an oligonucleotide herein which is effective for producing some desired therapeutic effect in at least a sub-population of cells in an animal at a reasonable benefit/risk ratio applicable to any medical treatment.

[0479] In some embodiments, “pharmaceutically acceptable” is employed herein to refer to those compounds, materials, compositions, and/or dosage forms which are, within the scope of sound medical judgment, suitable for use in contact with the tissues of human beings and animals without excessive toxicity, irritation, allergic response, or other problem or complication, commensurate with a reasonable benefit/risk ratio.

[0480] In some embodiments, “pharmaceutically-acceptable carrier” as used herein means a pharmaceutically-acceptable material, composition or vehicle, such as a liquid or solid filler, diluent, excipient, manufacturing aid (e.g., lubricant, tale magnesium, calcium or zinc stearate, or steric acid), or solvent encapsulating material, involved in carrying or transporting the subject compound from one organ, or portion of the body, to another organ, or portion of the body. Each carrier must be “acceptable” in the sense of being compatible with the other ingredients of the formulation and not injurious to the patient. Some examples of materials which can serve as pharmaceutically-acceptable carriers include: (1) sugars, such as lactose, glucose and sucrose; (2) starches, such as corn starch and potato starch; (3) cellulose, and its derivatives, such as sodium carboxymethyl cellulose, ethyl cellulose and cellulose acetate; (4) powdered tragacanth; (5) malt; (6) gelatin; (7) lubricating agents, such as magnesium state, sodium lauryl sulfate and tale; (8) excipients, such as cocoa butter and suppository waxes; (9) oils, such as peanut oil, cottonseed oil, safflower oil, sesame oil, olive oil, corn oil and soybean oil; (10) glycols, such as propylene glycol; (11) polyols, such as glycerin, sorbitol, mannitol and polyethylene glycol; (12) esters, such as ethyl oleate and ethyl laurate; (13) agar; (14) buffering agents, such as magnesium hydroxide and aluminum hydroxide; (15) alginic acid; (16) pyrogen-free water; (17) isotonic saline; (18) Ringer's solution; (19) ethyl alcohol; (20) pH buffered solutions; (21) polyesters, polycarbonates and/or polyanhydrides; (22) bulking agents, such as polypeptides and amino acids (23) serum component, such as serum albumin, HDL and LDL; and (22) other non-toxic compatible substances employed in pharmaceutical formulations.

[0481] The formulations may conveniently be presented in unit dosage, or other relevant, form. The amount of active ingredient which can be combined with a carrier material to produce a single dosage form will vary depending upon the host being treated, the particular mode of administration. The amount of active ingredient which can be combined with a carrier material to produce a single dosage form will generally be that amount of the compound which produces a therapeutic effect. Generally, out of one hundred percent, this amount will range from about 0.1 percent to about ninety-nine percent of active ingredient, from about 5 percent to about 70 percent, or from about 10 percent to about 30 percent.

[0482] In certain embodiments, a formulation comprises an excipient selected from the group consisting of cyclodextrins, celluloses, liposomes, micelle forming agents, e.g., bile acids, and polymeric carriers, e.g., polyesters and polyanhydrides; and a compound disclosed herein. In certain embodiments, an aforementioned formulation renders orally bio available a compound disclosed herein.

[0483] An agent preparation can be formulated in combination with another agent, e.g., another therapeutic agent or an agent that stabilizes an siRNA, e.g., a protein that complexes with siRNA to form particle. Still other agents include chelators, e.g., EDTA (e.g., to remove divalent cations such as Mg2+), salts, RNAse inhibitors (e.g., a broad specificity RNAse inhibitor such as RNAsin) and so forth.

[0484] Methods of preparing these formulations or compositions include the step of bringing into association a compound disclosed herein with the carrier and, optionally, one or more accessory ingredients. In general, the formulations are prepared by uniformly and intimately bringing into association a compound disclosed herein with liquid carriers, or finely divided solid carriers, or both, and then, if necessary, shaping the product.

[0485] In some cases, in order to prolong the effect of a drug, it is desirable to slow the absorption of the drug from subcutaneous or intramuscular injection. This may be accomplished through the use of a liquid suspension of crystalline or amorphous material having poor water solubility. The rate of absorption of the drug then depends upon its rate of dissolution which, in turn, may depend upon crystal size and crystalline form. In some cases, delayed absorption of a parenterally-administered drug form is accomplished by dissolving or suspending the drug in an oil vehicle.

[0486] The compounds disclosed herein may be formulated for administration in any convenient way for use in human or veterinary medicine, by analogy with other pharmaceuticals.

[0487] Further provided are pharmaceutical compositions of the oligonucleotide molecules described. These pharmaceutical compositions include salts of the above compounds, e.g., acid addition salts, for example, salts of hydrochloric, hydrobromic, acetic acid, and benzene sulfonic acid. These pharmaceutical formulations or pharmaceutical compositions can comprise a pharmaceutically acceptable carrier or diluent.

[0488] In some embodiments, pharmaceutical compositions (e.g. oligonucleotides and/or lipid nanoparticle formulations thereof) further comprise conventional pharmaceutical excipients and/or additives. Suitable pharmaceutical excipients include preservatives, flavoring agents, stabilizers, antioxidants, osmolality adjusting agents, buffers, and pH adjusting agents. Suitable additives include physiologically biocompatible buffers (e.g., trimethylamine hydrochloride), addition of chelants (such as, for example, DTPA or DTPA-bisamide) or calcium chelate complexes (as for example calcium DTPA, CaNaDTPA-bisamide), or, optionally, additions of calcium or sodium salts (for example, calcium chloride, calcium ascorbate, calcium gluconate or calcium lactate). In addition, antioxidants and suspending agents can be used.

[0489] In some embodiments, the siRNA and LNP compositions and formulations provided herein for use in pulmonary delivery further comprise one or more surfactants. Suitable surfactants or surfactant components for enhancing the uptake of the compositions include synthetic and natural as well as full and truncated forms of surfactant protein A, surfactant protein B, surfactant protein C, surfactant protein D and surfactant Protein E, di-saturated phosphatidylcholine (other than dipalmitoyl), dipalmitoylphosphatidylcholine, phosphatidylcholine, phosphatidylglycerol, phosphatidylinositol, phosphatidylethanolamine, phosphatidylserine; phosphatidic acid, ubiquinones, lysophosphatidylethanolamine, lysophosphatidylcholine, palmitoyl-lysophosphatidylcholine, dehydroepiandrosterone, dolichols, sulfatidic acid, glycerol-3-phosphate, dihydroxyacetone phosphate, glycerol, glycero-3-phosphocholine, dihydroxyacetone, palmitate, cytidine diphosphate (CDP) diacylglycerol, CDP choline, choline, choline phosphate; as well as natural and artificial lamellar bodies which are the natural carrier vehicles for the components of surfactant, omega-3 fatty acids, polyenic acid, polyenoic acid, lecithin, palmitinic acid, non-ionic block copolymers of ethylene or propylene oxides, polyoxypropylene, monomeric and polymeric, polyoxyethylene, monomeric and polymeric, poly (vinyl amine) with dextran and/or alkanoyl side chains, Brij 35, Triton X-100 and synthetic surfactants ALEC, Exosurf, Survan and Atovaquone, among others. These surfactants can be used either as single or part of a multiple component surfactant in a formulation, or as covalently bound additions to the 5′ and/or 3′ ends of the nucleic acid component of a pharmaceutical composition herein.

### Gene Therapy Vector

[0490] In some embodiments, double-stranded RNAi agents are produced in a cell in vivo, e.g., from exogenous DNA templates that are delivered into the cell. For example, the DNA templates can be inserted into vectors and used as gene therapy vectors. Gene therapy vectors can be delivered to a subject by, for example, intravenous injection, local administration, or by stereotactic injection. The pharmaceutical preparation of the gene therapy vector can include the gene therapy vector in an acceptable diluent, or can comprise a slow release matrix in which the gene delivery vehicle is imbedded. The DNA templates, for example, can include two transcription units, one that produces a transcript that includes the top strand of a dsRNA agent and one that produces a transcript that includes the bottom strand of a dsRNA agent. When the templates are transcribed, the dsRNA agent is produced, and processed into siRNA agent fragments that mediate gene silencing.

### Delivery Vehicles Based Upon Complexation of Nucleic Acid

[0491] In some embodiments, complexation of oligonucleotide therapeutics with cationic agents inhibits nuclease from degrading the oligonucleotide by forming a steric barrier and by inhibiting nuclease binding by neutralizing anionic charge. The process of forming compact particles of nucleic acids from their extended chains is called condensation, which may be achieved by the addition of multiply-charged cationic species. Multiple positive charges can either be covalently attached to one another in a polycation or non-covalently associated with one another in a complex such as the surface of a cationic liposome. The resulting polycation-polyanion interaction is a colloidal dispersion where the nucleic acid particles vary in size and shape depending on the nucleic acid and the condensing cation. In general, the particles are greater than 20 nm in size, and—in the absence of agents to modulate surface charge such as polyethylene glycol (PEG)—have surface charges >20 mV.

[0492] The pharmacokinetics and biodistribution of nanoparticles are dependent upon their size and charge. Upon iv administration, large (>200 nm) and/or highly positively charged (surface charge >20 mV) are primarily distributed among endothelial tissues and macrophages in the liver and spleen and have a half-life of circulation less than 2 hours. Reduction in size (<100 nm) and surface charge (˜0 mV) results increased circulation times. Local administration of positively charged polyplexes results in association with cells at site of application such as epithelial cells.

### Strategies for Cytoplasmic Delivery

[0493] There are a variety of strategies to facilitate cytoplasmic delivery of oligonucleotides including endosomal buffering (i.e. proton sponge), titratable amphiphiles, cell penetrating peptides and masked membrane lytic polymers.

[0494] The mechanism of endosomal buffering (i.e. proton sponge) to facilitate endosomolysis relies on the ability of agents such as polyamines to buffer endosomal/lysosomal compartments. The resistance to acidification is postulated to result in increased osmotic pressure that results in lysis of the lysosomal compartment. Titratable amphiphiles are polymers/peptides whose structure is pH-dependent in such a way that at acidic pH they are hydrophobic and membrane disruptive. Typically, titratable amphiphiles are polyanionic polymers or peptides with carboxylic acids that become neutral and membrane disruptive upon acidification. Cell penetrating peptides (CPPs) are cationic peptides, with a high propensity of guanidinium groups, that enter cells without any apparent membrane lysis. Masked lytic polymers are membrane disruptive polymers whose membrane interactivity is attenuated by reversible covalent modification. Like titratable amphiphiles, the mechanism of endosomolysis by masked polymers relies on the use of amphipathic polymers whose ability to lyse membranes is controlled such that the activity is only functional in the acidic environment of the endosome/lysosome. In the case of titratable amphiphiles, the mechanism of control is a reversible protonation of carboxylic acids. In the case of masked polymers, the control of membrane activity is the irreversible cleavage of a group that inhibits membrane interactivity of the polymer.

### Liposomal Delivery Systems

[0495] Nucleic acids entrapped in lipids (lipoplexes) are a common vehicle for the delivery of nucleic acids. Cationic lipids form electrostatic complexes between nucleic acid and lipids. In addition to the cationic lipids, there are typically neutral or anionic helper lipids which include unsaturated fatty acids and are postulated to assist in fusion between the lipoplex and the cellular membrane, and PEGylated lipids, which prevent aggregation during formulation and storage and non-specific interactions in vivo.

[0496] Lipids are water insoluble and nucleic acids are organic solvent insoluble. To mix these components in a controlled manner such that formulations are repeatable and relatively homogenous in size, detergents or water-miscible organic solvents such as ethanol are used. After formation of electrostatically-associated complexes, the amphipathic detergent or solvent is then removed by dialysis or solvent exchange. Depending on the components and the mixing procedure is possible to formulate lipoplexes that are well less than 100 nm.

[0497] Although the transfection efficiencies of lipoplexes are difficult to predict and optimization is empirical, there are a few design features identified to aid transfection efficiency in vivo: pH-sensitive cationic lipids, the use of unsaturation in the lipid chains and the hydrophobic-hydrophilic balance of PEG-lipids to balance circulation times and transfection efficiencies.

[0498] There is a correlation between the pKa of the amine groups of the cationic lipid, which is buffer in the range of the endosomal/lysosomal pathway (pH 4-7), and transfection ability. To synthesize lipids with such pKa values, lipids commonly have closely-spaced amines or imidazole groups. The effect of these weakly basic amine groups in the lipoplexes produces several attractive attributes that facilitate in vivo transfection: reduced surface charge at neutral pH thereby decreasing nonspecific interactions in vivo, increased surface charge in acid environment of endosomes and lysosomes thereby increasing electrostatic interactions with the cellular membrane in these compartments and providing buffering groups that can provide endosomolytic activity via the proton sponge mechanism.

[0499] Another common motif observed in cationic and helper lipids used in lipoplexes is the presence of unsaturation in their component fatty acids with oleic (18 carbon chain with one double bond) and linoleic (18 carbons with 2 double bonds) being very common. The incorporation of these groups increases fluidity of membranes, aids in the formation of fusogenic lipid structures and facilitates the release of cationic lipids from nucleic acids.

[0500] PEG-conjugated lipids are incorporated into lipoplexes to aid in the formation of nonaggregating small complexes and for the prevention of nonspecific interactions in vivo. Due to the hydrophilicity of PEG, their lipid conjugates are not permanently associated with lipoplexes and diffuse from the complexes with dilution and interaction with amphiphilic components in vivo. This loss of PEG shielding from the surface of the lipoplexes aids in transfection efficiency. In general, longer saturated fatty acid chains increase circulation while unsaturation and shorter chains decrease circulation.

[0501] A commonly invoked tumor targeting mechanism is the Enhanced Permeability and Retention (EPR) effect, which is when nanoparticles accumulate in tumor tissue much more than they do in normal tissues due to the leaky disorganized vasculature associated with tumor tissues and their lack of lymphatic drainage. EPR-based targeting requires long circulating particles.

### Polymer Based Delivery Vehicles

[0502] Like lipoplexes, polymer-based transfection vehicles (polyplexes) provide nuclease protection and condensation of larger nucleic acids. Polyplexes are based upon cationic polymers that form electrostatic complexes with anionic nucleic acids. Polycations may be purely synthetic (such as polyethyleneimine), naturally occurring (such as histones, protamine, spermine and spermidine) or synthetic polymers based upon cationic amino acids such as ornithine, lysine and arginine.

[0503] Polycations form electrostatic complexes with polyanionic nucleic acids. The strength of the association is dependent upon the size of the nucleic acid and the size and charge density of the polycation.

[0504] There are three common strategies to improve the stability and surface charge of polyplexes to improve the circulation and targeting of ability of polyplexes: crosslinking of polycation, addition of a synthetic polyanion and conjugation of PEG.

[0505] Crosslinking, also called lateral stabilization and caging, is the formation of covalent polyamine-polyamine bonds after complexation/condensation of the nucleic acid. The crosslinking is accomplished by the addition of bifunctional, amine-reactive reagents that form a 3-D network of bonds around the nucleic acid, thereby making the polyplex resistant to displacement by salts and polyelectrolytes. The stability of the polyplexes is such that the nucleic acid is no longer active unless a mechanism of reversibility is introduced to allow for release of the nucleic acid. A common way to introduce reversibility is the use of disulfide-containing crosslinking reagent that can be reduced in the cytoplasm allowing release of nucleic acid therapeutic.

[0506] A common method to reduce the surface charge of a polyplex is the conjugation of PEG, a method commonly known as steric stabilization. The resulting PEG modified polyplexes have prolonged circulation in vivo. PEG modifications can be added to the size chains of polyamines-either before or after polyplex formation- or at the end of the polymer as a block copolymer of PEG and polycation.

[0507] Crosslinking and PEGylation are often combined to make stabilized polyplexes of reduced surface charge for systemic administration that can either be passively or actively targeted. As observed for lipoplexes, a variety of small molecule (such as GalNAc, RGD and folate) and biologic targeting ligands (such as transferrin and antibodies) may be conjugated to PEG-modified polyplexes for tissues selective targeting.

[0508] The most commonly used polymer for polyplexes—and the originator of the proton sponge mechanism—is polyethylenimine (PEI). PEI's high density of amine groups endows it with high charge density and a continuum of amine pKa's that buffer in the entire pH range of the endosome. The buffering capacity of PEI may be mimicked by the addition of weakly basic imidazole groups.

[0509] Oligonucleotide vehicle formulation. The solution conditions in which the oligonucleotide is dissolved, or its delivery vehicle is dispersed may play a role in its delivery. Hypotonic and hypertonic solution conditions may aid in cytoplasmic delivery for systemic and locally administration.

### Methods and Routes for Administration

[0510] In embodiments disclosed herein, the accumulation and/or expression of ANGPTL7 may be suppressed or inhibited by at least 10%. In embodiments disclosed herein, the ocular tissue cell is conjunctiva, sclera, trabecular meshwork (TM) or cornea. In certain embodiments, the ocular tissue is TM, such as human TM. In certain embodiments, the TM cell that is the subject may be located in vivo in a mammal.

[0511] Embodiments disclosed herein also provide a method of treating glaucoma in a patient in need thereof comprising administering to the patient an oligonucleotide in an amount sufficient to suppress accumulation of ANGPTL7 in an ocular tissue cell, wherein the RNA is a double-stranded molecule with a first strand of RNA that is a ribonucleotide sequence that corresponds to a nucleotide sequence encoding ANGPTL7 and a second strand of RNA that is a ribonucleotide sequence that is complementary to the nucleotide sequence encoding ANGPTL7, wherein the first and the second ribonucleotide strands are complementary strands that hybridize to each other to form the double-stranded molecule, and wherein the double-stranded molecule suppresses accumulation of ANGPTL7 in the ocular tissue cell. In certain embodiments, the ocular tissue cell may be conjunctiva, sclera, trabecular meshwork (TM) or cornea. In certain embodiments, the glaucoma is an open-angle glaucoma. In certain embodiments, the expression of ANGPTL7 or certain ANGPTL7 transcripts are inhibited by at least 10%.

[0512] Embodiments disclosed herein provide a method of making and identifying an isolated ANGPTL7-specific RNA that inhibits or modulates ANGPTL7 expression in a cell involving (a) generating an RNA that is a double-stranded molecule with a first strand of RNA that is a ribonucleotide sequence that corresponds to a nucleotide sequence encoding ANGPTL7 and a second strand of RNA that is a ribonucleotide sequence that is complementary to the nucleotide sequence encoding ANGPTL7, wherein the first and the second ribonucleotide strands are complementary strands that hybridize to each other to form the double-stranded molecule, and wherein the double-stranded molecule suppresses or modulates accumulation of ANGPTL7 or certain ANPTL7 transcripts in an ocular tissue cell; and (b) screening the RNA to determine whether the RNA inhibits or modulates ANGPTL7 expression in a cell. In certain embodiments, the ocular tissue cell is conjunctiva, sclera, trabecular meshwork (TM) or cornea. The ANGPTL7 transcripts may be inhibited or modulated by at least 10%, or may be inhibited or modulated by at least 50%, or may be inhibited or modulated by at least 80%. In certain embodiments, the RNA is introduced by topical administration.

[0513] Conditions mediated by ANGPTL7 activity include, but are not limited to glaucoma (including, for example, primary open-angle glaucoma, primary angle-closure glaucoma, normal-tension glaucoma, pigmentary glaucoma, exfoliation glaucoma, juvenile glaucoma, congenital glaucoma, inflammatory glaucoma, phacogenic glaucoma, glaucoma secondary to intraocular hemorrhage, traumatic glaucoma, neovascular glaucoma, drug-induced glaucoma, toxic glaucoma and absolute glaucoma), ocular hypertension, obesity, cancer, nevus sebaceous of Jadassohn, hepatitis C infection, osteoarthritis, keratoconus, fibrosis, hypoxia, abnormalities of lipid metabolism, oculocutaneous albinism, scleroderma, polymyositis, Crohn's disease, psoriasis, or rosacea. In some embodiments, the condition mediated by ANGPTL7 activity is an ocular condition. Ocular conditions include, but are not limited to, retinal artery occlusion, eyelid disease, panophthalmitis, ocular toxoplasmosis, angioid streaks, genetic eye tumor, retrobulbar hemorrhage, lacrimal gland adenoid cystic carcinoma, exfoliation syndrome, pharyngoconjunctival fever, takayasu arteritis, dry eye syndrome, macular holes, retinal vein occlusion, pterygium, vitreous body disease, ocular hypertension, retinopathy, cataract, ocular onchocerciasis, eye neoplasm, keratoconjunctivitis sicca, congenital nystagmus, genetic eye diseases, orbital myositis, glaucoma, optic neuritis, mixed cell uveal melanoma, uveitis, ocular tuberculosis, age-related macular degeneration, optic papillitis, eyelid neoplasm, ocular posterior capsular rupture, eye hemorrhage, eye injuries, ocular motility disease, corneal disease, acute retinal necrosis syndrome, eye infection, cycloplegia, microphthalmia, anterior uveitis, retinal drusen, diabetic eye disease, ocular foreign bodies, myopic macular degeneration, eye allergy, iritis, aniseikonia, retinal vasculitis, opsoclonus-myoclonus syndrome, ocular vascular disease, graves ophthalmopathy, lens disease, Sjogren syndrome, macular degeneration, or cytomegalovirus retinitis.

### Routes of Delivery

[0514] A composition that includes a dsRNA agent can be delivered to a subject by a variety of routes. Exemplary routes include: intravenous, subcutaneous, topical, rectal, anal, vaginal, nasal, endotracheally, inhalation, pulmonary, ocular.

[0515] In one embodiment, a patient is prophylactically or therapeutically administered an agent that reduces or modulates the expression of ANGPTL7. The inventive method may prevent or delay an increase in intraocular pressure, may reduce associated nerve loss, may confer protection on retinal sensory cells, etc. Administration may be by any ocular route. One example is topical application, with the ANGPTL7 reducing agent administered in a formulation of eye drops, cream, ointment, gel, salve, etc. Another example is intraocular injection with the ANGPTL7 reducing agent administered subconjunctivally, intravitreally, retrobulbarly, within the crystalline lens via piercing the lens capsule. Another example provides the ANGPTL7 reducing or modulating agent to the eye on or in a formulation such as a liposome, microsphere, microcapsule, biocompatible matrix, gel, polymer, nanoparticle, nanocapsule, etc. Another example provides the ANGPTL7 reducing or modulating agent on or in a device such as a device for transscleral delivery, or another intraocular device using, for example, iontophoresis or another type of release mechanism (controlled or not controlled), as known by one skilled in the art. Another example provides the ANGPTL7 reducing or modulating agent in conjunction with gene therapy, as known by one skilled in the art.

[0516] The dsRNA agent can be incorporated into pharmaceutical compositions suitable for administration. Such compositions typically include one or more species of dsRNA agent and a pharmaceutically acceptable carrier. As used herein the language “pharmaceutically acceptable carrier” is intended to include any and all solvents, dispersion media, coatings, antibacterial and antifungal agents, isotonic and absorption delaying agents, and the like, compatible with pharmaceutical administration. The use of such media and agents for pharmaceutically active substances is well known in the art. Except insofar as any conventional media or agent is incompatible with the active compound, use thereof in the compositions is contemplated. Supplementary active compounds can also be incorporated into the compositions.

[0517] In embodiments, the pharmaceutical compositions described herein can be formulated for oral, parental, intramuscular, transdermal, intravenous, inter-arterial, nasal, vaginal, sublingual, and subungual. Further, the route also includes, but is not limited to auricular, buccal, conjunctival, cutaneous, dental, electro-osmosis, endocervical, endosinusial, endotracheal, enteral, epidural, extra-amniotic, extracorporeal, hemodialysis, infiltration, interstitial, intra-abdominal, intra-amniotic, intra-arterial, intra-articular, intrabiliary, intrachronchial, intrabursal, intracardiac, intracartilagenous, intracaudal, mtracavernous, intracavitary, intracerebral, intraci sternal, intracorneal, intracoronary, intracorporus cavernosum, intradermal, intradiscal, intraducatal, intraduodenal, intradural, intraepidermal, mtraesophageal, intragastric, intragingival, intraileal, intralesional, intralumical, intralymphatic, intramedullary, intrameningeal, intraocular, intraovarian, mtrapericardial, intraperitoneal, intrapleural, intrapulmonary, intrasinal, intrasynovial, intratendinous, intratesticular, intrathecal, intrathoracic, intratubular, intratumor, intratympanic, intrauterine, intravascular, intravenous bolus, intravenous drip, intraventricular, intravesical, intravitreal, iontophoresis, irrigation, laryngeal, nasal, nasogastric, occlusive dressing technique, ophthalmic, oropharyngeal, percutaneous, periarticular, peridural, periodontal, rectal, respirator}-, retrobulbar, soft tissue, subarachnoid, subconjunctival, subcutaneous, submucosal, topical, transmucosal, transplacental, transtracheal, transtympanic, ureteral, or urethal. In particular embodiments, the pharmaceutical compositions are formulated for intraocular administration, e.g., intravitreal, or topical. In some embodiments, the composition is formulated for intravitreal administration, e.g., intravitreal injection.

[0518] The route and site of administration may be chosen to enhance targeting. For example, to target muscle cells, intramuscular injection into the muscles of interest would be a logical choice. Lung cells might be targeted by administering the dsRNA agent in aerosol form.

[0519] Exemplary formulations for topical administration include those in which the dsRNAs are in admixture with a topical delivery agent such as lipids, liposomes, fatty acids, fatty acid esters, steroids, chelating agents and surfactants. Exemplary lipids and liposomes include neutral (e.g. dioleoyl-phosphatidyl DOPE etlianolaniine, dimyristoylphosphatidyl choline DMPC, distearolyphosphatidyl choline) negative (e.g. dimyristoylphosphatidyl glycerol DMPG) and cationic (e.g. dioleoyltetramemylaminopropyl DOTAP and dioleoyl-phosphatidyl ethanolamine DOTMA).

[0520] For topical or other administration, dsRNAs may be encapsulated within liposomes or may form complexes thereto, in particular to cationic liposomes. In some cases, dsRNAs may be complexed to lipids, in particular to cationic lipids.

[0521] A topical formulation may be administered by any ophthalmological vehicle, as known to one skilled in the art. Examples include, but are not limited to, eye droppers, satchels, applicators, etc. The amount and concentration of the formulation may depend upon the diluent, delivery system or device selected, clinical condition of the patient, side effects expected, stability of the compounds of the composition, presence and severity of other pathology, dosing frequency, active agent, etc.

[0522] Compositions and formulations for oral administration include powders or granules, microparticulates, nanoparticulates, suspensions or solutions in water or non-aqueous media, capsules, gel capsules, sachets, tablets or minitablets. Thickeners, flavoring agents, diluents, emulsifiers, dispersing aids or binders may be desirable. Exemplary surfactants include fatty acids and or esters or salts thereof, bile acids and/or salts thereof. In some cases, penetration enhancers, for example, fatty acids salts are combined with bile acids salts. An exemplary combination is the sodium salt of lauric acid, capric acid and UDCA. Further penetration enhancers include polyoxyethylene-9-lauryl ether and polyoxyethylene-20-cetyl ether. Oligonucleotides may be delivered orally, in granular form including sprayed dried particles, or complexed to form micro or nanoparticles.

[0523] Compositions and formulations for pulmonary administration may include sterile aqueous solutions that may also contain buffers, diluents and other suitable additives such as, but not limited to, penetration enhancers, carrier compounds and other pharmaceutically acceptable carriers or excipients.

### Dosage

[0524] In one aspect, provided is a method of administering a dsRNA agent to a subject (e.g., a human subject). The method includes administering a unit dose of the dsRNA agent that is 14-30 nucleotides (nt) long, for example, 21-23 nt, and is complementary to a target RNA (e.g., ANGPTL7), and optionally includes at least one 3′ overhang 1-5 nucleotide long.

[0525] For topical administration, examples of concentrations that may be used include but are not limited to, less than 1 μg/mL, 1 g/mL to 5 g/mL, 5 g/mL to 10 g/mL, 10 g/mL to 50 g/mL, 50 g/mL to 100 g/mL, 100 g/mL to 0.5 mg/mL, 0.5 mg/mL to 2.5 mg/mL, 1 mg/mL to 5 mg/mL, 5 mg/mL to 10 mg/mL, 10 mg/mL to 15 mg/mL, 15 mg/mL to 30 mg/mL, and greater than 30 mg/mL. For topical administration, examples of dosing regimens that may be used include but are not limited to, hourly, half-daily, daily, weekly, biweekly, monthly, quarterly, three times a year, twice a year, yearly, every two years, every three years, etc. Intervals between doses may be regular or varied. As one example, doses may be administered hourly or daily pre- and post-surgery for one week, for several weeks, or for several months, then may be administered twice a year or once a year until the desired reduction in intraocular pressure is achieved. As another example, doses may be administered daily or weekly pre- and/or post-surgery for one week, for several weeks, for several months, or for several years until the desired reduction in intraocular pressure achieved.

[0526] The defined amount can be an amount effective to treat or prevent a disease or disorder, e.g., a disease or disorder associated with the target RNA. The unit dose, for example, can be administered by injection (e.g., intravenous, subcutaneous or intramuscular), an inhaled dose, or a topical application. In some embodiments, dosages may be less than 10, 5, 2, 1, or 0.1 mg/kg of body weight.

[0527] In some embodiments, the unit dose is administered less frequently than once a day, e.g., less than every 2, 4, 8 or 30 days. In some embodiments, the unit dose is not administered with a frequency {e.g., not a regular frequency). For example, the unit dose may be administered a single time.

[0528] In some embodiments, the effective dose is administered with other traditional therapeutic modalities. For example, a therapeutic agent useful for treating a disease or disorder affecting the eye.

[0529] In some embodiments, a subject is administered an initial dose and one or more maintenance doses of a dsRNA agent. The maintenance dose or doses can be the same or lower than the initial dose, e.g., one-half less of the initial dose. A maintenance regimen can include treating the subject with a dose or doses ranging from 0.01 g to 15 mg/kg of body weight per day, e.g., 10, 1, 0.1, 0.01, 0.001, or 0.00001 mg per kg of bodyweight per day. The maintenance doses are, for example, administered no more than once every 2, 5, 10, or 30 days. Further, the treatment regimen may last for a period of time which will vary depending upon the nature of the particular disease, its severity and the overall condition of the patient. In certain embodiments the dosage may be delivered no more than once per day, e.g., no more than once per 24, 36, 48, or more hours, e.g., no more than once for every 5 or 8 days.

[0530] Following treatment, the patient can be monitored for changes in his condition and for alleviation of the symptoms of the disease state. The dosage of the compound may either be increased in the event the patient does not respond significantly to current dosage levels, or the dose may be decreased if an alleviation of the symptoms of the disease state is observed, if the disease state is ablated, or if undesired side-effects are observed. The effective dose can be administered in a single dose or in two or more doses, as desired or considered appropriate under the specific circumstances. If desired to facilitate repeated or frequent infusions, implantation of a delivery device, e.g., a pump, semi-permanent stent (e.g., intravenous, intraperitoneal, intracisternal or intracapsular), or reservoir may be advisable.

[0531] The dsRNA agents can be administered to mammals, particularly large mammals such as nonhuman primates or humans in a number of ways.

[0532] In some embodiments, the administration of the dsRNA agent is parenteral, e.g., intravenous (e.g., as a bolus or as a diffusible infusion), intradermal, intraperitoneal, intramuscular, intrathecal, intraventricular, intracranial, subcutaneous, transmucosal, buccal, sublingual, endoscopic, rectal, oral, vaginal, topical, inhalation, pulmonary, intranasal, urethral or ocular. Administration can be provided by the subject or by another person, e.g., a health care provider. The medication can be provided in measured doses or in a dispenser which delivers a metered dose. Selected modes of delivery are discussed elsewhere herein.

### Methods and Uses

[0533] Disclosed herein, in some embodiments, are methods of administering a composition described herein to a subject. Some embodiments relate to use a composition described herein, such as administering the composition to a subject. In some embodiments, the administration comprises an injection.

[0534] Some embodiments relate to a method of treating a disorder in a subject in need thereof. Some embodiments relate to use of a composition described herein in the method of treatment. Some embodiments include administering a composition described herein to a subject with the disorder. In some embodiments, the administration treats the disorder in the subject. In some embodiments, the composition treats the disorder in the subject.

[0535] In some embodiments, the treatment comprises prevention, inhibition, or reversion of the disorder in the subject. Some embodiments relate to use of a composition described herein in the method of preventing, inhibiting, or reversing the disorder. Some embodiments relate to a method of preventing, inhibiting, or reversing a disorder a disorder in a subject in need thereof. Some embodiments include administering a composition described herein to a subject with the disorder. In some embodiments, the administration prevents, inhibits, or reverses the disorder in the subject. In some embodiments, the composition prevents, inhibits, or reverses the disorder in the subject.

[0536] Some embodiments relate to a method of preventing a disorder a disorder in a subject in need thereof. Some embodiments relate to use of a composition described herein in the method of preventing the disorder. Some embodiments include administering a composition described herein to a subject with the disorder. In some embodiments, the administration prevents the disorder in the subject. In some embodiments, the composition prevents the disorder in the subject.

[0537] Some embodiments relate to a method of inhibiting a disorder a disorder in a subject in need thereof. Some embodiments relate to use of a composition described herein in the method of inhibiting the disorder. Some embodiments include administering a composition described herein to a subject with the disorder. In some embodiments, the administration inhibits the disorder in the subject. In some embodiments, the composition inhibits the disorder in the subject.

[0538] Some embodiments relate to a method of reversing a disorder a disorder in a subject in need thereof. Some embodiments relate to use of a composition described herein in the method of reversing the disorder. Some embodiments include administering a composition described herein to a subject with the disorder. In some embodiments, the administration reverses the disorder in the subject. In some embodiments, the composition reverses the disorder in the subject.

[0539] In some embodiments, the administration comprises an injection. In some embodiments, the administration is to an eye. In some embodiments, the administration is intravenous. In some embodiments, the injection is subcutaneous. In some embodiments, the injection is subcutaneous. In some embodiments, the injection is intraperitoneal. In some embodiments, the injection is intramuscular. The administration may be to an eye (e.g. intravitreal).

[0540] Disclosed herein, in some embodiments, are methods of treating an ocular disorder in a subject in need thereof, comprising administering to the subject a composition comprising an oligonucleotide that targets Angiopoietin like 7 (ANGPTL7) and when administered to a cell decreases expression of ANGPTL7, wherein the oligonucleotide comprises a small interfering RNA (siRNA) comprising a sense strand and an antisense strand in which at least one internucleoside linkage is modified and at least one nucleoside is modified.

[0541] Disclosed herein, in some embodiments, are methods of treating an ocular disorder in a subject in need thereof, comprising administering to the subject a composition comprising an oligonucleotide that targets Angiopoietin like 7 (ANGPTL7) and when administered to a cell decreases expression of ANGPTL7, wherein the oligonucleotide comprises a small interfering RNA (siRNA) comprising a sense strand and an antisense strand, wherein the sense strand comprises an oligonucleotide sequence of SEQ ID NOs: 1424, 1765, or 1796 in which at least one internucleoside linkage is modified and at least one nucleoside is modified, or an oligonucleotide sequence comprising 1 or 2 nucleoside substitutions, additions, or deletions of SEQ ID NOs: 1424, 1765, or 1796 in which at least one internucleoside linkage is modified and at least one nucleoside is modified, and wherein the antisense strand comprises an oligonucleotide sequence of SEQ ID NOs: 3630, 3971, or 4002 in which at least one internucleoside linkage is modified and at least one nucleoside is modified, or an oligonucleotide sequence comprising 1 or 2 nucleoside substitutions, additions, or deletions of SEQ ID NOs: 3630, 3971, or 4002 in which at least one internucleoside linkage is modified and at least one nucleoside is modified

### Disorders

[0542] Some embodiments of the methods described herein include treating a disorder in a subject in need thereof. In some embodiments, the disorder is or includes a disorder with high ANGPTL7 expression. In some embodiments, the disorder is an eye disorder. In some embodiments, the disorder comprises a disorder associated with high intraocular pressure. In some embodiments, the disorder is glaucoma. In some embodiments, the glaucoma is a glaucoma subtype. In some embodiments, the glaucoma subtype is non-specific glaucoma. In some embodiments, the glaucoma subtype is primary open angle glaucoma (POAG). In some embodiments, the glaucoma subtype is primary angle closure glaucoma (PACG). In some embodiments, the glaucoma includes a glaucoma symptom. In some embodiments, the glaucoma symptom includes an intraocular pressure measurement. In some embodiments, the glaucoma symptom includes need for a glaucoma surgery. In some embodiments, the glaucoma symptom includes need for a glaucoma medication.

### Subjects

[0543] Some embodiments of the methods described herein include treatment of a subject. Examples of subjects include vertebrates, animals, mammals, dogs, cats, cattle, rodents, mice, rats, primates, monkeys, and humans. In some embodiments, the subject is a vertebrate. In some embodiments, the subject is an animal. In some embodiments, the subject is a mammal. In some embodiments, the subject is a dog. In some embodiments, the subject is a cat. In some embodiments, the subject is cattle. In some embodiments, the subject is a mouse. In some embodiments, the subject is a rat. In some embodiments, the subject is a primate. In some embodiments, the subject is a monkey. In some embodiments, the subject is an animal, a mammal, a dog, a cat, cattle, a rodent, a mouse, a rat, a primate, or a monkey. In some embodiments, the subject is a human.

[0544] The subject may have high intraocular pressure. For example, the subject may have an intraocular pressure that is higher than in a control subject such as normal healthy subject. The high intraocular pressure may include an increased intraocular pressure relative to a previous intraocular pressure in the same subject. The high intraocular pressure may be above 20 mmHg.

### Baseline Measurements

[0545] Some embodiments of the methods described herein include obtaining a baseline measurement from a subject. For example, in some embodiments, a baseline measurement is obtained from the subject prior to treating the subject. In some embodiments, the baseline measurement comprises a baseline pressure measurement. In some embodiments, the baseline measurement is a baseline intraocular pressure measurement. In some embodiments, the baseline measurement is incidence of glaucoma. In some embodiments, the baseline measurement is incidence of a glaucoma subtype. In some embodiments, the baseline measurement is incidence of a glaucoma symptom.

[0546] In some embodiments, the baseline measurement is obtained by performing an assay such as an immunoassay, a colorimetric assay, or a fluorescence assay, on the sample obtained from the subject. In some embodiments, the baseline measurement is obtained by an immunoassay, a colorimetric assay, or a fluorescence assay. In some embodiments, the baseline measurement is obtained by PCR.

[0547] In some embodiments, the baseline measurement is a baseline ANGPTL7 protein measurement. In some embodiments, the baseline ANGPTL7 protein measurement comprises a baseline ANGPTL7 protein level. In some embodiments, the baseline ANGPTL7 protein level is indicated as a mass or percentage of ANGPTL7 protein per sample weight. In some embodiments, the baseline ANGPTL7 protein level is indicated as a mass or percentage of ANGPTL7 protein per sample volume. In some embodiments, the baseline ANGPTL7 protein level is indicated as a mass or percentage of ANGPTL7 protein per total protein within the sample. In some embodiments, the baseline ANGPTL7 protein measurement is a baseline circulating ANGPTL7 protein measurement. In some embodiments, the baseline ANGPTL7 protein measurement is obtained by an assay such as an immunoassay, a colorimetric assay, or a fluorescence assay.

[0548] In some embodiments, the baseline measurement is a baseline ANGPTL7 mRNA measurement. In some embodiments, the baseline ANGPTL7 mRNA measurement comprises a baseline ANGPTL7 mRNA level. In some embodiments, the baseline ANGPTL7 mRNA level is indicated as a mass or percentage of ANGPTL7 mRNA per sample weight. In some embodiments, the baseline ANGPTL7 mRNA level is indicated as a mass or percentage of ANGPTL7 mRNA per sample volume. In some embodiments, the baseline ANGPTL7 mRNA level is indicated as a mass or percentage of ANGPTL7 mRNA per total mRNA within the sample. In some embodiments, the baseline ANGPTL7 mRNA level is indicated as a mass or percentage of ANGPTL7 mRNA per total nucleic acids within the sample. In some embodiments, the baseline ANGPTL7 mRNA level is indicated relative to another mRNA level, such as an mRNA level of a housekeeping gene, within the sample. In some embodiments, the baseline ANGPTL7 mRNA measurement is obtained by an assay such as a polymerase chain reaction (PCR) assay. In some embodiments, the PCR comprises quantitative PCR (qPCR). In some embodiments, the PCR comprises reverse transcription of the ANGPTL7 mRNA.

[0549] Some embodiments of the methods described herein include obtaining a sample from a subject. In some embodiments, the baseline measurement is obtained in a sample obtained from the subject. In some embodiments, the sample is obtained from the subject prior to administration or treatment of the subject with a composition described herein. In some embodiments, a baseline measurement is obtained in a sample obtained from the subject prior to administering the composition to the subject. In some embodiments, the sample comprises ocular or eye tissue.

[0550] In some embodiments, the sample comprises a fluid. In some embodiments, the sample is a fluid sample. In some embodiments, the sample is a blood, plasma, or serum sample. In some embodiments, the fluid comprises an eye fluid. In some embodiments, the fluid comprises an intraocular fluid.

[0551] In some embodiments, the baseline measurement is obtained noninvasively. In some embodiments, the baseline measurement is obtained directly from the subject.

### Effects

[0552] In some embodiments, the composition or administration of the composition affects a measurement such as a pressure measurement, an intraocular pressure measurement, incidence of glaucoma, incidence of a glaucoma subtype, or incidence of a glaucoma symptom, relative to the baseline measurement. In some embodiments, the measurement is an intraocular pressure measurement.

[0553] Some embodiments of the methods described herein include obtaining the measurement from a subject. For example, the measurement may be obtained from the subject after treating the subject. In some embodiments, the measurement is obtained in a second sample (such as a fluid or tissue sample described herein) obtained from the subject after the composition is administered to the subject. In some embodiments, the measurement is an indication that the disorder has been treated.

[0554] In some embodiments, the measurement is obtained by an assay as described herein. For example, the assay may comprise an immunoassay, a colorimetric assay, a fluorescence assay, or a PCR assay.

[0555] In some embodiments, the measurement is obtained within 1 week, within 2 weeks, within 3 weeks, within 1 month, within 2 months, within 3 months, within 6 months, within 1 year, within 2 years, within 3 years, within 4 years, or within 5 years after the administration of the composition. In some embodiments, the measurement is obtained after 1 week, after 2 weeks, after 3 weeks, after 1 month, after 2 months, after 3 months, after 6 months, after 1 year, after 2 years, after 3 years, after 4 years, or after 5 years, following the administration of the composition.

[0556] In some embodiments, the composition reduces the measurement relative to the baseline measurement. In some embodiments, the reduction is measured in a second tissue sample obtained from the subject after administering the composition to the subject. In some embodiments, the reduction is measured directly in the subject after administering the composition to the subject. In some embodiments, the measurement is decreased by about 2.5% or more, about 5% or more, or about 7.5% or more, relative to the baseline measurement. In some embodiments, the measurement is decreased by about 10% or more, relative to the baseline measurement. In some embodiments, the measurement is decreased by about 20% or more, about 30% or more, about 40% or more, about 50% or more, about 60% or more, about 70% or more, about 80% or more, about 90% or more, relative to the baseline measurement. In some embodiments, the measurement is decreased by no more than about 2.5%, no more than about 5%, or no more than about 7.5%, relative to the baseline measurement. In some embodiments, the measurement is decreased by no more than about 10%, relative to the baseline measurement. In some embodiments, the measurement is decreased by no more than about 20%, no more than about 30%, no more than about 40%, no more than about 50%, no more than about 60%, no more than about 70%, no more than about 80%, no more than about 90%, or no more than about 100% relative to the baseline measurement. In some embodiments, the measurement is decreased by 2.5%, 5%, 7.5%, 10%, 20%, 30%, 40%, 50%, 60%, 70%, 80%, 90%, or 100%, or by a range defined by any of the two aforementioned percentages.

[0557] In some embodiments, the measurement is an ANGPTL7 protein measurement. In some embodiments, the ANGPTL7 protein measurement comprises an ANGPTL7 protein level. In some embodiments, the ANGPTL7 protein level is indicated as a mass or percentage of ANGPTL7 protein per sample weight. In some embodiments, the ANGPTL7 protein level is indicated as a mass or percentage of ANGPTL7 protein per sample volume. In some embodiments, the ANGPTL7 protein level is indicated as a mass or percentage of ANGPTL7 protein per total protein within the sample. In some embodiments, the ANGPTL7 protein measurement is a circulating ANGPTL7 protein measurement. In some embodiments, the baseline ANGPTL7 protein measurement is obtained by an assay such as an immunoassay, a colorimetric assay, or a fluorescence assay.

[0558] In some embodiments, the composition reduces the ANGPTL7 protein measurement relative to the baseline ANGPTL7 protein measurement. In some embodiments, the composition reduces circulating ANGPTL7 protein levels relative to the baseline ANGPTL7 protein measurement. In some embodiments, the composition reduces tissue ANGPTL7 protein levels (such as ocular ANGPTL7 protein levels) relative to the baseline ANGPTL7 protein measurement. In some embodiments, the reduced ANGPTL7 protein levels are measured in a second sample obtained from the subject after administering the composition to the subject.

[0559] In some embodiments, the ANGPTL7 protein measurement is decreased by about 2.5% or more, about 5% or more, or about 7.5% or more, relative to the baseline ANGPTL7 protein measurement. In some embodiments, the ANGPTL7 protein measurement is decreased by about 10% or more, relative to the baseline ANGPTL7 protein measurement. In some embodiments, the ANGPTL7 protein measurement is decreased by about 20% or more, about 30% or more, about 40% or more, about 50% or more, about 60% or more, about 70% or more, about 80% or more, about 90% or more, or about 100% or more relative to the baseline ANGPTL7 protein measurement. In some embodiments, the ANGPTL7 protein measurement is decreased by no more than about 2.5%, no more than about 5%, or no more than about 7.5%, relative to the baseline ANGPTL7 protein measurement. In some embodiments, the ANGPTL7 protein measurement is decreased by no more than about 10%, relative to the baseline ANGPTL7 protein measurement. In some embodiments, the ANGPTL7 protein measurement is decreased by no more than about 20%, no more than about 30%, no more than about 40%, no more than about 50%, no more than about 60%, no more than about 70%, no more than about 80%, no more than about 90%, or no more than about 100% relative to the baseline ANGPTL7 protein measurement. In some embodiments, the ANGPTL7 protein measurement is decreased by 2.5%, 5%, 7.5%, 10%, 20%, 30%, 40%, 50%, 60%, 70%, 80%, 90%, 100%, or by a range defined by any of the two aforementioned percentages.

[0560] In some embodiments, the measurement is an ANGPTL7 mRNA measurement. In some embodiments, the ANGPTL7 mRNA measurement comprises an ANGPTL7 mRNA level. In some embodiments, the ANGPTL7 mRNA level is indicated as a mass or percentage of ANGPTL7 mRNA per sample weight. In some embodiments, the ANGPTL7 mRNA level is indicated as a mass or percentage of ANGPTL7 mRNA per sample volume. In some embodiments, the ANGPTL7 mRNA level is indicated as a mass or percentage of ANGPTL7 mRNA per total mRNA within the sample. In some embodiments, the ANGPTL7 mRNA level is indicated as a mass or percentage of ANGPTL7 mRNA per total nucleic acids within the sample. In some embodiments, the ANGPTL7 mRNA level is indicated relative to another mRNA level, such as an mRNA level of a housekeeping gene, within the sample. In some embodiments, the ANGPTL7 mRNA measurement is obtained by an assay such as a PCR assay. In some embodiments, the PCR comprises qPCR. In some embodiments, the PCR comprises reverse transcription of the ANGPTL7 mRNA.

[0561] In some embodiments, the composition reduces the ANGPTL7 mRNA measurement relative to the baseline ANGPTL7 mRNA measurement. In some embodiments, the ANGPTL7 mRNA measurement is obtained in a second sample obtained from the subject after administering the composition to the subject. In some embodiments, the composition reduces ANGPTL7 mRNA levels relative to the baseline ANGPTL7 mRNA levels. In some embodiments, the reduced ANGPTL7 mRNA levels are measured in a second sample obtained from the subject after administering the composition to the subject. In some embodiments, the second sample is an ocular sample.

[0562] In some embodiments, the ANGPTL7 mRNA measurement is reduced by about 2.5% or more, about 5% or more, or about 7.5% or more, relative to the baseline ANGPTL7 mRNA measurement. In some embodiments, the ANGPTL7 mRNA measurement is decreased by about 10% or more, relative to the baseline ANGPTL7 mRNA measurement. In some embodiments, the ANGPTL7 mRNA measurement is decreased by about 20% or more, about 30% or more, about 40% or more, about 50% or more, about 60% or more, about 70% or more, about 80% or more, about 90% or more, or about 100% or more relative to the baseline ANGPTL7 mRNA measurement. In some embodiments, the ANGPTL7 mRNA measurement is decreased by no more than about 2.5%, no more than about 5%, or no more than about 7.5%, relative to the baseline ANGPTL7 mRNA measurement. In some embodiments, the ANGPTL7 mRNA measurement is decreased by no more than about 10%, relative to the baseline ANGPTL7 mRNA measurement. In some embodiments, the ANGPTL7 mRNA measurement is decreased by no more than about 20%, no more than about 30%, no more than about 40%, no more than about 50%, no more than about 60%, no more than about 70%, no more than about 80%, no more than about 90%, or no more than about 100% relative to the baseline ANGPTL7 mRNA measurement. In some embodiments, the ANGPTL7 mRNA measurement is decreased by 2.5%, 5%, 7.5%, 10%, 20%, 30%, 40%, 50%, 60%, 70%, 80%, 90%, 100%, or by a range defined by any of the two aforementioned percentages.

[0563] In some embodiments, the composition reduces the intraocular pressure measurement relative to the baseline intraocular pressure measurement. In some embodiments, the intraocular pressure measurement is reduced by about 2.5% or more, about 5% or more, or about 7.5% or more, relative to the baseline intraocular pressure measurement. In some embodiments, the intraocular pressure measurement is decreased by about 10% or more, relative to the baseline intraocular pressure measurement. In some embodiments, the intraocular pressure measurement is decreased by about 20% or more, about 30% or more, about 40% or more, about 50% or more, about 60% or more, about 70% or more, about 80% or more, about 90% or more, or about 100% or more relative to the baseline intraocular pressure measurement. In some embodiments, the intraocular pressure measurement is decreased by no more than about 2.5%, no more than about 5%, or no more than about 7.5%, relative to the baseline intraocular pressure measurement. In some embodiments, the intraocular pressure measurement is decreased by no more than about 10%, relative to the baseline intraocular pressure measurement. In some embodiments, the intraocular pressure measurement is decreased by no more than about 20%, no more than about 30%, no more than about 40%, no more than about 50%, no more than about 60%, no more than about 70%, no more than about 80%, no more than about 90%, or no more than about 100% relative to the baseline intraocular pressure measurement. In some embodiments, the intraocular pressure measurement is decreased by 2.5%, 5%, 7.5%, 10%, 20%, 30%, 40%, 50%, 60%, 70%, 80%, 90%, 100%, or by a range defined by any of the two aforementioned percentages.

### Methods of Inhibiting or Modulating Expression of the Target Gene

[0564] Embodiments also relate to methods for inhibiting the expression of a target gene. The method comprises the step of administering the dsRNA agents in any of the preceding embodiments, in an amount sufficient to inhibit expression of the target gene. In some embodiments, the target gene is ANGPTL7. Another aspect relates to a method of modulating the expression of a target gene in a cell, comprising providing to said cell a dsRNA agent. In some embodiments, the target gene is ANGPTL7. In some embodiments, the antisense oligonucleotide or dsRNA agent described herein is modified.

[0565] The present disclosure provides in vitro and in vivo methods for treatment of a disease or disorder in a mammal by downregulating or silencing the transcription and/or translation of a target gene or gene transcript of interest. In some embodiments, the method comprises introducing a dsRNA agent that silences expression (e.g., mRNA and/or protein levels) of a target sequence into a cell by contacting the cell with a modified dsRNA agent described herein. In some embodiments, the method comprises in vivo delivery of a dsRNA agent that silences expression of a target sequence by administering to a mammal a modified dsRNA described herein. Administration of the dsRNA can be by any route known in the art, such as, e.g., oral, intranasal, inhalation, intravenous, intraperitoneal, intramuscular, intra-articular, intralesional, intratracheal, endotracheal, subcutaneous, or intradermal. In some cases, delivery is by respiratory tract administration. In some embodiments, the target sequence is ANGPTL7.

[0566] In certain embodiments, the dsRNA agent comprises a carrier system, e.g., to deliver the dsRNA agent into a cell of a mammal. Non-limiting examples of carrier systems include nucleic acid-lipid particles, liposomes, micelles, virosomes, nucleic acid complexes, and mixtures thereof. In certain instances, the dsRNA molecule is complexed with a lipid such as a cationic lipid to form a lipoplex. In certain instances, the dsRNA agent is complexed with a polymer such as a cationic polymer (e.g., polyethylenimine (PEI)) to form a polyplex. The dsRNA agent may also be complexed with cyclodextrin or a polymer thereof. In some embodiments, the dsRNA agent is encapsulated in a nucleic acid-lipid particle.

### Assessing Up-Regulation or Inhibition of Gene or Transcript Expression

[0567] Transfer of an exogenous nucleic acid into a host cell or organism can be assessed by directly detecting the presence of the nucleic acid in the cell or organism. For example, the presence of the exogenous nucleic acid can be detected by Southern blot or by a polymerase chain reaction (PCR) technique using primers that specifically amplify nucleotide sequences associated with the nucleic acid. Expression of the exogenous nucleic acids can also be measured using conventional methods including gene expression analysis. For instance, mRNA produced from an exogenous nucleic acid can be detected and quantified using a northern blot and reverse transcription PCR (RT-PCR).

[0568] Expression of RNA from the exogenous nucleic acid can also be detected by measuring an enzymatic activity or a reporter protein activity. For example, dsRNA modulatory activity can be measured indirectly as a decrease or increase in target nucleic acid expression as an indication that the exogenous nucleic acid is producing the effector RNA. Based on sequence conservation, primers can be designed and used to amplify coding regions of the target genes. Initially, the most highly expressed coding region from each gene can be used to build a model control gene, although any coding or non-coding region can be used. Each control gene is assembled by inserting each coding region between a reporter coding region and its poly(A) signal. These plasmids would produce an mRNA with a reporter gene in the upstream portion of the gene and a potential RNAi target in the 3′ non-coding region. The effectiveness of individual dsRNA would be assayed by modulation of the reporter gene. Reporter genes include acetohydroxyacid synthase (AHAS), alkaline phosphatase (AP), beta galactosidase (LacZ), beta glucoronidase (GUS), chloramphenicol acetyltransferase (CAT), green fluorescent protein (GFP), red fluorescent protein (RFP), yellow fluorescent protein (YFP), cyan fluorescent protein (CFP), horseradish peroxidase (HRP), luciferase (Lac), nopaline synthase (NOS), octopine synthase (OCS), and derivatives thereof. Multiple selectable markers are available that confer resistance to ampicillin, bleomycin, chloramphenicol, gentamycin, hygromycin, kanamycin, lincomycin, methotrexate, phosphinothricin, puromycin, and tetracycline. Methods to determine modulation of a reporter gene are well known in the art, and include, but are not limited to, fluorometric methods (e.g. fluorescence spectroscopy, Fluorescence Activated Cell Sorting (FACS), fluorescence microscopy), antibiotic resistance determination.

[0569] ANGPTL7 protein and mRNA expression can be assayed using for example, immunoassays such as the ELISA to measure protein levels.

[0570] In some embodiments, ANGPTL7 expression (e.g., mRNA or protein) in a sample (e.g., cells or tissues in vivo or in vitro) treated using a dsRNA agent is evaluated by comparison with ANGPTL7 expression in a control sample. For example, expression of the protein or nucleic acid can be compared using a mock-treated or untreated sample. In some cases, comparison with a sample treated with a control dsRNA agent (e.g., one having an altered or different sequence) can be made depending on the information desired. In some embodiments, a difference in the expression of the ANGPTL7 protein or nucleic acid in a treated vs. an untreated sample can be compared with the difference in expression of a different nucleic acid (including any standard deemed appropriate by the researcher, e.g., a housekeeping gene) in a treated sample vs. an untreated sample.

[0571] Observed differences can be expressed as desired, e.g., in the form of a ratio or fraction, for use in a comparison with control. In embodiments, the level of ANGPTL7 mRNA or protein, in a sample treated with a dsRNA, is increased or decreased by about 1.25-fold to about 10-fold or more relative to an untreated sample or a sample treated with a control nucleic acid. In embodiments, the level of ANGPTL7 mRNA or protein is increased or decreased by at least about 1.25-fold, at least about 1.3-fold, at least about 1.4-fold, at least about 1.5-fold, at least about 1.6-fold, at least about 1.7-fold, at least about 1.8-fold, at least about 2-fold, at least about 2.5-fold, at least about 3-fold, at least about 3.5-fold, at least about 4-fold, at least about 4.5-fold, at least about 5-fold, at least about 5.5-fold, at least about 6-fold, at least about 6.5-fold, at least about 7-fold, at least about 7.5-fold, at least about 8-fold, at least about 8.5-fold, at least about 9-fold, at least about 9.5-fold, or at least about 10-fold or more.

### Kits, Research Reagents, Diagnostics, and Therapeutics

[0572] The compounds disclosed herein can be utilized for diagnostics, therapeutics, and prophylaxis, and as research reagents and components of kits. Furthermore, dsRNA, which inhibit gene expression may be used to elucidate the function of particular genes or to distinguish between functions of various members of a biological pathway.

[0573] For use in kits and diagnostics and in various biological systems, the compounds disclosed herein, either alone or in combination with other compounds or therapeutics, may be useful as tools in differential and/or combinatorial analyses to elucidate expression patterns of a portion or the entire complement of genes expressed within cells and tissues.

[0574] In some embodiments, the term “biological system” or “system” is any organism, cell, cell culture or tissue that expresses, or is made competent to express products of the angiopoietin like 7 (ANGPTL7) genes. These include, but are not limited to, humans, transgenic animals, cells, cell cultures, tissues, xenografts, transplants and combinations thereof.

[0575] As one non-limiting example, expression patterns within cells or tissues treated with one or more dsRNAs are compared to control cells or tissues not treated with dsRNAs and the patterns produced are analyzed for differential levels of gene expression as they pertain, for example, to disease association, signaling pathway, cellular localization, expression level, size, structure or function of the genes examined. These analyses can be performed on stimulated or unstimulated cells and in the presence or absence of other compounds that affect expression patterns.

[0576] Examples of methods of gene expression analysis include DNA arrays or microarrays, SAGE (serial analysis of gene expression), READS (restriction enzyme amplification of digested cDNAs), TOGA (total gene expression analysis), protein arrays and proteomics, expressed sequence tag (EST) sequencing, subtractive RNA fingerprinting (SuRF), subtractive cloning, differential display (DD), comparative genomic hybridization, FISH (fluorescent in situ hybridization) techniques and mass spectrometry methods.

[0577] In some embodiments, the compounds disclosed herein are useful for research and diagnostics, because these compounds hybridize to nucleic acids encoding angiopoietin-like 7 (ANGPTL7). For example, oligonucleotides that hybridize with such efficiency and under such conditions as disclosed herein as to be effective ANGPTL7 modulators are effective primers or probes under conditions favoring gene amplification or detection, respectively. These primers and probes are useful in methods requiring the specific detection of nucleic acid molecules encoding ANGPTL7 and in the amplification of said nucleic acid molecules for detection or for use in further studies of ANGPTL7. Hybridization of the antisense oligonucleotides, particularly the primers and probes, with a nucleic acid encoding ANGPTL7 can be detected, e.g., by conjugation of an enzyme to the oligonucleotide, radiolabeling of the oligonucleotide, or any other suitable detection means. Kits using such detection means for detecting the level of ANGPTL7 in a sample may also be prepared.

[0578] The specificity and sensitivity of sRNA are also harnessed for therapeutic uses. For therapeutics, an animal, e.g., a human, suspected of having a disease or disorder which can be treated by modulating the expression of ANGPTL7 polynucleotides is treated by administering oligonucleotide compounds disclosed herein. For example, in one non-limiting embodiment, the methods comprise the step of administering to the animal in need of treatment, a therapeutically effective amount of ANGPTL7 modulator. The ANGPTL7 modulators disclosed herein effectively modulate the activity of the ANGPTL7 or modulate the expression of the ANGPTL7 protein. In some embodiments, the activity or expression of ANGPTL7 in an animal is inhibited or modulated by about 10% as compared to a control. The control may be an oligonucleotide that does not specifically hybridize to ANGPTL7. In some cases, the activity or expression of ANGPTL7 in an animal is inhibited or modulated by about 30%. In some cases, the activity or expression of ANGPTL7 in an animal is inhibited or modulated by 50% or more. Thus, the oligomeric compounds may modulate expression of angiopoietin like 7 (ANGPTL7) mRNA by at least 10%, by at least 50%, by at least 25%, by at least 30%, by at least 40%, by at least 50%, by at least 60%, by at least 70%, by at least 75%, by at least 80%, by at least 85%, by at least 90%, by at least 95%, by at least 98%, by at least 99%, or by 100% as compared to a control. The reduction of or modulation in the expression of angiopoietin-like 7, (ANGPTL7) may be measured in serum, blood, adipose tissue, liver or any other body fluid, tissue or organ of the animal. In some cases, the cells contained within said fluids, tissues or organs being analyzed contain a nucleic acid molecule encoding ANGPTL7 peptides and or the ANGPTL7 protein itself.

### Drug Discovery

[0579] The compounds disclosed herein can also be applied in the areas of drug discovery and target validation. The compounds and target segments identified herein may be used in drug discovery efforts to elucidate relationships that exist between angiopoietin like 7 (ANGPTL7) polynucleotides and a disease state, phenotype, or condition. These methods include detecting or modulating ANGPTL7 polynucleotides comprising contacting a sample, tissue, cell, or organism with the compounds disclosed herein, measuring the nucleic acid or protein level of ANGPTL7 polynucleotides and/or a related phenotypic or chemical endpoint at some time after treatment, and optionally comparing the measured value to a non-treated sample or sample treated with a further compound disclosed herein. These methods can also be performed in parallel or in combination with other experiments to determine the function of unknown genes for the process of target validation or to determine the validity of a particular gene product as a target for treatment or prevention of a particular disease, condition, or phenotype.

[0580] This disclosure is further illustrated by the following examples, which should not be construed as further limiting. The contents of all references, pending patent applications and published patents, cited throughout this application are hereby expressly incorporated by reference.

### EMBODIMENTS

[0581] Some embodiments include one or more of the following:

[0582] 1. An RNA interference (RNAi) agent capable of inhibiting or modulating the expression of angiopoietin-like 7 (ANGPTL7), wherein the RNAi agent comprises a double-stranded RNA (dsRNA) comprising a sense strand and an antisense strand, each strand having 14 to 30 nucleotides.

[0583] 2. The RNAi agent of embodiment 1, wherein the dsRNA has a length of 17-30 nucleotide pairs.

[0584] 3. The RNAi agent of embodiment 1 or embodiment 2, wherein the sense strand and antisense strand each have 17-30 nucleotides.

[0585] 4. The RNAi agent of any of embodiments 1-3, wherein the sense strand comprises a sequence at least about 80%, 85%, 90%, 95%, or 100% identical to a sequence selected from SEQ ID NOS: 1-4412.

[0586] 5. The RNAi agent of any of embodiments 1-4, wherein the antisense strand comprises a sequence at least about 80%, 85%, 90%, 95%, or 100% identical to the reverse complement of the sense strand.

[0587] 6. The RNAi agent of any of embodiments 1-5, wherein the antisense strand comprises a sequence at least about 80%, 85%, 90%, 95%, or 100% identical to a sequence selected from SEQ ID NOS: 1-4412.

[0588] 7. The RNAi agent of any of embodiments 1-3, wherein the sequence of the sense strand comprises SEQ ID NO: 11089 and the sequence of the antisense strand comprises SEQ ID NO: 11090.

[0589] 8. The RNAi agent of any of embodiments 1-7, comprising one or more nucleotide modifications selected from the group consisting of LNA, HNA, CeNA, 2′-methoxyethyl, 2′-O-alkyl, 2′-O-allyl, 2′-C-allyl, 2′-fluoro, and 2′-deoxy.

[0590] 9. The RNAi agent of any of embodiments 1-8, wherein the nucleotides are modified with either 2′-OCH₃ or 2′-F.

[0591] 10. The RNAi agent of any of embodiments 1-9, further comprising at least one ligand.

[0592] 11. The RNAi agent of any of embodiments 1-10, comprising one or more nucleotide modifications selected from the group consisting of 2′-O-methyl nucleotide, 2′-deoxyfluoro nucleotide, 2′-O—N-methylacetamido (2′-O—NMA) nucleotide, a 2′-O-dimethylaminoethoxyethyl (2′-O-DMAEOE) nucleotide, 2′-O-aminopropyl (2′-O-AP) nucleotide, and 2′-ara-F.

[0593] 12. The RNAi agent of any of embodiments 1-11, further comprising at least one phosphorothioate or methylphosphonate internucleotide linkage.

[0594] 13. The RNAi agent of any of embodiments 1-12, wherein the nucleotide at the 1 position of the 5′-end of the antisense strand of the dsRNA is selected from the group consisting of A, dA, dU, U, and dT.

[0595] 14. The RNAi agent of any of embodiments 1-13, wherein the base pair at the 1 position of the 5′-end of the dsRNA is an AU base pair.

[0596] 15. An RNA interference (RNAi) agent capable of inhibiting or modulating the expression of ANGPTL7, wherein the RNAi agent comprises a double-stranded RNA (dsRNA) comprising a sense strand and an antisense strand, each of the strands having 14 to 30 nucleotides, wherein the sense strand contains at least two motifs of three identical modifications on three consecutive nucleotides, a first of said sense strand motifs occurring at a cleavage site in the sense strand and a second of said sense strand motifs occurring at a different region of the sense strand that is separated from the first sense strand motif by at least one nucleotide; and wherein the antisense strand contains at least two motifs of three identical modifications on three consecutive nucleotides, a first of said antisense strand motifs occurring at or near the cleavage site in the antisense strand and a second of said antisense strand motifs occurring at a different region of the antisense strand that is separated from the first antisense strand motif by at least one nucleotide; wherein the modification in the first antisense strand motif is different than the modification in the second antisense strand motif.

[0597] 16. The RNAi agent of embodiment 15, wherein at least one of the nucleotides occurring in the first sense strand motif forms a base pair with one of the nucleotides in the first antisense strand motif.

[0598] 17. The RNAi agent of embodiment 15 or embodiment 16, wherein the dsRNA has 17-30 nucleotide base pairs.

[0599] 18. The RNAi agent of embodiment 17, wherein the dsRNA has 17-19 nucleotide base pairs.

[0600] 19. The RNAi agent of any of embodiments 15-18, wherein each strand has 17-23 nucleotides.

[0601] 20. The RNAi agent of any of embodiments 15-19, wherein the modifications on the nucleotides of the sense strand and/or antisense strand are selected from the group consisting of LNA, HNA, CeNA, 2′-methoxyethyl, 2′-O-alkyl, 2′-O-allyl, 2′-C-allyl, 2′-fluoro, 2′-deoxy, and combinations thereof.

[0602] 21. The RNAi agent of any of embodiments 15-20, wherein the modifications on the nucleotides of the sense strand and/or antisense strand are 2′-OCH3 or 2′-F.

[0603] 22. The RNAi agent of any of embodiments 15-21, further comprising a ligand attached to the 3′ end of the sense strand.

[0604] 23. An RNA interference (RNAi) agent capable of inhibiting or modulating the expression of ANGPTL7, wherein the RNAi agent comprises a double-stranded RNA (dsRNA) comprising a sense strand and an antisense strand, each of the strands having 14 to 30 nucleotides, wherein the sense strand contains at least one motif of three 2′-F modifications on three consecutive nucleotides, one of said motifs occurring at or near the cleavage site in the sense strand; and wherein the antisense strand contains at least one motif of three 2′-O-methyl modifications on three consecutive nucleotides, one of said motifs occurring at or near the cleavage site in the antisense strand.

[0605] 24. The RNAi agent of embodiment 23, wherein the sense strand comprises a sequence at least about 80%, 85%, 90%, 95%, or 100% identical to a sequence selected from SEQ ID NOS: 1-4412.

[0606] 25. The RNAi agent of embodiment 23 or embodiment 24, wherein the antisense strand comprises a sequence at least about 80%, 85%, 90%, 95%, or 100% identical to the reverse complement of the sense strand.

[0607] 26. The RNAi agent of any of embodiments 23-25, wherein the antisense strand comprises a sequence at least about 80%, 85%, 90%, 95%, or 100% identical to a sequence selected from SEQ ID NOS: 1-4412.

[0608] 27. A method of modulating a function of and/or the expression of an angiopoietin-like 7 (ANGPTL7) polynucleotide in patient cells or tissues, in vivo or in vitro, the method comprising: contacting said cells or tissues with at least one antisense oligonucleotide 5 to 30 nucleotides in length, wherein said at least one antisense oligonucleotide has at least 50% sequence identity to a reverse complement of a polynucleotide comprising 5 to 30 consecutive nucleotides within nucleotides 1 to 2224 of SEQ ID NO: 11085; thereby modulating a function of and/or the expression of the angiopoietin like 7 (ANGPTL7) polynucleotide in patient cells or tissues, in vivo or in vitro.

[0609] 28. A method of modulating a function of and/or the expression of an angiopoietin like 7 (ANGPTL7) polynucleotide in patient cells or tissues, in vivo or in vitro, the method comprising: contacting said cells or tissues with at least one antisense oligonucleotide 5 to 30 nucleotides in length, wherein said antisense oligonucleotide has at least 50% sequence identity to an antisense oligonucleotide to the angiopoietin-like 7 (ANGPTL7) polynucleotide; thereby modulating a function of and/or the expression of the angiopoietin-like 7 (ANGPTL7) polynucleotide in patient cells or tissues, in vivo or in vitro.

[0610] 29. A method of modulating a function of and/or the expression of an angiopoietin-like 7 (ANGPTL7) polynucleotide in patient cells or tissues, in vivo or in vitro, the method comprising: contacting said cells or tissues with at least one antisense oligonucleotide that targets a region of a natural antisense oligonucleotide of the angiopoietin-like 7 (ANGPTL7) polynucleotide; thereby modulating a function of and/or the expression of the angiopoietin-like 7 (ANGPTL7) polynucleotide in patient cells or tissues, in vivo or in vitro.

[0611] 30. A method of modulating a function of and/or the expression of an angiopoietin-like 7 (ANGPTL7) polynucleotide in patient cells or tissues, in vivo or in vitro, the method comprising: contacting said cells or tissues with at least one antisense oligonucleotide 5 to 30 nucleotides in length; thereby modulating a function of and/or the expression of the ANGPTL7 polynucleotide in patient cells or tissues, in vivo or in vitro.

[0612] 31. The method of any one of embodiments 27-29, wherein the at least one antisense oligonucleotide comprises SEQ ID NO: 11087.

[0613] 32. The method of embodiment 30, wherein the at least one antisense oligonucleotide comprises a sequence selected from SEQ ID NOS: 4413-11084.

[0614] 33. The method of any one of embodiments 27-29, wherein the at least one antisense oligonucleotide comprises a sequence at least about 80%, 85%, 90%, 95% identical to SEQ ID SEQ ID NOS: 4413-11084.

[0615] 34. The method of any of embodiments 27-33, wherein a function of and/or the expression of the angiopoietin-like 7 (ANGPTL7) is increased in vivo or in vitro with respect to a control oligonucleotide that does not target or specifically hybridize to ANGPTL7.

[0616] 35. The method of any of embodiments 27-33, wherein a function of and/or the expression of the angiopoietin-like 7 (ANGPTL7) is decreased in vivo or in vitro with respect to a control oligonucleotide that does not target or specifically hybridize to ANGPTL7.

[0617] 36. The method of any of embodiments 27-35, wherein the at least one antisense oligonucleotide targets a natural antisense sequence of an angiopoietin-like 7 (ANGPTL7) polynucleotide.

[0618] 37. The method of any of embodiments 27-36, wherein the at least one antisense oligonucleotide targets a nucleic acid sequence comprising coding and/or non-coding nucleic acid sequences of an angiopoietin like 7 (ANGPTL7) polynucleotide.

[0619] 38. The method of any of embodiments 27-37, wherein the at least one antisense oligonucleotide targets overlapping and/or non-overlapping sequences of an angiopoietin-like 7 (ANGPTL7) polynucleotide.

[0620] 39. The method of any of embodiments 27-38, wherein the at least one antisense oligonucleotide comprises one or more modifications.

[0621] 40. The method of embodiment 39, wherein the one or more modifications is selected from: at least one modified sugar moiety, at least one modified internucleoside linkage, at least one modified nucleotide, and combinations thereof.

[0622] 41. The method of embodiment 39, wherein the one or more modifications comprise at least one modified sugar moiety selected from: a 2′-O-methoxyethyl modified sugar moiety, a 2′-methoxy modified sugar moiety, a 2′-O-alkyl modified sugar moiety, a bicyclic sugar moiety, and combinations thereof.

[0623] 42. The method of embodiment 39, wherein the one or more modifications comprise at least one modified internucleoside linkage selected from: a phosphorothioate, 2′-O-methoxyethyl (MOE), 2′-fluoro, alkylphosphonate, phosphorodithioate, alkylphosphonothioate, phosphoramidate, carbamate, carbonate, phosphate triester, acetamidate, carboxymethyl ester, and combinations thereof.

[0624] 43. The method of embodiment 39, wherein the one or more modifications comprise at least one modified nucleotide selected from: a peptide nucleic acid (PNA), a locked nucleic acid (LNA), an arabino-nucleic acid (FANA), an analogue, a derivative, and combinations thereof.

[0625] 44. A method of modulating a function of and/or the expression of an angiopoietin-like 7 (ANGPTL7) gene in mammalian cells or tissues, in vivo or in vitro, the method comprising: contacting said cells or tissues with at least one short interfering RNA (siRNA) oligonucleotide 5 to 30 nucleotides in length, said at least one siRNA oligonucleotide being specific for an antisense polynucleotide of an angiopoietin-like 7 (ANGPTL7) polynucleotide, wherein said at least one siRNA oligonucleotide has at least 50% sequence identity to a complementary sequence of at least about five consecutive nucleic acids of the antisense and/or sense nucleic acid molecule of the angiopoietin-like 7 (ANGPTL7) polynucleotide; thereby modulating a function of and or the expression of angiopoietin-like 7, (ANGPTL7) in mammalian cells or tissues in vivo or in vitro.

[0626] 45. The method of embodiment 44, wherein said oligonucleotide has at least 80% sequence identity to a sequence of at least about five consecutive nucleic acids that is complementary to the antisense and/or sense nucleic acid molecule of the angiopoietin-like 7 (ANGPTL7) polynucleotide.

[0627] 46. The method of embodiment 44 or embodiment 45, wherein the at least one siRNA oligonucleotide comprises a sequence selected from SEQ ID NOS: 1-4412.

[0628] 47. The method of embodiment 44 or embodiment 45, wherein the at least one siRNA oligonucleotide comprises a sequence at least about 80%, 85%, 90%, 95%, or 100% identical to a sequence selected from SEQ ID NOS: 1-4412.

[0629] 48. A method of modulating a function of and/or the expression of angiopoietin-like 7, (ANGPTL7) in mammalian cells or tissues, in vivo or in vitro, the method comprising: contacting said cells or tissues with at least one antisense oligonucleotide of about 5 to 30 nucleotides in length, the antisense oligonucleotide specific for noncoding and/or coding sequences of a sense and/or natural antisense strand of an angiopoietin-like 7 (ANGPTL7) polynucleotide, wherein said at least one antisense oligonucleotide has at least 50% sequence identity to at least one nucleic acid sequence set forth as 1 to 2224 of SEQ ID NO: 11085 or its complement; thereby modulating the function and/or expression of the angiopoietin-like 7 (AGNPTL7) in mammalian cells or tissues, in vivo or in vitro.

[0630] 49. The method of embodiment 48, wherein the at least one antisense oligonucleotide comprises a sequence selected from SEQ ID NOS: 4413-11084.

[0631] 50. The method of embodiment 48, wherein the at least one antisense oligonucleotide comprises a sequence at least about 80%, 85%, 90%, 95% identical to SEQ ID NOS: 4413-11084.

[0632] 51. A synthetic, modified oligonucleotide comprising at least one modification wherein the at least one modification is selected from: at least one modified sugar moiety; at least one modified internucleotide linkage; at least one modified nucleotide, and combinations thereof; wherein said oligonucleotide is an antisense compound which hybridizes to and modulates the function and/or expression of an angiopoietin-like 7 (ANGPTL7) polynucleotide in vivo or in vitro as compared to a control oligonucleotide that does not specifically hybridize to the ANGPTL7 polynucleotide.

[0633] 52. The oligonucleotide of embodiment 51, wherein the at least one modification comprises an internucleotide linkage selected from the group consisting of: phosphorothioate, alkylphosphonate, phosphorodithioate, alkylphosphonothioate, phosphoramidate, carbamate, carbonate, phosphate triester, acetamidate, carboxymethyl ester, and combinations thereof.

[0634] 53. The oligonucleotide of embodiment 52, wherein said oligonucleotide comprises at least one phosphorothioate internucleotide linkage.

[0635] 54. The oligonucleotide of embodiment 52, wherein said oligonucleotide comprises a backbone of phosphorothioate internucleotide linkages.

[0636] 55. The oligonucleotide of embodiment 52, wherein the oligonucleotide comprises at least one modified nucleotide, said modified nucleotide selected from: a peptide nucleic acid, a locked nucleic acid (LNA), and an analogue, derivative, and a combination thereof.

[0637] 56. The oligonucleotide of embodiment 51, wherein the oligonucleotide comprises a plurality of modifications, wherein said modifications comprise modified nucleotides selected from: phosphorothioate, alkylphosphonate, phosphorodithioate, alkylphosphonothioate, phosphoramidate, carbamate, carbonate, phosphate triester, acetamidate, carboxymethyl ester, and a combination thereof.

[0638] 57. The oligonucleotide of embodiment 51, wherein the oligonucleotide comprises a plurality of modifications, wherein said modifications comprise modified nucleotides selected from: peptide nucleic acids, locked nucleic acids (LNA), and analogues, derivatives, and a combination thereof.

[0639] 58. The oligonucleotide of embodiment 51, wherein the oligonucleotide comprises at least one modified sugar moiety selected from: a 2′-O-methoxyethyl modified sugar moiety, a 2′-methoxy modified sugar moiety, a 2-O-alkyl modified sugar moiety, a bicyclic sugar moiety, and a combination thereof.

[0640] 59. The oligonucleotide of embodiment 51, wherein the oligonucleotide comprises a plurality of modifications, wherein said modifications comprise modified sugar moieties selected from: a 2′-O-methoxyethyl modified sugar moiety, a 2-methoxy modified sugar moiety, a 2′-O-alkyl modified sugar moiety, a bicyclic sugar moiety, and a combination thereof.

[0641] 60. The oligonucleotide of embodiment 51, wherein the oligonucleotide is of at least about 5 to 30 nucleotides in length and hybridizes to an antisense and/or sense strand of an angiopoietin-like 7 (ANGPTL7) polynucleotide, wherein said oligonucleotide has at least about 20% sequence identity to a complementary sequence of at least about five consecutive nucleic acids of the antisense and/or sense coding and/or noncoding nucleic acid sequences of the angiopoietin-like 7 (ANGPTL7) polynucleotide.

[0642] 61. The oligonucleotide of embodiment 51, wherein the oligonucleotide has at least about 80% sequence identity to a complementary sequence of at least about five consecutive nucleic acids of the antisense and or sense coding and/or noncoding nucleic acid sequence of the angiopoietin-like 7 (ANGPTL7) polynucleotide.

[0643] 62. The oligonucleotide of embodiment 51, wherein said oligonucleotide hybridizes to and modulates expression and/or function of at least one angiopoietin-like 7 (ANGPTL7) polynucleotide, in vivo or in vitro, as compared to the control oligonucleotide.

[0644] 63. The oligonucleotide of embodiment 51, wherein the oligonucleotide comprises the sequence set forth as SEQ ID NO: 11087.

[0645] 64. The oligonucleotide of any one of embodiments 51-63, wherein the at least one antisense oligonucleotide comprises SEQ ID NOS: 4413-11084.

[0646] 65. The oligonucleotide of any one of embodiments 51-63, wherein the at least one antisense oligonucleotide comprises a sequence at least about 80%, 85%, 90%, or 95% identical to SEQ ID NOS: 4413-11084.

[0647] 66. A composition comprising one or more oligonucleotides specific for one or more angiopoietin-like 7 (ANGPTL7) polynucleotides, said one or more oligonucleotides comprising an antisense sequence, complementary sequence, allele, homolog, isoform, variant, derivative, mutant, or fragment of the ANGPTL7 polynucleotide, or a combination thereof.

[0648] 67. The composition of embodiment 66 wherein the one or more oligonucleotides have at least about 40% sequence identity as compared to the nucleotide sequence set forth as SEQ ID NO: 11087.

[0649] 68. The composition of embodiment 66 or embodiment 67, wherein the oligonucleotide comprises the nucleotide sequence set forth as SEQ ID NO: 11087.

[0650] 69. The composition of embodiment 66, wherein the one or more oligonucleotides comprises a sequence selected from SEQ ID NOS: 1-4412.

[0651] 70. The composition of embodiment 66, wherein the one or more oligonucleotides comprises a sequence at least about 80%, 85%, 90%, 95%, or 100% identical to a sequence selected from SEQ ID NOS: 1-4412.

[0652] 71. The composition of any of embodiments 66-70, wherein the one or more oligonucleotides comprises one or more modifications or substitutions.

[0653] 72. The composition of embodiment 71, wherein the one or more modifications are selected from: phosphorothioate, methylphosphonate, peptide nucleic acid, locked nucleic acid (LNA) molecules, and combinations thereof.

[0654] 73. A method of preventing or treating a disease associated with at least one angiopoietin-like 7 (ANGPTL7) polynucleotide and/or at least one encoded product thereof, the method comprising: administering to a subject in need thereof a therapeutically effective dose of at least one antisense oligonucleotide that binds to a natural antisense sequence of said at least one angiopoietin-like 7 (ANGPTL7) polynucleotide and modulates expression of said at least one angiopoietin-like 7 (ANGPTL7) polynucleotide; thereby preventing or treating the disease associated with the at least one angiopoietin-like 7 (ANGPTL7) polynucleotide and or at least one encoded product thereof.

[0655] 74. A method of preventing or treating a disease associated with at least one angiopoietin-like 7 (ANGPTL7) polynucleotide and/or at least one encoded product thereof, the method comprising: administering to a subject in need thereof a therapeutically effective dose of at least one antisense oligonucleotide that binds to a natural sense sequence of said at least one angiopoietin-like 7 (ANGPTL7) polynucleotide and modulates expression of said at least one angiopoietin-like 7 (ANGPTL7) polynucleotide; thereby preventing or treating the disease associated with the at least one angiopoietin-like 7 (ANGPTL7) polynucleotide and or at least one encoded product thereof.

[0656] 75. The method of embodiment 73 or embodiment 74, wherein a disease associated with the at least one angiopoietin-like 7 (ANGPTL7) polynucleotide is selected from: a disease or disorder associated with abnormal function and/or expression of ANGPTL7, a disease or disorder associated with optic nerve damage, a disease or disorder associated with intraocular pressure, a degenerative retinal disease or disorder, an inflammatory eye disease or disorder, an allergic eye disease or disorder, a disease or disorder associated with degeneration or inflammation of the joints, a disease or disorder associated with abnormal lipid metabolism, cancer, Alzheimer's disease, dementia, stroke and brain ischemia.

[0657] 76. The method of embodiment 75, wherein the disease or disorder associated with optic nerve damage comprises primary open-angle glaucoma, primary angle-closure glaucoma, normal-tension glaucoma, pigmentary glaucoma, exfoliation glaucoma, juvenile glaucoma, congenital glaucoma, inflammatory glaucoma, phacogenic glaucoma, glaucoma secondary to intraocular hemorrhage, traumatic glaucoma, neovascular glaucoma, drug-induced glaucoma, toxic glaucoma, absolute glaucoma, ocular hypertension, or a combination thereof.

[0658] 77. The method of embodiment 75, wherein the disease or disorder associated with degeneration or inflammation of the joints comprises osteoarthritis, osteoarthrosis or a combination thereof.

[0659] 78. The method of embodiment 75, wherein the cancer is selected from lung cancer, epidermoid carcinoma, breast cancer, or a combination thereof.

[0660] 79. A method of identifying and selecting at least one oligonucleotide for in vivo administration comprising: identifying at least one oligonucleotide comprising at least five consecutive nucleotides which are complementary to ANGPTL7 or to a polynucleotide that is antisense to ANGPTL7; measuring the thermal melting point of a hybrid of an antisense oligonucleotide and the ANGPTL7 or the polynucleotide that is antisense to the ANGPTL7 under stringent hybridization conditions; and selecting at least one oligonucleotide for in vivo administration based on the information obtained.

[0661] 80. A method of treating a disease or condition mediated by ANGPTL7, the method comprising administering to a subject in need thereof an oligonucleotide comprising a sequence at least about 80%, 85%, 90%, 95%, or 100% identical to a sequence selected from SEQ ID NOS: 1-4412.

[0662] 81. The method of embodiment 80, wherein the oligonucleotide comprises a sequence selected from SEQ ID NOS: 1-4412.

[0663] 82. The method of embodiment 80 or embodiment 81, wherein the target is ANGPTL7.

[0664] 83. The method of any of embodiments 80-82, wherein the disease or condition comprises glaucoma (including, primary open-angle glaucoma, primary angle-closure glaucoma, normal-tension glaucoma, pigmentary glaucoma, exfoliation glaucoma, juvenile glaucoma, congenital glaucoma, inflammatory glaucoma, phacogenic glaucoma, glaucoma secondary to intraocular hemorrhage, traumatic glaucoma, neovascular glaucoma, drug-induced glaucoma, toxic glaucoma and absolute glaucoma), ocular hypertension, optic neuropathy or a combination thereof.

[0665] 84. The method of any of embodiments 80-83, wherein the oligonucleotide comprises dsRNA.

[0666] 85. The method of embodiment 84, wherein the oligonucleotide comprises a sequence at least about 80%, 85%, 90%, 95%, or 100% identical to a sequence selected from SEQ ID NOS: 1-4412.

[0667] 86. The method of any of embodiments 80-83, wherein the oligonucleotide comprises a sequence at least about 80%, 85%, 90%, 95%, or 100% identical to SEQ ID NOS: 4413-11084.

[0668] 87. A method of treating one or more disorders of the eye in a subject in need thereof comprising editing an ANGPTL7 gene in the subject wherein the one or more disorders of the eye comprises glaucoma or ocular hypertension.

[0669] 88. The method of embodiment 87, wherein the editing of the ANGPTL7 gene comprises administering CRISPR/cas9 to the subject.

[0670] 89. The method of embodiment 88, wherein the CRISPR/cas9 targets the ANGPTL7 gene.

[0671] 90. The method of embodiment 88, wherein the CRISPR/cas9 edits the ANGPTL7 gene to a loss of function mutation.

[0672] 91. The method of embodiment 90, wherein the loss of function mutation comprises a premature stop mutation.

[0673] 92. The method of embodiment 91, wherein the premature stop mutation occurs at amino acid position 177 according to the human protein sequence numbering.

[0674] 93. The method of embodiment 88, wherein the CRISPR/cas9 edits the ANGPTL7 gene to a missense mutation.

[0675] 94. The method of embodiment 93, wherein the missense mutation comprises a glutamine to histidine mutation.

[0676] 95. The method of embodiment 94, wherein the glutamine to histidine mutation occurs at amino acid position 175 according to the human protein sequence numbering.

[0677] 96. The method of embodiment 88, wherein the CRISPR/cas9 is delivered systemically to the subject.

[0678] 97. The method of embodiment 88, wherein the CRISPR/cas9 is delivered locally to the subject.

[0679] 98. The method of embodiment 97, wherein the CRISPR/cas9 is delivered locally to the eye of the subject.

[0680] 99. The method of embodiment 88, wherein the editing of the ANGPTL7 gene is efficacious in treating the one or more disorders of the eye.

[0681] 100. The method of embodiment 99, wherein the one or more disorders of the eye is glaucoma.

[0682] 101. The method of embodiment 99, wherein the subject has ocular hypertension.

[0683] 102. The method of embodiment 101, wherein imaging from the subject ocular hypertension demonstrates optic nerve damage.

[0684] 103. The method of embodiment 87, wherein the subject has received a first line treatment comprised of topical ocular prostaglandin analogues, beta-adrenergic blockers, alpha-adrenergic agonists, and carbonic anhydrase inhibitors for the one or more disorders of the eye.

[0685] 104. The method of embodiment 87, wherein the editing of the ANGPTL7 gene causes a reduction in or modulation of the production of the gene product of ANGPTL7 in the subject.

[0686] 105. The method of embodiment 87, wherein the editing of the ANGPTL7 gene causes a reduction in the subject of intraocular pressure.

[0687] 106. A composition comprising CRISPR/cas9 that targets ANGPTL7 that is efficacious in treating glaucoma or ocular hypertension.

[0688] 107. The composition of embodiment 106, wherein the CRISPR/cas9 edits the ANGPTL7 gene to a loss of function mutation.

[0689] 108. The composition of embodiment 107, wherein the loss of function mutation comprises a premature stop mutation.

[0690] 109. The composition of embodiment 108, wherein the premature stop mutation occurs at amino acid position 177 according to the human protein sequence numbering.

[0691] 110. The composition of embodiment 106, wherein the CRISPR/Cas9 edits the ANGPTL7 gene to a missense mutation.

[0692] 111. The composition of embodiment 110, wherein the missense mutation comprises a glutamine to histidine mutation.

[0693] 112. The composition of embodiment 111, wherein the glutamine to histidine mutation occurs at amino acid position 175 according to the human protein sequence numbering.

[0694] 113. A pharmaceutical composition comprising an siRNA molecule comprising a sense strand and an antisense strand, which targets SEQ ID NO. 11086 and when introduced to an eye of a patient in an effective amount reduces intraocular pressure of the eye; and a pharmaceutically acceptable carrier.

[0695] 114. The pharmaceutical composition of embodiment 113, wherein the siRNA molecule reduces intraocular pressure by at least 5%, at least 10%, at least 15%, at least 20%, at least 25%, at least 30% relative to a pre-treatment value of intraocular pressure in the eye of the patient.

[0696] 115. The pharmaceutical composition of embodiment 113, wherein the pharmaceutical composition is formulated for topical administration to the eye.

[0697] 116. The pharmaceutical composition of any of embodiments 113-115, wherein the siRNA has a length of 17-30 nucleotide pairs.

[0698] 117. The pharmaceutical composition of any of embodiments 113-115, wherein the sense strand and antisense strand each have 17-30 nucleotides.

[0699] 118. The pharmaceutical composition of any of embodiments 113-115, wherein the sense strand and antisense strand each have 21 nucleotides.

[0700] 119. The pharmaceutical composition of any of embodiments 113-117, wherein the sense strand comprises a sequence at least about 80%, 85%, 90%, 95%, or 100% identical to a sequence selected from SEQ ID NOS: 1-4412.

[0701] 120. The pharmaceutical composition of any of embodiments 113-118, wherein the antisense strand comprises a sequence at least about 80%, 85%, 90%, 95%, or 100% identical to the reverse complement of the sense strand.

[0702] 121. The pharmaceutical composition of any of embodiments 113-119, wherein the antisense strand comprises a sequence at least about 80%, 85%, 90%, 95%, or 100% identical to a sequence selected from SEQ ID NOS: 1-4412.

[0703] 122. The pharmaceutical composition of any of embodiments 113-116, wherein the sequence of the sense strand comprises SEQ ID NO: 11089 and the sequence of the antisense strand comprises SEQ ID NO: 11090.

[0704] 123. The pharmaceutical composition of any of embodiments 113-121, comprising a modified internucleoside linkage.

[0705] 124. The pharmaceutical composition of embodiment 123, wherein the modified internucleoside linkage comprises alkylphosphonate, phosphorothioate, methylphosphonate, phosphorodithioate, alkylphosphonothioate, phosphoramidate, carbamate, carbonate, phosphate triester, acetamidate, or carboxymethyl ester, or a combination thereof.

[0706] 125. The pharmaceutical composition of embodiment 124, wherein the modified internucleoside linkage comprises one or more phosphorothioate linkages.

[0707] 126. The pharmaceutical composition of embodiment 125, wherein the one or more phosphorothioate linkages is about 1, 2, 3, 4, 5, 6, 7, 8, 9, 10, 11, 12, 13, 14, 15, 16, 17, 18, 19, 20, 21, 22, 23, 24, 25, 26, 27, 28, 29, 30, 31, 32, 33, 34, 35, 36, 37, 38, 39, 40, 41, or 42 phosphorothioate linkages.

[0708] 127. The pharmaceutical composition of embodiment 124 or embodiment 125, wherein the sense strand of the siRNA comprises one or more phosphorothioate linkages.

[0709] 128. The pharmaceutical composition of embodiment 127, wherein the one or more phosphorothioate linkages of the sense strand is about 1, 2, 3, 4, 5, 6, 7, 8, 9, 10, 11, 12, 13, 14, 15, 16, 17, 18, 19, 20, or 21 phosphorothioate linkages.

[0710] 129. The pharmaceutical composition of embodiment 128, wherein the one or more phosphorothioate linkages of the sense strand is about 1, 2, 3, 4, or 5 phosphorothioate linkages.

[0711] 130. The pharmaceutical composition of embodiment 129, wherein the one or more phosphorothioate linkages of the sense strand is about 4 phosphorothioate linkages.

[0712] 131. The pharmaceutical composition of any one of embodiments 127-130, wherein the sense strand comprises a phosphorothioate linkage between the first nucleoside and the second nucleoside of the sense strand, in a 5′ to 3′ direction.

[0713] 132. The pharmaceutical composition of any one of embodiments 127-131, wherein the sense strand comprises a phosphorothioate linkage between the second nucleoside and the third nucleoside of the sense strand, in a 5′ to 3′ direction.

[0714] 133. The pharmaceutical composition of any one of embodiments 127-132, wherein the sense strand comprises a phosphorothioate linkage between the nineteenth nucleoside and the twentieth nucleoside of the sense strand, in a 5′ to 3′ direction.

[0715] 134. The pharmaceutical composition of any one of embodiments 127-133, wherein the sense strand comprises a phosphorothioate linkage between the twentieth nucleoside and the twenty-first nucleoside of the sense strand, in a 5′ to 3′ direction.

[0716] 135. The pharmaceutical composition of any one of embodiments 124-134, wherein the antisense strand of the siRNA comprises one or more phosphorothioate linkages.

[0717] 136. The pharmaceutical composition of embodiment 135, wherein the one or more phosphorothioate linkages of the antisense strand is about 1, 2, 3, 4, 5, 6, 7, 8, 9, 10, 11, 12, 13, 14, 15, 16, 17, 18, 19, 20, or 21 phosphorothioate linkages.

[0718] 137. The pharmaceutical composition of embodiment 136, wherein the one or more phosphorothioate linkages of the antisense strand is about 1, 2, 3, 4, or 5 phosphorothioate linkages.

[0719] 138. The pharmaceutical composition of embodiment 137, wherein the one or more phosphorothioate linkages of the antisense strand is about 4 phosphorothioate linkages.

[0720] 139. The pharmaceutical composition of any one of embodiments 135-138, wherein the antisense strand comprises a phosphorothioate linkage between the first nucleoside and the second nucleoside of the antisense strand, in a 5′ to 3′ direction.

[0721] 140. The pharmaceutical composition of any one of embodiments 135-139, wherein the antisense strand comprises a phosphorothioate linkage between the second nucleoside and the third nucleoside of the antisense strand, in a 5′ to 3′ direction.

[0722] 141. The pharmaceutical composition of any one of embodiments 135-140, wherein the antisense strand comprises a phosphorothioate linkage between the nineteenth nucleoside and the twentieth nucleoside of the sense strand, in a 5′ to 3′ direction.

[0723] 142. The pharmaceutical composition of any one of embodiments 135-141, wherein the antisense strand comprises a phosphorothioate linkage between the twentieth nucleoside and the twenty-first nucleoside of the sense strand, in a 5′ to 3′ direction.

[0724] 143. The pharmaceutical composition of any one of embodiments 113-142, comprising a modified nucleoside.

[0725] 144. The pharmaceutical composition of embodiment 143, wherein the modified nucleoside comprises a locked nucleic acid (LNA), hexitol nucleic acid (HLA), cyclohexene nucleic acid (CeNA), 2′-methoxyethyl, 2′-O-alkyl, 2′-O-allyl, 2′-O-allyl, 2′-fluoro, or 2′-deoxy, or a combination thereof.

[0726] 145. The pharmaceutical composition of embodiment 144, wherein the modified nucleoside comprises a of 2′-O-methyl nucleoside, 2′-deoxyfluoro nucleoside, 2′-O—N-methylacetamido (2′-O—NMA) nucleoside, a 2′-O-dimethylaminoethoxyethyl (2′-O-DMAEOE) nucleoside, 2′-O-aminopropyl (2′-O-AP) nucleoside, or 2′-ara-F, or a combination thereof.

[0727] 146. The pharmaceutical composition of embodiment 144, wherein the modified nucleoside comprises one or more 2′-fluoro modified nucleosides.

[0728] 147. The pharmaceutical composition of embodiment 146, wherein the one or more 2′-fluoro modified nucleosides is about 1, 2, 3, 4, 5, 6, 7, 8, 9, 10, 11, 12, 13, 14, 15, 16, 17, 18, 19, 20, 21, 22, 23, 24, 25, 26, 27, 28, 29, 30, 31, 32, 33, 34, 35, 36, 37, 38, 39, 40, 41, or 42 2′-fluoro modified nucleosides.

[0729] 148. The pharmaceutical composition of embodiment 145 or embodiment 146, wherein the sense strand of the siRNA comprises one or more 2′-fluoro modified nucleosides.

[0730] 149. The pharmaceutical composition of embodiment 148, wherein the one or more 2′-fluoro modified nucleosides of the sense strand is about 1, 2, 3, 4, 5, 6, 7, 8, 9, 10, 11, 12, 13, 14, 15, 16, 17, 18, 19, 20, or 21 2′-fluoro modified nucleosides.

[0731] 150. The pharmaceutical composition of embodiment 149, wherein the one or more 2′-fluoro modified nucleosides of the sense strand is about eleven 2′-fluoro modified nucleosides.

[0732] 151. The pharmaceutical composition of embodiment 149, wherein the one or more 2′-fluoro modified nucleosides of the sense strand is about four 2′-fluoro modified nucleosides.

[0733] 152. The pharmaceutical composition of embodiment 149, wherein the one or more 2′-fluoro modified nucleosides of the sense strand is about three 2′-fluoro modified nucleosides.

[0734] 153. The pharmaceutical composition of any one of embodiments 148-152, wherein the first nucleoside of the sense strand comprises the 2′-fluoro modified nucleoside, in a 5′ to 3′ direction.

[0735] 154. The pharmaceutical composition of any one of embodiments 148-153, wherein the third nucleoside of the sense strand comprises the 2′-fluoro modified nucleoside, in a 5′ to 3′ direction.

[0736] 155. The pharmaceutical composition of any one of embodiments 148-154, wherein the fifth nucleoside of the sense strand comprises the 2′-fluoro modified nucleoside, in a 5′ to 3′ direction.

[0737] 156. The pharmaceutical composition of any one of embodiments 148-155, wherein the seventh nucleoside of the sense strand comprises the 2′-fluoro modified nucleoside, in a 5′ to 3′ direction.

[0738] 157. The pharmaceutical composition of any one of embodiments 148-156, wherein the eighth nucleoside of the sense strand comprises the 2′-fluoro modified nucleoside, in a 5′ to 3′ direction.

[0739] 158. The pharmaceutical composition of any one of embodiments 148-157, wherein the ninth nucleoside of the sense strand comprises the 2′-fluoro modified nucleoside, in a 5′ to 3′ direction.

[0740] 159. The pharmaceutical composition of any one of embodiments 148-158, wherein the eleventh nucleoside of the sense strand comprises the 2′-fluoro modified nucleoside, in a 5′ to 3′ direction.

[0741] 160. The pharmaceutical composition of any one of embodiments 148-159, wherein the thirteenth nucleoside of the sense strand comprises the 2′-fluoro modified nucleoside, in a 5′ to 3′ direction.

[0742] 161. The pharmaceutical composition of any one of embodiments 148-160, wherein the fifteenth nucleoside of the sense strand comprises the 2′-fluoro modified nucleoside, in a 5′ to 3′ direction.

[0743] 162. The pharmaceutical composition of any one of embodiments 148-161, wherein the seventeenth nucleoside of the sense strand comprises the 2′-fluoro modified nucleoside, in a 5′ to 3′ direction.

[0744] 163. The pharmaceutical composition of any one of embodiments 148-162, wherein the nineteenth nucleoside of the sense strand comprises the 2′-fluoro modified nucleoside, in a 5′ to 3′ direction.

[0745] 164. The pharmaceutical composition of any one of embodiments 148-163, wherein the fifth, seventh, and ninth nucleosides of the sense strand comprises the 2′-fluoro modified nucleoside, in a 5′ to 3′ direction.

[0746] 165. The pharmaceutical composition of any one of embodiments 148-164, comprising the pattern fN-Z1-fN-Z2-fN, wherein fN comprises the 2′-fluoro modified nucleoside and Z1 and Z2 are independently a 2′-O-methyl modified nucleoside or a 2′-fluoro modified nucleoside.

[0747] 166. The pharmaceutical composition of embodiment 165, wherein the fN-Z1-fN-Z2-fN corresponds to nucleosides five to nine of the sense strand, in a 5′ to 3′ direction.

[0748] 167. The pharmaceutical composition of any one of embodiments 148-166, wherein the sense strand comprises at least two contiguous 2′-fluoro modified nucleosides.

[0749] 168. The pharmaceutical composition of embodiment 167, wherein the at least two contiguous 2′-fluoro modified nucleosides is two contiguous 2′-fluoro modified nucleosides.

[0750] 169. The pharmaceutical composition of embodiment 168, wherein the at least two contiguous 2′-fluoro modified nucleosides is three contiguous 2′-fluoro modified nucleosides.

[0751] 170. The pharmaceutical composition of any one of embodiments 145-169, wherein the antisense strand of the siRNA comprises one or more 2′-fluoro modified nucleosides.

[0752] 171. The pharmaceutical composition of embodiment 170, wherein the one or more 2′-fluoro modified nucleosides of the antisense strand is about 1, 2, 3, 4, 5, 6, 7, 8, 9, 10, 11, 12, 13, 14, 15, 16, 17, 18, 19, 20, or 21 2′-fluoro modified nucleosides.

[0753] 172. The pharmaceutical composition of embodiment 171, wherein the one or more 2′-fluoro modified nucleosides of the antisense strand is about eight 2′-fluoro modified nucleosides.

[0754] 173. The pharmaceutical composition of embodiment 171, wherein the one or more 2′-fluoro modified nucleosides of the antisense strand is about six 2′-fluoro modified nucleosides.

[0755] 174. The pharmaceutical composition of embodiment 171, wherein the one or more 2′-fluoro modified nucleosides of the antisense strand is about five 2′-fluoro modified nucleosides.

[0756] 175. The pharmaceutical composition of embodiment 171, wherein the one or more 2′-fluoro modified nucleosides of the antisense strand is about four 2′-fluoro modified nucleosides.

[0757] 176. The pharmaceutical composition of any one of embodiments 170-175, wherein the second nucleoside of the antisense strand comprises the 2′-fluoro modified nucleoside, in a 5′ to 3′ direction.

[0758] 177. The pharmaceutical composition of any one of embodiments 170-176, wherein the fourth nucleoside of the antisense strand comprises the 2′-fluoro modified nucleoside, in a 5′ to 3′ direction.

[0759] 178. The pharmaceutical composition of any one of embodiments 170-177, wherein the sixth nucleoside of the antisense strand comprises the 2′-fluoro modified nucleoside, in a 5′ to 3′ direction.

[0760] 179. The pharmaceutical composition of any one of embodiments 170-178, wherein the eighth nucleoside of the antisense strand comprises the 2′-fluoro modified nucleoside, in a 5′ to 3′ direction.

[0761] 180. The pharmaceutical composition of any one of embodiments 170-179, wherein the ninth nucleoside of the antisense strand comprises the 2′-fluoro modified nucleoside, in a 5′ to 3′ direction.

[0762] 181. The pharmaceutical composition of any one of embodiments 170-180, wherein the tenth nucleoside of the antisense strand comprises the 2′-fluoro modified nucleoside, in a 5′ to 3′ direction.

[0763] 182. The pharmaceutical composition of any one of embodiments 170-181, wherein the fourteenth nucleoside of the antisense strand comprises the 2′-fluoro modified nucleoside, in a 5′ to 3′ direction.

[0764] 183. The pharmaceutical composition of any one of embodiments 170-182, wherein the sixteenth nucleoside of the antisense strand comprises the 2′-fluoro modified nucleoside, in a 5′ to 3′ direction.

[0765] 184. The pharmaceutical composition of any one of embodiments 170-183, wherein the eighteenth nucleoside of the antisense strand comprises the 2′-fluoro modified nucleoside, in a 5′ to 3′ direction.

[0766] 185. The pharmaceutical composition of any one of embodiments 170-184, wherein the second and fourteenth nucleosides of the antisense strand comprises the 2′-fluoro modified nucleoside, in a 5′ to 3′ direction.

[0767] 186. The pharmaceutical composition of any one of embodiments 170-185, wherein the second, sixth, fourteenth, and sixteenth nucleosides of the antisense strand comprises the 2′-fluoro modified nucleoside, in a 5′ to 3′ direction.

[0768] 187. The pharmaceutical composition of any one of embodiments 170-186, comprising the pattern Z3-fN-Z4-fN, wherein fN comprises the 2′-fluoro modified nucleoside and Z3 and Z4 are independently a 2′-O-methyl modified nucleoside or a 2′-fluoro modified nucleoside.

[0769] 188. The pharmaceutical composition of embodiment 187, wherein the Z3-fN-Z4-fN corresponds to nucleosides thirteen to sixteen of the antisense strand, in a 5′ to 3′ direction.

[0770] 189. The pharmaceutical composition of any one of embodiments 143-188, wherein the modified nucleoside comprises a 2′-O-alkyl modified nucleoside.

[0771] 190. The pharmaceutical composition of embodiment 189, wherein the 2′-O-alkyl modified nucleoside comprises one or more 2′-O-methyl modified nucleosides.

[0772] 191. The pharmaceutical composition of embodiment 190, wherein the one or more 2′-O-methyl modified nucleosides is about 1, 2, 3, 4, 5, 6, 7, 8, 9, 10, 11, 12, 13, 14, 15, 16, 17, 18, 19, 20, 21, 22, 23, 24, 25, 26, 27, 28, 29, 30, 31, 32, 33, 34, 35, 36, 37, 38, 39, 40, 41, or 42 2′-O-methyl modified nucleosides.

[0773] 192. The pharmaceutical composition of any one of embodiments 189-191, wherein the sense strand of the siRNA comprises one or more 2′-O-methyl modified nucleosides.

[0774] 193. The pharmaceutical composition of embodiment 192, wherein the one or more 2′-O-methyl modified nucleosides of the sense strand is about 1, 2, 3, 4, 5, 6, 7, 8, 9, 10, 11, 12, 13, 14, 15, 16, 17, 18, 19, 20, or 21 2′-O-methyl modified nucleosides.

[0775] 194. The pharmaceutical composition of embodiment 193, wherein the one or more 2′-O-methyl modified nucleosides of the sense strand is about ten 2′-O-methyl modified nucleosides.

[0776] 195. The pharmaceutical composition of embodiment 193, wherein the one or more 2′-O-methyl modified nucleosides of the sense strand is about seventeen 2′-O-methyl modified nucleosides.

[0777] 196. The pharmaceutical composition of embodiment 193, wherein the one or more 2′-O-methyl modified nucleosides of the sense strand is about eighteen 2′-O-methyl modified nucleosides.

[0778] 197. The pharmaceutical composition of any one of embodiments 192-196, wherein the first nucleoside of the sense strand comprises the 2′-O-methyl modified nucleoside, in a 5′ to 3′ direction.

[0779] 198. The pharmaceutical composition of any one of embodiments 192-197, wherein the second nucleoside of the sense strand comprises the 2′-O-methyl modified nucleoside, in a 5′ to 3′ direction.

[0780] 199. The pharmaceutical composition of any one of embodiments 192-198, wherein the third nucleoside of the sense strand comprises the 2′-O-methyl modified nucleoside, in a 5′ to 3′ direction.

[0781] 200. The pharmaceutical composition of any one of embodiments 192-199, wherein the fourth nucleoside of the sense strand comprises the 2′-O-methyl modified nucleoside, in a 5′ to 3′ direction.

[0782] 201. The pharmaceutical composition of any one of embodiments 192-200, wherein the sixth nucleoside of the sense strand comprises the 2′-O-methyl modified nucleoside, in a 5′ to 3′ direction.

[0783] 202. The pharmaceutical composition of any one of embodiments 192-201, wherein the eighth nucleoside of the sense strand comprises the 2′-O-methyl modified nucleoside, in a 5′ to 3′ direction.

[0784] 203. The pharmaceutical composition of any one of embodiments 192-202, wherein the tenth nucleoside of the sense strand comprises the 2′-O-methyl modified nucleoside, in a 5′ to 3′ direction.

[0785] 204. The pharmaceutical composition of any one of embodiments 192-203, wherein the eleventh nucleoside of the sense strand comprises the 2′-O-methyl modified nucleoside, in a 5′ to 3′ direction.

[0786] 205. The pharmaceutical composition of any one of embodiments 192-204, wherein the twelfth nucleoside of the sense strand comprises the 2′-O-methyl modified nucleoside, in a 5′ to 3′ direction.

[0787] 206. The pharmaceutical composition of any one of embodiments 192-205, wherein the thirteenth nucleoside of the sense strand comprises the 2′-O-methyl modified nucleoside, in a 5′ to 3′ direction.

[0788] 207. The pharmaceutical composition of any one of embodiments 192-206, wherein the fourteenth nucleoside of the sense strand comprises the 2′-O-methyl modified nucleoside, in a 5′ to 3′ direction.

[0789] 208. The pharmaceutical composition of any one of embodiments 192-207, wherein the fifteenth nucleoside of the sense strand comprises the 2′-O-methyl modified nucleoside, in a 5′ to 3′ direction.

[0790] 209. The pharmaceutical composition of any one of embodiments 192-208, wherein the sixteenth nucleoside of the sense strand comprises the 2′-O-methyl modified nucleoside, in a 5′ to 3′ direction.

[0791] 210. The pharmaceutical composition of any one of embodiments 192-209, wherein the seventeenth nucleoside of the sense strand comprises the 2′-O-methyl modified nucleoside, in a 5′ to 3′ direction.

[0792] 211. The pharmaceutical composition of any one of embodiments 192-210, wherein the eighteenth nucleoside of the sense strand comprises the 2′-O-methyl modified nucleoside, in a 5′ to 3′ direction.

[0793] 212. The pharmaceutical composition of any one of embodiments 192-211, wherein the nineteenth nucleoside of the sense strand comprises the 2′-O-methyl modified nucleoside, in a 5′ to 3′ direction.

[0794] 213. The pharmaceutical composition of any one of embodiments 192-212, wherein the twentieth nucleoside of the sense strand comprises the 2′-O-methyl modified nucleoside, in a 5′ to 3′ direction.

[0795] 214. The pharmaceutical composition of any one of embodiments 192-213, wherein the twenty-first nucleoside of the sense strand comprises the 2′-O-methyl modified nucleoside, in a 5′ to 3′ direction.

[0796] 215. The pharmaceutical composition of any one of embodiments 192-214, wherein the second, fourth, sixth, tenth, twelfth, fourteenth, and sixteenth, eighteenth, twentieth, and twenty-first nucleosides of the sense strand comprises the 2′-O-methyl modified nucleoside, in a 5′ to 3′ direction.

[0797] 216. The pharmaceutical composition of any one of embodiments 192-215, comprising the pattern mN-Z5-mN-Z6, wherein mN comprises the 2′-O-methyl modified nucleoside and Z5 and Z6 are independently a 2′-O-methyl modified nucleoside or a 2′-fluoro modified nucleoside.

[0798] 217. The pharmaceutical composition of embodiment 216, wherein the mN-Z5-mN-Z6-mN corresponds to nucleosides four to seven of the sense strand, in a 5′ to 3′ direction.

[0799] 218. The pharmaceutical composition of embodiment 216 or embodiment 217, wherein Z5 is the 2′-fluoro modified nucleoside.

[0800] 219. The pharmaceutical composition of embodiment 216 or embodiment 217, wherein Z5 is the 2′-O-methyl modified nucleoside.

[0801] 220. The pharmaceutical composition of any one of embodiments 216-219, wherein Z6 is the 2′-fluoro modified nucleoside.

[0802] 221. The pharmaceutical composition of any one of embodiments 216-219, wherein Z6 is the 2′-O-methyl modified nucleoside.

[0803] 222. The pharmaceutical composition of any one of embodiments 192-221, comprising the pattern mN-Z5-mN-Z6-mN, wherein mN comprises the 2′-O-methyl modified nucleoside and Z5 and Z6 are independently a 2′-O-methyl modified nucleoside or a 2′-fluoro modified nucleoside.

[0804] 223. The pharmaceutical composition of embodiment 222, wherein the mN-Z5-mN-Z6-mN corresponds to nucleosides two to six of the sense strand, in a 5′ to 3′ direction.

[0805] 224. The pharmaceutical composition of embodiment 222, wherein the mN-Z5-mN-Z6-mN corresponds to nucleosides ten to fourteen of the sense strand, in a 5′ to 3′ direction.

[0806] 225. The pharmaceutical composition of embodiment 222, wherein the mN-Z5-mN-Z6-mN corresponds to nucleosides twelve to sixteen of the sense strand, in a 5′ to 3′ direction.

[0807] 226. The pharmaceutical composition of embodiment 222, wherein the mN-Z5-mN-Z6-mN corresponds to nucleosides fourteen to eighteen of the sense strand, in a 5′ to 3′ direction.

[0808] 227. The pharmaceutical composition of embodiment 222, wherein the mN-Z5-mN-Z6-mN corresponds to nucleosides sixteen to twenty of the sense strand, in a 5′ to 3′ direction.

[0809] 228. The pharmaceutical composition of any one of embodiments 192-227, comprising the pattern mN-Z5-mN-Z6-mN-Z7-mN, wherein Z7 is a 2′-O-methyl modified nucleoside or a 2′-fluoro modified nucleoside.

[0810] 229. The pharmaceutical composition of embodiment 228, wherein the mN-Z5-mN-Z6-mN-Z7-mN corresponds to nucleosides ten to sixteen of the sense strand, in a 5′ to 3′ direction.

[0811] 230. The pharmaceutical composition of embodiment 228, wherein the mN-Z5-mN-Z6-mN-Z7-mN corresponds to nucleosides twelve to eighteen of the sense strand, in a 5′ to 3′ direction.

[0812] 231. The pharmaceutical composition of embodiment 228, wherein the mN-Z5-mN-Z6-mN-Z7-mN corresponds to nucleosides fourteen to twenty of the sense strand, in a 5′ to 3′ direction.

[0813] 232. The pharmaceutical composition of any one of embodiments 192-231, comprising the pattern mN-Z5-mN-Z6-mN-Z7-mN-Z8-mN, wherein Z8 is a 2′-O-methyl modified nucleoside or a 2′-fluoro modified nucleoside.

[0814] 233. The pharmaceutical composition of embodiment 232, wherein the mN-Z5-mN-Z6-mN-Z7-mN-Z8-mN corresponds to nucleosides ten to eighteen of the sense strand, in a 5′ to 3′ direction.

[0815] 234. The pharmaceutical composition of embodiment 232, wherein the mN-Z5-mN-Z6-mN-Z7-mN-Z8-mN corresponds to nucleosides twelve to twenty of the sense strand, in a 5′ to 3′ direction.

[0816] 235. The pharmaceutical composition of any one of embodiments 192-234, comprising the pattern mN-Z5-mN-Z6-mN-Z7-mN-Z8-mN-Z9-mN, wherein Z9 is a 2′-O-methyl modified nucleoside or a 2′-fluoro modified nucleoside.

[0817] 236. The pharmaceutical composition of embodiment 235, wherein the mN-Z5-mN-Z6-mN-Z7-mN-Z8-mN-Z9-mN corresponds to nucleosides ten to twenty of the sense strand, in a 5′ to 3′ direction.

[0818] 237. The pharmaceutical composition of any one of embodiments 192-236, wherein the sense strand comprises at least two contiguous 2′-O-methyl modified nucleosides.

[0819] 238. The pharmaceutical composition of embodiment 237, wherein the at least two contiguous 2′-O-methyl modified nucleosides is three contiguous 2′-O-methyl modified nucleosides.

[0820] 239. The pharmaceutical composition of embodiment 237, wherein the at least two contiguous 2′-O-methyl modified nucleosides is four contiguous 2′-O-methyl modified nucleosides.

[0821] 240. The pharmaceutical composition of embodiment 237, wherein the at least two contiguous 2′-O-methyl modified nucleosides is five contiguous 2′-O-methyl modified nucleosides.

[0822] 241. The pharmaceutical composition of embodiment 237, wherein the at least two contiguous 2′-O-methyl modified nucleosides is six contiguous 2′-O-methyl modified nucleosides.

[0823] 242. The pharmaceutical composition of embodiment 237, wherein the at least two contiguous 2′-O-methyl modified nucleosides is seven contiguous 2′-O-methyl modified nucleosides.

[0824] 243. The pharmaceutical composition of embodiment 237, wherein the at least two contiguous 2′-O-methyl modified nucleosides is eight contiguous 2′-O-methyl modified nucleosides.

[0825] 244. The pharmaceutical composition of embodiment 237, wherein the at least two contiguous 2′-O-methyl modified nucleosides is nine contiguous 2′-O-methyl modified nucleosides.

[0826] 245. The pharmaceutical composition of embodiment 237, wherein the at least two contiguous 2′-O-methyl modified nucleosides is ten contiguous 2′-O-methyl modified nucleosides.

[0827] 246. The pharmaceutical composition of embodiment 237, wherein the at least two contiguous 2′-O-methyl modified nucleosides is eleven contiguous 2′-O-methyl modified nucleosides.

[0828] 247. The pharmaceutical composition of embodiment 237, wherein the at least two contiguous 2′-O-methyl modified nucleosides is twelve contiguous 2′-O-methyl modified nucleosides.

[0829] 248. The pharmaceutical composition of any one of embodiments 189-247, wherein the antisense strand of the siRNA comprises one or more 2′-O-methyl modified nucleosides.

[0830] 249. The pharmaceutical composition of embodiment 248, wherein the one or more 2′-O-methyl modified nucleosides of the antisense strand is about 1, 2, 3, 4, 5, 6, 7, 8, 9, 10, 11, 12, 13, 14, 15, 16, 17, 18, 19, 20, or 21 2′-O-methyl modified nucleosides.

[0831] 250. The pharmaceutical composition of embodiment 249, wherein the one or more 2′-O-methyl modified nucleosides of the antisense strand is about thirteen 2′-O-methyl modified nucleosides.

[0832] 251. The pharmaceutical composition of embodiment 249, wherein the one or more 2′-O-methyl modified nucleosides of the antisense strand is about fifteen 2′-O-methyl modified nucleosides.

[0833] 252. The pharmaceutical composition of embodiment 249, wherein the one or more 2′-O-methyl modified nucleosides of the antisense strand is about seventeen 2′-O-methyl modified nucleosides.

[0834] 253. The pharmaceutical composition of any one of embodiments 249-252, wherein the first nucleoside of the antisense strand comprises the 2′-O-methyl modified nucleoside, in a 5′ to 3′ direction.

[0835] 254. The pharmaceutical composition of any one of embodiments 249-253, wherein the third nucleoside of the antisense strand comprises the 2′-O-methyl modified nucleoside, in a 5′ to 3′ direction.

[0836] 255. The pharmaceutical composition of any one of embodiments 249-254, wherein the fourth nucleoside of the antisense strand comprises the 2′-O-methyl modified nucleoside, in a 5′ to 3′ direction.

[0837] 256. The pharmaceutical composition of any one of embodiments 249-255, wherein the fifth nucleoside of the antisense strand comprises the 2′-O-methyl modified nucleoside, in a 5′ to 3′ direction.

[0838] 257. The pharmaceutical composition of any one of embodiments 249-256, wherein the seventh nucleoside of the antisense strand comprises the 2′-O-methyl modified nucleoside, in a 5′ to 3′ direction.

[0839] 258. The pharmaceutical composition of any one of embodiments 249-257, wherein the eighth nucleoside of the antisense strand comprises the 2′-O-methyl modified nucleoside, in a 5′ to 3′ direction.

[0840] 259. The pharmaceutical composition of any one of embodiments 249-258, wherein the ninth nucleoside of the antisense strand comprises the 2′-O-methyl modified nucleoside, in a 5′ to 3′ direction.

[0841] 260. The pharmaceutical composition of any one of embodiments 249-259, wherein the tenth nucleoside of the antisense strand comprises the 2′-O-methyl modified nucleoside, in a 5′ to 3′ direction.

[0842] 261. The pharmaceutical composition of any one of embodiments 249-260, wherein the eleventh nucleoside of the antisense strand comprises the 2′-O-methyl modified nucleoside, in a 5′ to 3′ direction.

[0843] 262. The pharmaceutical composition of any one of embodiments 249-261, wherein the twelfth nucleoside of the antisense strand comprises the 2′-O-methyl modified nucleoside, in a 5′ to 3′ direction.

[0844] 263. The pharmaceutical composition of any one of embodiments 249-262, wherein the thirteenth nucleoside of the antisense strand comprises the 2′-O-methyl modified nucleoside, in a 5′ to 3′ direction.

[0845] 264. The pharmaceutical composition of any one of embodiments 249-263, wherein the fifteenth nucleoside of the antisense strand comprises the 2′-O-methyl modified nucleoside, in a 5′ to 3′ direction.

[0846] 265. The pharmaceutical composition of any one of embodiments 249-264, wherein the seventeenth nucleoside of the antisense strand comprises the 2′-O-methyl modified nucleoside, in a 5′ to 3′ direction.

[0847] 266. The pharmaceutical composition of any one of embodiments 249-265, wherein the eighteenth nucleoside of the antisense strand comprises the 2′-O-methyl modified nucleoside, in a 5′ to 3′ direction.

[0848] 267. The pharmaceutical composition of any one of embodiments 249-266, wherein the nineteenth nucleoside of the antisense strand comprises the 2′-O-methyl modified nucleoside, in a 5′ to 3′ direction.

[0849] 268. The pharmaceutical composition of any one of embodiments 249-267, wherein the twentieth nucleoside of the antisense strand comprises the 2′-O-methyl modified nucleoside, in a 5′ to 3′ direction.

[0850] 269. The pharmaceutical composition of any one of embodiments 249-268, wherein the twenty-first nucleoside of the antisense strand comprises the 2′-O-methyl modified nucleoside, in a 5′ to 3′ direction.

[0851] 270. The pharmaceutical composition of any one of embodiments 249-269, wherein the first, third, fifth, seventh, eleventh, twelfth, thirteenth, fifteenth, seventeenth, nineteenth, twentieth, and twenty-first nucleosides of the antisense strand comprises the 2′-O-methyl modified nucleoside, in a 5′ to 3′ direction.

[0852] 271. The pharmaceutical composition of any one of embodiments 249-270, wherein the antisense strand comprises at least two contiguous 2′-O-methyl modified nucleosides.

[0853] 272. The pharmaceutical composition of embodiment 271, wherein the at least two contiguous 2′-O-methyl modified nucleosides is three contiguous 2′-O-methyl modified nucleosides.

[0854] 273. The pharmaceutical composition of embodiment 271, wherein the at least two contiguous 2′-O-methyl modified nucleosides is four contiguous 2′-O-methyl modified nucleosides.

[0855] 274. The pharmaceutical composition of embodiment 271, wherein the at least two contiguous 2′-O-methyl modified nucleosides is five contiguous 2′-O-methyl modified nucleosides.

[0856] 275. The pharmaceutical composition of embodiment 271, wherein the at least two contiguous 2′-O-methyl modified nucleosides is six contiguous 2′-O-methyl modified nucleosides.

[0857] 276. The pharmaceutical composition of embodiment 271, wherein the at least two contiguous 2′-O-methyl modified nucleosides is seven contiguous 2′-O-methyl modified nucleosides.

[0858] 277. The pharmaceutical composition of any one of embodiments 248-276, wherein the antisense strand comprises a first sequence comprising at least two contiguous 2′-O-methyl modified nucleosides and a second sequence comprising at least two contiguous 2′-O-methyl modified nucleosides.

[0859] 278. The pharmaceutical composition of embodiment 277, wherein the first sequence comprises at least three contiguous 2′-O-methyl modified nucleosides, and the second sequence comprises at least three contiguous 2′-O-methyl modified nucleosides.

[0860] 279. The pharmaceutical composition of embodiment 277, wherein the first sequence comprises three contiguous 2′-O-methyl modified nucleosides, and the second sequence comprises three contiguous 2′-O-methyl modified nucleosides.

[0861] 280. The pharmaceutical composition of embodiment 277, wherein the first sequence comprises four contiguous 2′-O-methyl modified nucleosides, and the second sequence comprises five contiguous 2′-O-methyl modified nucleosides.

[0862] 281. The pharmaceutical composition of embodiment 277, wherein the first sequence comprises seven contiguous 2′-O-methyl modified nucleosides, and the second sequence comprises five contiguous 2′-O-methyl modified nucleosides.

[0863] 282. The pharmaceutical composition of embodiment 277, wherein the first sequence comprises at least four contiguous 2′-O-methyl modified nucleosides.

[0864] 283. The pharmaceutical composition of embodiment 277, wherein the first sequence comprises at least five contiguous 2′-O-methyl modified nucleosides.

[0865] 284. The pharmaceutical composition of embodiment 277, wherein the first sequence comprises at least six contiguous 2′-O-methyl modified nucleosides.

[0866] 285. The pharmaceutical composition of embodiment 277, wherein the first sequence comprises at least seven contiguous 2′-O-methyl modified nucleosides.

[0867] 286. The pharmaceutical composition of any one of embodiments 282-285, wherein the second sequence comprises at least four contiguous 2′-O-methyl modified nucleosides.

[0868] 287. The pharmaceutical composition of any one of embodiments 282-285, wherein the second sequence comprises at least five contiguous 2′-O-methyl modified nucleosides.

[0869] 288. The pharmaceutical composition of any one of embodiments 282-285, wherein the second sequence comprises at least six contiguous 2′-O-methyl modified nucleosides.

[0870] 289. The pharmaceutical composition of any one of embodiments 282-285, wherein the second sequence comprises at least seven contiguous 2′-O-methyl modified nucleosides.

[0871] 290. The pharmaceutical composition of any one of embodiments 113-289, wherein the sense strand comprises a ribose.

[0872] 291. The pharmaceutical composition of embodiment 290, wherein the sense strand comprises about 1, 2, 3, 4, 5, 6, 7, 8, 9, 10, 11, 12, 13, 14, 15, 16, 17, 18, 19, 20, or 21 ribose.

[0873] 292. The pharmaceutical composition of embodiment 290 or embodiment 291, wherein the first nucleoside of the sense strand comprises the ribose, in a 5′ to 3′ direction.

[0874] 293. The pharmaceutical composition of any one of embodiments 290-292, wherein the second nucleoside of the sense strand comprises the ribose, in a 5′ to 3′ direction.

[0875] 294. The pharmaceutical composition of any one of embodiments 290-293, wherein the third nucleoside of the sense strand comprises the ribose, in a 5′ to 3′ direction.

[0876] 295. The pharmaceutical composition of any one of embodiments 290-294, wherein the fourth nucleoside of the sense strand comprises the ribose, in a 5′ to 3′ direction.

[0877] 296. The pharmaceutical composition of any one of embodiments 290-295, wherein the fifth nucleoside of the sense strand comprises the ribose, in a 5′ to 3′ direction.

[0878] 297. The pharmaceutical composition of any one of embodiments 290-296, wherein the sixth nucleoside of the sense strand comprises the ribose, in a 5′ to 3′ direction.

[0879] 298. The pharmaceutical composition of any one of embodiments 290-297, wherein the seventh nucleoside of the sense strand comprises the ribose, in a 5′ to 3′ direction.

[0880] 299. The pharmaceutical composition of any one of embodiments 290-298, wherein the eighth nucleoside of the sense strand comprises the ribose, in a 5′ to 3′ direction.

[0881] 300. The pharmaceutical composition of any one of embodiments 290-299, wherein the ninth nucleoside of the sense strand comprises the ribose, in a 5′ to 3′ direction.

[0882] 301. The pharmaceutical composition of any one of embodiments 290-300, wherein the tenth nucleoside of the sense strand comprises the ribose, in a 5′ to 3′ direction.

[0883] 302. The pharmaceutical composition of any one of embodiments 290-301, wherein the eleventh nucleoside of the sense strand comprises the ribose, in a 5′ to 3′ direction.

[0884] 303. The pharmaceutical composition of any one of embodiments 290-302, wherein the twelfth nucleoside of the sense strand comprises the ribose, in a 5′ to 3′ direction.

[0885] 304. The pharmaceutical composition of any one of embodiments 290-303, wherein the thirteenth nucleoside of the sense strand comprises the ribose, in a 5′ to 3′ direction.

[0886] 305. The pharmaceutical composition of any one of embodiments 290-304, wherein the fourteenth nucleoside of the sense strand comprises the ribose, in a 5′ to 3′ direction.

[0887] 306. The pharmaceutical composition of any one of embodiments 290-305, wherein the fifteenth nucleoside of the sense strand comprises the ribose, in a 5′ to 3′ direction.

[0888] 307. The pharmaceutical composition of any one of embodiments 290-306, wherein the sixteenth nucleoside of the sense strand comprises the ribose, in a 5′ to 3′ direction.

[0889] 308. The pharmaceutical composition of any one of embodiments 290-307, wherein the seventeenth nucleoside of the sense strand comprises the ribose, in a 5′ to 3′ direction.

[0890] 309. The pharmaceutical composition of any one of embodiments 290-308, wherein the eighteenth nucleoside of the sense strand comprises the ribose, in a 5′ to 3′ direction.

[0891] 310. The pharmaceutical composition of any one of embodiments 290-309, wherein the nineteenth nucleoside of the sense strand comprises the ribose, in a 5′ to 3′ direction.

[0892] 311. The pharmaceutical composition of any one of embodiments 290-310, wherein the twentieth nucleoside of the sense strand comprises the ribose, in a 5′ to 3′ direction.

[0893] 312. The pharmaceutical composition of any one of embodiments 290-311, wherein the twenty-first nucleoside of the sense strand comprises the ribose, in a 5′ to 3′ direction.

[0894] 313. The pharmaceutical composition of any one of embodiments 113-312, wherein the antisense strand comprises a ribose.

[0895] 314. The pharmaceutical composition of embodiment 313, wherein the antisense strand comprises about 1, 2, 3, 4, 5, 6, 7, 8, 9, 10, 11, 12, 13, 14, 15, 16, 17, 18, 19, 20, or 21 ribose.

[0896] 315. The pharmaceutical composition of embodiment 313 or embodiment 314, wherein the first nucleoside of the antisense strand comprises the ribose, in a 5′ to 3′ direction.

[0897] 316. The pharmaceutical composition of any one of embodiments 313-315, wherein the second nucleoside of the antisense strand comprises the ribose, in a 5′ to 3′ direction.

[0898] 317. The pharmaceutical composition of any one of embodiments 313-316, wherein the third nucleoside of the antisense strand comprises the ribose, in a 5′ to 3′ direction.

[0899] 318. The pharmaceutical composition of any one of embodiments 313-317, wherein the fourth nucleoside of the antisense strand comprises the ribose, in a 5′ to 3′ direction.

[0900] 319. The pharmaceutical composition of any one of embodiments 313-318, wherein the fifth nucleoside of the antisense strand comprises the ribose, in a 5′ to 3′ direction.

[0901] 320. The pharmaceutical composition of any one of embodiments 313-319, wherein the sixth nucleoside of the antisense strand comprises the ribose, in a 5′ to 3′ direction.

[0902] 321. The pharmaceutical composition of any one of embodiments 313-320, wherein the seventh nucleoside of the antisense strand comprises the ribose, in a 5′ to 3′ direction.

[0903] 322. The pharmaceutical composition of any one of embodiments 313-321, wherein the eighth nucleoside of the antisense strand comprises the ribose, in a 5′ to 3′ direction.

[0904] 323. The pharmaceutical composition of any one of embodiments 313-322, wherein the ninth nucleoside of the antisense strand comprises the ribose, in a 5′ to 3′ direction.

[0905] 324. The pharmaceutical composition of any one of embodiments 313-323, wherein the tenth nucleoside of the sense antisense comprises the ribose, in a 5′ to 3′ direction.

[0906] 325. The pharmaceutical composition of any one of embodiments 313-324, wherein the eleventh nucleoside of the antisense strand comprises the ribose, in a 5′ to 3′ direction.

[0907] 326. The pharmaceutical composition of any one of embodiments 313-325, wherein the twelfth nucleoside of the antisense strand comprises the ribose, in a 5′ to 3′ direction.

[0908] 327. The pharmaceutical composition of any one of embodiments 313-326, wherein the thirteenth nucleoside of the antisense strand comprises the ribose, in a 5′ to 3′ direction.

[0909] 328. The pharmaceutical composition of any one of embodiments 313-327, wherein the fourteenth nucleoside of the antisense strand comprises the ribose, in a 5′ to 3′ direction.

[0910] 329. The pharmaceutical composition of any one of embodiments 313-328, wherein the fifteenth nucleoside of the antisense strand comprises the ribose, in a 5′ to 3′ direction.

[0911] 330. The pharmaceutical composition of any one of embodiments 313-329, wherein the sixteenth nucleoside of the antisense strand comprises the ribose, in a 5′ to 3′ direction.

[0912] 331. The pharmaceutical composition of any one of embodiments 313-330, wherein the seventeenth nucleoside of the antisense strand comprises the ribose, in a 5′ to 3′ direction.

[0913] 332. The pharmaceutical composition of any one of embodiments 313-331, wherein the eighteenth nucleoside of the antisense strand comprises the ribose, in a 5′ to 3′ direction.

[0914] 333. The pharmaceutical composition of any one of embodiments 313-332, wherein the nineteenth nucleoside of the antisense strand comprises the ribose, in a 5′ to 3′ direction.

[0915] 334. The pharmaceutical composition of any one of embodiments 313-333, wherein the twentieth nucleoside of the antisense strand comprises the ribose, in a 5′ to 3′ direction.

[0916] 335. The pharmaceutical composition of any one of embodiments 313-334, wherein the twenty-first nucleoside of the antisense strand comprises the ribose, in a 5′ to 3′ direction.

[0917] 336. The pharmaceutical composition of any one of embodiments 113-335, further comprising a lipid attached at either 3′ or 5′ terminus.

[0918] 337. The pharmaceutical composition of embodiment 336, wherein the lipid comprises cholesterol, myristoyl, palmitoyl, stearoyl, lithocholoyl, docosanoyl, docosahexaenoyl, myristyl, palmityl stearyl, α-tocopherol, or a combination thereof.

[0919] 338. The pharmaceutical composition of embodiment 336 or embodiment 337, wherein the lipid comprises a first lipid on the sense strand and a second lipid on the antisense strand.

[0920] 339. The pharmaceutical composition of any one of embodiments 336-338, wherein the lipid is positioned on the sense strand.

[0921] 340. The pharmaceutical composition of embodiment 339, wherein the lipid is positioned at the 5′ end of the sense strand.

[0922] 341. The pharmaceutical composition of embodiment 339, wherein the lipid is positioned at the 3′ end of the sense strand.

[0923] 342. The pharmaceutical composition of any one of embodiments 336-341, wherein the lipid is positioned on the antisense strand.

[0924] 343. The pharmaceutical composition of embodiment 342, wherein the lipid is positioned at the 5′ end of the antisense strand.

[0925] 344. The pharmaceutical composition of embodiment 342, wherein the lipid is positioned at the 3′ end of the antisense strand.

[0926] 345. The pharmaceutical composition of any one of embodiments 113-344, wherein the sense strand and the antisense strand form a double-stranded RNA duplex.

[0927] 346. The pharmaceutical composition of embodiment 345, wherein the double-stranded RNA duplex comprises from about 14 to about 30 nucleosides.

[0928] 347. The pharmaceutical composition of embodiment 346, wherein the double-stranded RNA duplex comprises from about 17 to about 30 nucleosides.

[0929] 348. The pharmaceutical composition of embodiment 347, wherein the double-stranded RNA duplex comprises about 21 nucleosides.

[0930] 349. The pharmaceutical composition of any one of embodiments 345-348, wherein the double-stranded RNA duplex comprises at least one base pair.

[0931] 350. The pharmaceutical composition of embodiment 349, wherein the first base pair of the double-stranded RNA duplex is an AU base pair.

[0932] 351. The pharmaceutical composition of any one of embodiments 113-350, wherein the sense strand comprises pattern 1S: 5′ fN s mN s fN-mN-fN-mN-fN-fN-fN-mN-fN-mN-fN-mN-fN-mN-fN-mN-fN s mN s mN 3′ (SEQ ID NO: 11381), wherein “fN” is a 2′-fluoro-modified nucleoside, “mN” is a 2′-O-methyl modified nucleoside, “-” is a phosphodiester, and “s” is a phosphorothioate.

[0933] 352. The pharmaceutical composition of any one of embodiments 113-350, wherein the sense strand comprises pattern 2S: 5′ mN s mN s mN-mN-fN-mN-fN-fN-fN-mN-mN-mN-mN-mN-mN-mN-mN-mN-mN s mN s mN 3′ (SEQ ID NO: 11382), wherein “fN” is a 2′-fluoro-modified nucleoside, “mN” is a 2′-O-methyl modified nucleoside, “-” is a phosphodiester, and “s” is a phosphorothioate.

[0934] 353. The pharmaceutical composition of any one of embodiments 113-350, wherein the sense strand comprises pattern 3S: 5′ mN s mN s mN-mN-fN-mN-fN-mN-fN-mN-mN-mN-mN-mN-mN-mN-mN-mN-mN s mN s mN 3′ (SEQ ID NO: 11383), wherein “fN” is a 2′-fluoro-modified nucleoside, “mN” is a 2′-O-methyl modified nucleoside, “-” is a phosphodiester, and “s” is a phosphorothioate.

[0935] 354. The pharmaceutical composition of any one of embodiments 113-350, wherein the sense strand comprises pattern 4S: 5′ fN s mN s fN-mN-fN-mN-fN-fN-fN-mN-fN-mN-fN-mN-fN-mN-fN-mN-fN s mN s mN—N-Lipid 3′ (SEQ ID NO: 11384), wherein “fN” is a 2′-fluoro-modified nucleoside, “mN” is a 2′-O-methyl modified nucleoside, “-” is a phosphodiester, “s” is a phosphorothioate, and N comprises one or more nucleosides.

[0936] 355. The pharmaceutical composition of embodiment 354, wherein the one or more nucleosides is three nucleosides.

[0937] 356. The pharmaceutical composition of embodiment 354 or 355, wherein each of the one or more nucleosides independently comprise a ribose or deoxyribose.

[0938] 357. The pharmaceutical composition of any one of embodiments 113-350, wherein the sense strand comprises pattern 5S: 5′ mN s mN s mN-mN-fN-mN-fN-fN-fN-mN-mN-mN-mN-mN-mN-mN-mN-mN-mN s mN s mN—N-Lipid 3′ (SEQ ID NO: 11385), wherein “fN” is a 2′-fluoro-modified nucleoside, “mN” is a 2′-O-methyl modified nucleoside, “-” is a phosphodiester, “s” is a phosphorothioate, and N comprises one or more nucleosides.

[0939] 358. The pharmaceutical composition of embodiment 357, wherein the one or more nucleosides is three nucleosides.

[0940] 359. The pharmaceutical composition of embodiment 357 or 358, wherein each of the one or more nucleosides independently comprise a ribose or deoxyribose.

[0941] 360. The pharmaceutical composition of any one of embodiments 113-359, wherein the antisense strand comprises pattern 1AS: 5′ mN s fN s mN-fN-mN-fN-mN-fN-mN-fN-mN-mN-mN-fN-mN-fN-mN-fN-mN s mN s mN 3′ (SEQ ID NO: 11386), wherein “fN” is a 2′-fluoro-modified nucleoside, “mN” is a 2′-O-methyl modified nucleoside, “-” is a phosphodiester, and “s” is a phosphorothioate.

[0942] 361. The pharmaceutical composition of any one of embodiments 113-359, wherein the antisense strand comprises pattern 2AS: 5′ mN s fN s mN-mN-mN-fN-mN-fN-fN-mN-mN-mN-mN-fN-mN-fN-mN-mN-mN s mN s mN 3′ (SEQ ID NO: 11387), wherein “fN” is a 2′-fluoro-modified nucleoside, “mN” is a 2′-O-methyl modified nucleoside, “-” is a phosphodiester, and “s” is a phosphorothioate.

[0943] 362. The pharmaceutical composition of any one of embodiments 113-359, wherein the antisense strand comprises pattern 3AS: 5′ mN s fN s mN-mN-mN-fN-mN-mN-mN-mN-mN-mN-mN-fN-mN-fN-mN-mN-mN s mN s mN 3′ (SEQ ID NO: 11388), wherein “fN” is a 2′-fluoro-modified nucleoside, “mN” is a 2′-O-methyl modified nucleoside, “-” is a phosphodiester, and “s” is a phosphorothioate.

[0944] 363. The pharmaceutical composition of any one of embodiments 113-359, wherein the antisense strand comprises pattern 4AS: 5′ mN s fN s mN-fN-mN-fN-mN-mN-mN-mN-mN-mN-mN-fN-mN-fN-mN-mN-mN s mN s mN 3′ (SEQ ID NO: 11389), wherein “fN” is a 2′-fluoro-modified nucleoside, “mN” is a 2′-O-methyl modified nucleoside, “-” is a phosphodiester, and “s” is a phosphorothioate.

[0945] 364. The pharmaceutical composition of any one of embodiments 113-350, wherein the sense strand comprises pattern 1S and the antisense strand comprises pattern 1AS.

[0946] 365. The pharmaceutical composition of any one of embodiments 113-350, wherein the sense strand comprises pattern 2S and the antisense strand comprises pattern 2AS.

[0947] 366. The pharmaceutical composition of any one of embodiments 113-350, wherein the sense strand comprises pattern 3S and the antisense strand comprises pattern 3AS.

[0948] 367. The pharmaceutical composition of any one of embodiments 113-350, wherein the sense strand comprises pattern 4S and the antisense strand comprises pattern 4AS.

[0949] 368. A method of treating an eye disease or disorder comprising administering to the eye of a patient in need thereof a short interfering nucleic acid molecule (siRNA) that targets a portion of mRNA encoding ANGPTL7, wherein the siRNA comprises a double-stranded nucleic acid region comprising a sense strand and an antisense strand, and wherein there is greater than 90% sequence identity or greater than 90% sequence complementarity between said double-stranded nucleic acid region of siRNA and the portion of mRNA encoding ANGPTL7 that is targeted by the siRNA.

[0950] 369. The method of embodiment 368, wherein the eye disease or disorder is characterized by increased intraocular pressure.

[0951] 370. The method of embodiment 368 or embodiment 369, wherein the siRNA is administered to the eye of the patient in an effective amount that reduces IOP in the eye of the patient.

[0952] 371. The method of embodiment 370, wherein the siRNA molecule reduces intraocular pressure by at least 5%, at least 10%, at least 15%, at least 20%, at least 25%, at least 30% relative to a pre-treatment value of intraocular pressure in the eye of the patient.

[0953] 372. The method of any of embodiments 368-371, wherein the siRNA is formulated for topical administration to the eye.

[0954] 373. The method of any of embodiments 368-372, wherein the eye disease or disorder comprises glaucoma.

[0955] 374. The method of embodiment 373, wherein the glaucoma is selected from the group consisting of optic nerve damage comprises primary open-angle glaucoma, primary angle-closure glaucoma, normal-tension glaucoma, pigmentary glaucoma, exfoliation glaucoma, juvenile glaucoma, congenital glaucoma, inflammatory glaucoma, phacogenic glaucoma, glaucoma secondary to intraocular hemorrhage, traumatic glaucoma, neovascular glaucoma, drug-induced glaucoma, toxic glaucoma, and absolute glaucoma.

[0956] 375. The method of embodiment 374, wherein the eye disease or disorder is selected from the group consisting a disease or disorder associated with optic nerve damage, a disease or disorder associated with intraocular pressure, a degenerative retinal disease or disorder, an inflammatory eye disease or disorder, an allergic eye disease or disorder.

[0957] 376. The method of any of embodiments 368-375, wherein the siRNA has a length of 17-30 nucleotide pairs.

[0958] 377. The method of any of embodiments 368-376, wherein the sense strand and antisense strand each have 17-30 nucleotides.

[0959] 378. The method of any of embodiments 368-377, wherein the sense strand comprises a sequence at least about 80%, 85%, 90%, 95%, or 100% identical to a sequence selected from SEQ ID NOS: 1-4412.

[0960] 379. The method of any of embodiments 368-378, wherein the antisense strand comprises a sequence at least about 80%, 85%, 90%, 95%, or 100% identical to the reverse complement of the sense strand.

[0961] 380. The method of any of embodiments 368-379, wherein the antisense strand comprises a sequence at least about 80%, 85%, 90%, 95%, or 100% identical to a sequence selected from SEQ ID NOS: 1-4412.

[0962] 381. The method of any of embodiments 368-380, wherein the sequence of the sense strand comprises SEQ ID NO: 11089 and the sequence of the antisense strand comprises SEQ ID NO: 11090.

[0963] 382. The method of any of embodiments 368-381, comprising a modified internucleoside linkage.

[0964] 383. The method of embodiment 382, wherein the modified internucleoside linkage comprises alkylphosphonate, phosphorothioate, methylphosphonate, phosphorodithioate, alkylphosphonothioate, phosphoramidate, carbamate, carbonate, phosphate triester, acetamidate, or carboxymethyl ester, or a combination thereof.

[0965] 384. The method of embodiment 383, wherein the modified internucleoside linkage comprises one or more phosphorothioate linkages.

[0966] 385. The method of embodiment 384, wherein the one or more phosphorothioate linkages is about 1, 2, 3, 4, 5, 6, 7, 8,9, 10, 11, 12, 13, 14, 15, 16, 17, 18, 19, 20, 21, 22, 23, 24, 25, 26, 27, 28, 29, 30, 31, 32, 33, 34, 35, 36, 37, 38, 39, 40, 41, or 42 phosphorothioate linkages.

[0967] 386. The method of embodiment 384 or embodiment 385, wherein the sense strand of the siRNA comprises one or more phosphorothioate linkages.

[0968] 387. The method of embodiment 386, wherein the one or more phosphorothioate linkages of the sense strand is about 1, 2, 3, 4, 5, 6, 7, 8, 9, 10, 11, 12, 13, 14, 15, 16, 17, 18, 19, 20, or 21 phosphorothioate linkages.

[0969] 388. The method of embodiment 387, wherein the one or more phosphorothioate linkages of the sense strand is about 1, 2, 3, 4, or 5 phosphorothioate linkages.

[0970] 389. The method of embodiment 388, wherein the one or more phosphorothioate linkages of the sense strand is about 4 phosphorothioate linkages.

[0971] 390. The method of any one of embodiments 382-389, wherein the sense strand comprises a phosphorothioate linkage between the first nucleoside and the second nucleoside of the sense strand, in a 5′ to 3′ direction.

[0972] 391. The method of any one of embodiments 382-390, wherein the sense strand comprises a phosphorothioate linkage between the second nucleoside and the third nucleoside of the sense strand, in a 5′ to 3′ direction.

[0973] 392. The method of any one of embodiments 382-391, wherein the sense strand comprises a phosphorothioate linkage between the nineteenth nucleoside and the twentieth nucleoside of the sense strand, in a 5′ to 3′ direction.

[0974] 393. The method of any one of embodiments 382-392, wherein the sense strand comprises a phosphorothioate linkage between the twentieth nucleoside and the twenty-first nucleoside of the sense strand, in a 5′ to 3′ direction.

[0975] 394. The method of any one of embodiments 384-393, wherein the antisense strand of the siRNA comprises one or more phosphorothioate linkages.

[0976] 395. The method of embodiment 394, wherein the one or more phosphorothioate linkages of the antisense strand is about 1, 2, 3, 4, 5, 6, 7, 8, 9, 10, 11, 12, 13, 14, 15, 16, 17, 18, 19, 20, or 21 phosphorothioate linkages.

[0977] 396. The method of embodiment 395, wherein the one or more phosphorothioate linkages of the antisense strand is about 1, 2, 3, 4, or 5 phosphorothioate linkages.

[0978] 397. The method of embodiment 396, wherein the one or more phosphorothioate linkages of the antisense strand is about 4 phosphorothioate linkages.

[0979] 398. The method of any one of embodiments 394-397, wherein the antisense strand comprises a phosphorothioate linkage between the first nucleoside and the second nucleoside of the antisense strand, in a 5′ to 3′ direction.

[0980] 399. The method of any one of embodiments 394-398, wherein the antisense strand comprises a phosphorothioate linkage between the second nucleoside and the third nucleoside of the antisense strand, in a 5′ to 3′ direction.

[0981] 400. The method of any one of embodiments 394-399, wherein the antisense strand comprises a phosphorothioate linkage between the nineteenth nucleoside and the twentieth nucleoside of the sense strand, in a 5′ to 3′ direction.

[0982] 401. The method of any one of embodiments 394-400, wherein the antisense strand comprises a phosphorothioate linkage between the twentieth nucleoside and the twenty-first nucleoside of the sense strand, in a 5′ to 3′ direction.

[0983] 402. The method of any one of embodiments 368-401, comprising a modified nucleoside.

[0984] 403. The method of embodiment 402, wherein the modified nucleoside comprises a locked nucleic acid (LNA), hexitol nucleic acid (HLA), cyclohexene nucleic acid (CeNA), 2′-methoxyethyl, 2′-O-alkyl, 2′-O-allyl, 2′-O-allyl, 2′-fluoro, or 2′-deoxy, or a combination thereof.

[0985] 404. The method of embodiment 403, wherein the modified nucleoside comprises a of 2′-O-methyl nucleoside, 2′-deoxyfluoro nucleoside, 2′-O—N-methylacetamido (2′-O—NMA) nucleoside, a 2′-O-dimethylaminoethoxyethyl (2′-O-DMAEOE) nucleoside, 2′-O-aminopropyl (2′-O-AP) nucleoside, or 2′-ara-F, or a combination thereof.

[0986] 405. The method of embodiment 403, wherein the modified nucleoside comprises one or more 2′fluoro modified nucleosides.

[0987] 406. The method of embodiment 405, wherein the one or more 2′-fluoro modified nucleosides is about 1, 2, 3, 4, 5, 6, 7, 8,9, 10, 11, 12, 13, 14, 15, 16, 17, 18, 19, 20, 21, 22, 23, 24, 25, 26, 27, 28, 29, 30, 31, 32, 33, 34, 35, 36, 37, 38, 39, 40, 41, or 42 2′-fluoro modified nucleosides.

[0988] 407. The method of embodiment 405 or embodiment 406, wherein the sense strand of the siRNA comprises one or more 2′-fluoro modified nucleosides.

[0989] 408. The method of embodiment 407, wherein the one or more 2′-fluoro modified nucleosides of the sense strand is about 1, 2, 3, 4, 5, 6, 7, 8, 9, 10, 11, 12, 13, 14, 15, 16, 17, 18, 19, 20, or 21 2′-fluoro modified nucleosides.

[0990] 409. The method of embodiment 408, wherein the one or more 2′-fluoro modified nucleosides of the sense strand is about eleven 2′-fluoro modified nucleosides.

[0991] 410. The method of embodiment 408, wherein the one or more 2′-fluoro modified nucleosides of the sense strand is about four 2′-fluoro modified nucleosides.

[0992] 411. The method of embodiment 408, wherein the one or more 2′-fluoro modified nucleosides of the sense strand is about three 2′-fluoro modified nucleosides.

[0993] 412. The method of any one of embodiments 407-411, wherein the first nucleoside of the sense strand comprises the 2′-fluoro modified nucleoside, in a 5′ to 3′ direction.

[0994] 413. The method of any one of embodiments 407-412, wherein the third nucleoside of the sense strand comprises the 2′-fluoro modified nucleoside, in a 5′ to 3′ direction.

[0995] 414. The method of any one of embodiments 407-413, wherein the fifth nucleoside of the sense strand comprises the 2′-fluoro modified nucleoside, in a 5′ to 3′ direction.

[0996] 415. The method of any one of embodiments 407-414, wherein the seventh nucleoside of the sense strand comprises the 2′-fluoro modified nucleoside, in a 5′ to 3′ direction.

[0997] 416. The method of any one of embodiments 407-415, wherein the eighth nucleoside of the sense strand comprises the 2′-fluoro modified nucleoside, in a 5′ to 3′ direction.

[0998] 417. The method of any one of embodiments 407-416, wherein the ninth nucleoside of the sense strand comprises the 2′-fluoro modified nucleoside, in a 5′ to 3′ direction.

[0999] 418. The method of any one of embodiments 407-417, wherein the eleventh nucleoside of the sense strand comprises the 2′-fluoro modified nucleoside, in a 5′ to 3′ direction.

[1000] 419. The method of any one of embodiments 407-418, wherein the thirteenth nucleoside of the sense strand comprises the 2′-fluoro modified nucleoside, in a 5′ to 3′ direction.

[1001] 420. The method of any one of embodiments 407-419, wherein the fifteenth nucleoside of the sense strand comprises the 2′-fluoro modified nucleoside, in a 5′ to 3′ direction.

[1002] 421. The method of any one of embodiments 407-420, wherein the seventeenth nucleoside of the sense strand comprises the 2′-fluoro modified nucleoside, in a 5′ to 3′ direction.

[1003] 422. The method of any one of embodiments 407-421, wherein the nineteenth nucleoside of the sense strand comprises the 2′-fluoro modified nucleoside, in a 5′ to 3′ direction.

[1004] 423. The method of any one of embodiments 407-422, wherein the fifth, seventh, and ninth nucleosides of the sense strand comprises the 2′-fluoro modified nucleoside, in a 5′ to 3′ direction.

[1005] 424. The method of any one of embodiments 407-423, comprising the pattern fN-Z1-fN-Z2-fN, wherein fN comprises the 2′-fluoro modified nucleoside and Z1 and Z2 are independently a 2′-O-methyl modified nucleoside or a 2′-fluoro modified nucleoside.

[1006] 425. The method of embodiment 424, wherein the fN-Z1-fN-Z2-fN corresponds to nucleosides five to nine of the sense strand, in a 5′ to 3′ direction.

[1007] 426. The method of any one of embodiments 407-425, wherein the sense strand comprises at least two contiguous 2′-fluoro modified nucleosides.

[1008] 427. The method of embodiment 426, wherein the at least two contiguous 2′-fluoro modified nucleosides is two contiguous 2′-fluoro modified nucleosides.

[1009] 428. The method of embodiment 426, wherein the at least two contiguous 2′-fluoro modified nucleosides is three contiguous 2′-fluoro modified nucleosides.

[1010] 429. The method of any one of embodiments 405-428, wherein the antisense strand of the siRNA comprises one or more 2′-fluoro modified nucleosides.

[1011] 430. The method of embodiment 429, wherein the one or more 2′-fluoro modified nucleosides of the antisense strand is about 1, 2, 3, 4, 5, 6, 7, 8, 9, 10, 11, 12, 13, 14, 15, 16, 17, 18, 19, 20, or 21 2′-fluoro modified nucleosides.

[1012] 431. The method of embodiment 430, wherein the one or more 2′-fluoro modified nucleosides of the antisense strand is about eight 2′-fluoro modified nucleosides.

[1013] 432. The method of embodiment 430, wherein the one or more 2′-fluoro modified nucleosides of the antisense strand is about six 2′-fluoro modified nucleosides.

[1014] 433. The method of embodiment 430, wherein the one or more 2′-fluoro modified nucleosides of the antisense strand is about five 2′-fluoro modified nucleosides.

[1015] 434. The method of embodiment 430, wherein the one or more 2′-fluoro modified nucleosides of the antisense strand is about four 2′-fluoro modified nucleosides.

[1016] 435. The method of any one of embodiments 429-434, wherein the second nucleoside of the antisense strand comprises the 2′-fluoro modified nucleoside, in a 5′ to 3′ direction.

[1017] 436. The method of any one of embodiments 429-435, wherein the fourth nucleoside of the antisense strand comprises the 2′-fluoro modified nucleoside, in a 5′ to 3′ direction.

[1018] 437. The method of any one of embodiments 429-436, wherein the sixth nucleoside of the antisense strand comprises the 2′-fluoro modified nucleoside, in a 5′ to 3′ direction.

[1019] 438. The method of any one of embodiments 429-437, wherein the eighth nucleoside of the antisense strand comprises the 2′-fluoro modified nucleoside, in a 5′ to 3′ direction.

[1020] 439. The method of any one of embodiments 429-438, wherein the ninth nucleoside of the antisense strand comprises the 2′-fluoro modified nucleoside, in a 5′ to 3′ direction.

[1021] 440. The method of any one of embodiments 429-439, wherein the tenth nucleoside of the antisense strand comprises the 2′-fluoro modified nucleoside, in a 5′ to 3′ direction.

[1022] 441. The method of any one of embodiments 429-440, wherein the fourteenth nucleoside of the antisense strand comprises the 2′-fluoro modified nucleoside, in a 5′ to 3′ direction.

[1023] 442. The method of any one of embodiments 429-441, wherein the sixteenth nucleoside of the antisense strand comprises the 2′-fluoro modified nucleoside, in a 5′ to 3′ direction.

[1024] 443. The method of any one of embodiments 429-442, wherein the eighteenth nucleoside of the antisense strand comprises the 2′-fluoro modified nucleoside, in a 5′ to 3′ direction.

[1025] 444. The method of any one of embodiments 429-443, wherein the second and fourteenth nucleosides of the antisense strand comprises the 2′-fluoro modified nucleoside, in a 5′ to 3′ direction.

[1026] 445. The method of any one of embodiments 429-444, wherein the second, sixth, fourteenth, and sixteenth nucleosides of the antisense strand comprises the 2′-fluoro modified nucleoside, in a 5′ to 3′ direction.

[1027] 446. The method of any one of embodiments 429-445, comprising the pattern Z3-fN-Z4-fN, wherein fN comprises the 2′-fluoro modified nucleoside and Z3 and Z4 are independently a 2′-O-methyl modified nucleoside or a 2′-fluoro modified nucleoside.

[1028] 447. The method of embodiment 446, wherein the Z3-fN-Z4-fN corresponds to nucleosides thirteen to sixteen of the antisense strand, in a 5′ to 3′ direction.

[1029] 448. The method of any one of embodiments 404-447, wherein the modified nucleoside comprises a 2′-O-alkyl modified nucleoside.

[1030] 449. The method of embodiment 448, wherein the 2′-O-alkyl modified nucleoside comprises one or more 2′-O-methyl modified nucleosides.

[1031] 450. The method of embodiment 449, wherein the one or more 2′-O-methyl modified nucleosides is about 1, 2, 3, 4, 5, 6, 7, 8, 9, 10, 11, 12, 13, 14, 15, 16, 17, 18, 19, 20, 21, 22, 23, 24, 25, 26, 27, 28, 29, 30, 31, 32, 33, 34, 35, 36, 37, 38, 39, 40, 41, or 42 2′-O-methyl modified nucleosides.

[1032] 451. The method of any one of embodiments 448-450, wherein the sense strand of the siRNA comprises one or more 2′-O-methyl modified nucleosides.

[1033] 452. The method of embodiment 451, wherein the one or more 2′-O-methyl modified nucleosides of the sense strand is about 1, 2, 3, 4, 5, 6, 7, 8, 9, 10, 11, 12, 13, 14, 15, 16, 17, 18, 19, 20, or 21 2′-O-methyl modified nucleosides.

[1034] 453. The method of embodiment 452, wherein the one or more 2′-O-methyl modified nucleosides of the sense strand is about ten 2′-O-methyl modified nucleosides.

[1035] 454. The method of embodiment 452, wherein the one or more 2′-O-methyl modified nucleosides of the sense strand is about seventeen 2′-O-methyl modified nucleosides.

[1036] 455. The method of embodiment 452, wherein the one or more 2′-O-methyl modified nucleosides of the sense strand is about eighteen 2′-O-methyl modified nucleosides.

[1037] 456. The method of any one of embodiments 449-455, wherein the first nucleoside of the sense strand comprises the 2′-O-methyl modified nucleoside, in a 5′ to 3′ direction.

[1038] 457. The method of any one of embodiments 449-456, wherein the second nucleoside of the sense strand comprises the 2′-O-methyl modified nucleoside, in a 5′ to 3′ direction.

[1039] 458. The method of any one of embodiments 449-457, wherein the third nucleoside of the sense strand comprises the 2′-O-methyl modified nucleoside, in a 5′ to 3′ direction.

[1040] 459. The method of any one of embodiments 449-458, wherein the fourth nucleoside of the sense strand comprises the 2′-O-methyl modified nucleoside, in a 5′ to 3′ direction.

[1041] 460. The method of any one of embodiments 449-459, wherein the sixth nucleoside of the sense strand comprises the 2′-O-methyl modified nucleoside, in a 5′ to 3′ direction.

[1042] 461. The method of any one of embodiments 449-460, wherein the eighth nucleoside of the sense strand comprises the 2′-O-methyl modified nucleoside, in a 5′ to 3′ direction.

[1043] 462. The method of any one of embodiments 449-461, wherein the tenth nucleoside of the sense strand comprises the 2′-O-methyl modified nucleoside, in a 5′ to 3′ direction.

[1044] 463. The method of any one of embodiments 449-462, wherein the eleventh nucleoside of the sense strand comprises the 2′-O-methyl modified nucleoside, in a 5′ to 3′ direction.

[1045] 464. The method of any one of embodiments 449-463, wherein the twelfth nucleoside of the sense strand comprises the 2′-O-methyl modified nucleoside, in a 5′ to 3′ direction.

[1046] 465. The method of any one of embodiments 449-464, wherein the thirteenth nucleoside of the sense strand comprises the 2′-O-methyl modified nucleoside, in a 5′ to 3′ direction.

[1047] 466. The method of any one of embodiments 449-465, wherein the fourteenth nucleoside of the sense strand comprises the 2′-O-methyl modified nucleoside, in a 5′ to 3′ direction.

[1048] 467. The method of any one of embodiments 449-466, wherein the fifteenth nucleoside of the sense strand comprises the 2′-O-methyl modified nucleoside, in a 5′ to 3′ direction.

[1049] 468. The method of any one of embodiments 449-467, wherein the sixteenth nucleoside of the sense strand comprises the 2′-O-methyl modified nucleoside, in a 5′ to 3′ direction.

[1050] 469. The method of any one of embodiments 449-468, wherein the seventeenth nucleoside of the sense strand comprises the 2′-O-methyl modified nucleoside, in a 5′ to 3′ direction.

[1051] 470. The method of any one of embodiments 449-469, wherein the eighteenth nucleoside of the sense strand comprises the 2′-O-methyl modified nucleoside, in a 5′ to 3′ direction.

[1052] 471. The method of any one of embodiments 449-470, wherein the nineteenth nucleoside of the sense strand comprises the 2′-O-methyl modified nucleoside, in a 5′ to 3′ direction.

[1053] 472. The method of any one of embodiments 449-471, wherein the twentieth nucleoside of the sense strand comprises the 2′-O-methyl modified nucleoside, in a 5′ to 3′ direction.

[1054] 473. The method of any one of embodiments 449-472, wherein the twenty-first nucleoside of the sense strand comprises the 2′-O-methyl modified nucleoside, in a 5′ to 3′ direction.

[1055] 474. The method of any one of embodiments 449-473, wherein the second, fourth, sixth, tenth, twelfth, fourteenth, and sixteenth, eighteenth, twentieth, and twenty-first nucleosides of the sense strand comprises the 2′-O-methyl modified nucleoside, in a 5′ to 3′ direction.

[1056] 475. The method of any one of embodiments 449-474, comprising the pattern mN-Z5-mN-Z6, wherein mN comprises the 2′-O-methyl modified nucleoside and Z5 and Z6 are independently a 2′-O-methyl modified nucleoside or a 2′-fluoro modified nucleoside.

[1057] 476. The method of embodiment 475, wherein the mN-Z5-mN-Z6-mN corresponds to nucleosides four to seven of the sense strand, in a 5′ to 3′ direction.

[1058] 477. The method of embodiment 475 or embodiment 476, wherein Z5 is the 2′-fluoro modified nucleoside.

[1059] 478. The method of embodiment 475 or embodiment 476, wherein Z5 is the 2′-O-methyl modified nucleoside.

[1060] 479. The method of any one of embodiments 475-478, wherein Z6 is the 2′-fluoro modified nucleoside.

[1061] 480. The method of any one of embodiments 475-478, wherein Z6 is the 2′-O-methyl modified nucleoside.

[1062] 481. The method of any one of embodiments 449-480, comprising the pattern mN-Z5-mN-Z6-mN, wherein mN comprises the 2′-O-methyl modified nucleoside and Z5 and Z6 are independently a 2′-O-methyl modified nucleoside or a 2′-fluoro modified nucleoside.

[1063] 482. The method of embodiment 481, wherein the mN-Z5-mN-Z6-mN corresponds to nucleosides two to six of the sense strand, in a 5′ to 3′ direction.

[1064] 483. The method of embodiment 481, wherein the mN-Z5-mN-Z6-mN corresponds to nucleosides ten to fourteen of the sense strand, in a 5′ to 3′ direction.

[1065] 484. The method of embodiment 481, wherein the mN-Z5-mN-Z6-mN corresponds to nucleosides twelve to sixteen of the sense strand, in a 5′ to 3′ direction.

[1066] 485. The method of embodiment 481, wherein the mN-Z5-mN-Z6-mN corresponds to nucleosides fourteen to eighteen of the sense strand, in a 5′ to 3′ direction.

[1067] 486. The method of embodiment 481, wherein the mN-Z5-mN-Z6-mN corresponds to nucleosides sixteen to twenty of the sense strand, in a 5′ to 3′ direction.

[1068] 487. The method of any one of embodiments 449-486, comprising the pattern mN-Z5-mN-Z6-mN-Z7-mN, wherein Z7 is a 2′-O-methyl modified nucleoside or a 2′-fluoro modified nucleoside.

[1069] 488. The method of embodiment 487, wherein the mN-Z5-mN-Z6-mN-Z7-mN corresponds to nucleosides ten to sixteen of the sense strand, in a 5′ to 3′ direction.

[1070] 489. The method of embodiment 488, wherein the mN-Z5-mN-Z6-mN-Z7-mN corresponds to nucleosides twelve to eighteen of the sense strand, in a 5′ to 3′ direction.

[1071] 490. The method of embodiment 488, wherein the mN-Z5-mN-Z6-mN-Z7-mN corresponds to nucleosides fourteen to twenty of the sense strand, in a 5′ to 3′ direction.

[1072] 491. The method of any one of embodiments 449-490, comprising the pattern mN-Z5-mN-Z6-mN-Z7-mN-Z8-mN, wherein Z8 is a 2′-O-methyl modified nucleoside or a 2′-fluoro modified nucleoside.

[1073] 492. The method of embodiment 491, wherein the mN-Z5-mN-Z6-mN-Z7-mN-Z8-mN corresponds to nucleosides ten to eighteen of the sense strand, in a 5′ to 3′ direction.

[1074] 493. The method of embodiment 491, wherein the mN-Z5-mN-Z6-mN-Z7-mN-Z8-mN corresponds to nucleosides twelve to twenty of the sense strand, in a 5′ to 3′ direction.

[1075] 494. The method of any one of embodiments 449-493, comprising the pattern mN-Z5-mN-Z6-mN-Z7-mN-Z8-mN-Z9-mN, wherein Z9 is a 2′-O-methyl modified nucleoside or a 2′-fluoro modified nucleoside.

[1076] 495. The method of embodiment 494, wherein the mN-Z5-mN-Z6-mN-Z7-mN-Z8-mN-Z9-mN corresponds to nucleosides ten to twenty of the sense strand, in a 5′ to 3′ direction.

[1077] 496. The method of any one of embodiments 449-495, wherein the sense strand comprises at least two contiguous 2′-O-methyl modified nucleosides.

[1078] 497. The method of embodiment 496, wherein the at least two contiguous 2′-O-methyl modified nucleosides is three contiguous 2′-O-methyl modified nucleosides.

[1079] 498. The method of embodiment 496, wherein the at least two contiguous 2′-O-methyl modified nucleosides is four contiguous 2′-O-methyl modified nucleosides.

[1080] 499. The method of embodiment 496, wherein the at least two contiguous 2′-O-methyl modified nucleosides is five contiguous 2′-O-methyl modified nucleosides.

[1081] 500. The method of embodiment 496, wherein the at least two contiguous 2′-O-methyl modified nucleosides is six contiguous 2′-O-methyl modified nucleosides.

[1082] 501. The method of embodiment 496, wherein the at least two contiguous 2′-O-methyl modified nucleosides is seven contiguous 2′-O-methyl modified nucleosides.

[1083] 502. The method of embodiment 496, wherein the at least two contiguous 2′-O-methyl modified nucleosides is eight contiguous 2′-O-methyl modified nucleosides.

[1084] 503. The method of embodiment 496, wherein the at least two contiguous 2′-O-methyl modified nucleosides is nine contiguous 2′-O-methyl modified nucleosides.

[1085] 504. The method of embodiment 496, wherein the at least two contiguous 2′-O-methyl modified nucleosides is ten contiguous 2′-O-methyl modified nucleosides.

[1086] 505. The method of embodiment 496, wherein the at least two contiguous 2′-O-methyl modified nucleosides is eleven contiguous 2′-O-methyl modified nucleosides.

[1087] 506. The method of embodiment 496, wherein the at least two contiguous 2′-O-methyl modified nucleosides is twelve contiguous 2′-O-methyl modified nucleosides.

[1088] 507. The method of any one of embodiments 449-506, wherein the antisense strand of the siRNA comprises one or more 2′-O-methyl modified nucleosides.

[1089] 508. The method of embodiment 507, wherein the one or more 2′-O-methyl modified nucleosides of the antisense strand is about 1, 2, 3, 4, 5, 6, 7, 8, 9, 10, 11, 12, 13, 14, 15, 16, 17, 18, 19, 20, or 21 2′-O-methyl modified nucleosides.

[1090] 509. The method of embodiment 508, wherein the one or more 2′-O-methyl modified nucleosides of the antisense strand is about thirteen 2′-O-methyl modified nucleosides.

[1091] 510. The method of embodiment 508, wherein the one or more 2′-O-methyl modified nucleosides of the antisense strand is about fifteen 2′-O-methyl modified nucleosides.

[1092] 511. The method of embodiment 508, wherein the one or more 2′-O-methyl modified nucleosides of the antisense strand is about seventeen 2′-O-methyl modified nucleosides.

[1093] 512. The method of any one of embodiments 507-511, wherein the first nucleoside of the antisense strand comprises the 2′-O-methyl modified nucleoside, in a 5′ to 3′ direction.

[1094] 513. The method of any one of embodiments 507-512, wherein the third nucleoside of the antisense strand comprises the 2′-O-methyl modified nucleoside, in a 5′ to 3′ direction.

[1095] 514. The method of any one of embodiments 507-513, wherein the fourth nucleoside of the antisense strand comprises the 2′-O-methyl modified nucleoside, in a 5′ to 3′ direction.

[1096] 515. The method of any one of embodiments 507-514, wherein the fifth nucleoside of the antisense strand comprises the 2′-O-methyl modified nucleoside, in a 5′ to 3′ direction.

[1097] 516. The method of any one of embodiments 507-515, wherein the seventh nucleoside of the antisense strand comprises the 2′-O-methyl modified nucleoside, in a 5′ to 3′ direction.

[1098] 517. The method of any one of embodiments 507-516, wherein the eighth nucleoside of the antisense strand comprises the 2′-O-methyl modified nucleoside, in a 5′ to 3′ direction.

[1099] 518. The method of any one of embodiments 507-517, wherein the ninth nucleoside of the antisense strand comprises the 2′-O-methyl modified nucleoside, in a 5′ to 3′ direction.

[1100] 519. The method of any one of embodiments 507-518, wherein the tenth nucleoside of the antisense strand comprises the 2′-O-methyl modified nucleoside, in a 5′ to 3′ direction.

[1101] 520. The method of any one of embodiments 507-519, wherein the eleventh nucleoside of the antisense strand comprises the 2′-O-methyl modified nucleoside, in a 5′ to 3′ direction.

[1102] 521. The method of any one of embodiments 507-520, wherein the twelfth nucleoside of the antisense strand comprises the 2′-O-methyl modified nucleoside, in a 5′ to 3′ direction.

[1103] 522. The method of any one of embodiments 507-521, wherein the thirteenth nucleoside of the antisense strand comprises the 2′-O-methyl modified nucleoside, in a 5′ to 3′ direction.

[1104] 523. The method of any one of embodiments 507-522, wherein the fifteenth nucleoside of the antisense strand comprises the 2′-O-methyl modified nucleoside, in a 5′ to 3′ direction.

[1105] 524. The method of any one of embodiments 507-523, wherein the seventeenth nucleoside of the antisense strand comprises the 2′-O-methyl modified nucleoside, in a 5′ to 3′ direction.

[1106] 525. The method of any one of embodiments 507-524, wherein the eighteenth nucleoside of the antisense strand comprises the 2′-O-methyl modified nucleoside, in a 5′ to 3′ direction.

[1107] 526. The method of any one of embodiments 507-525, wherein the nineteenth nucleoside of the antisense strand comprises the 2′-O-methyl modified nucleoside, in a 5′ to 3′ direction.

[1108] 527. The method of any one of embodiments 507-526, wherein the twentieth nucleoside of the antisense strand comprises the 2′-O-methyl modified nucleoside, in a 5′ to 3′ direction.

[1109] 528. The method of any one of embodiments 507-527, wherein the twenty-first nucleoside of the antisense strand comprises the 2′-O-methyl modified nucleoside, in a 5′ to 3′ direction.

[1110] 529. The method of any one of embodiments 507-528, wherein the first, third, fifth, seventh, eleventh, twelfth, thirteenth, fifteenth, seventeenth, nineteenth, twentieth, and twenty-first nucleosides of the antisense strand comprises the 2′-O-methyl modified nucleoside, in a 5′ to 3′ direction.

[1111] 530. The method of any one of embodiments 507-529, wherein the antisense strand comprises at least two contiguous 2′-O-methyl modified nucleosides.

[1112] 531. The method of embodiment 530, wherein the at least two contiguous 2′-O-methyl modified nucleosides is three contiguous 2′-O-methyl modified nucleosides.

[1113] 532. The method of embodiment 530, wherein the at least two contiguous 2′-O-methyl modified nucleosides is four contiguous 2′-O-methyl modified nucleosides.

[1114] 533. The method of embodiment 530, wherein the at least two contiguous 2′-O-methyl modified nucleosides is five contiguous 2′-O-methyl modified nucleosides.

[1115] 534. The method of embodiment 530, wherein the at least two contiguous 2′-O-methyl modified nucleosides is six contiguous 2′-O-methyl modified nucleosides.

[1116] 535. The method of embodiment 530, wherein the at least two contiguous 2′-O-methyl modified nucleosides is seven contiguous 2′-O-methyl modified nucleosides.

[1117] 536. The method of any one of embodiments 507-535, wherein the antisense strand comprises a first sequence comprising at least two contiguous 2′-O-methyl modified nucleosides and a second sequence comprising at least two contiguous 2′-O-methyl modified nucleosides.

[1118] 537. The method of embodiment 536, wherein the first sequence comprises at least three contiguous 2′-O-methyl modified nucleosides, and the second sequence comprises at least three contiguous 2′-O-methyl modified nucleosides.

[1119] 538. The method of embodiment 536, wherein the first sequence comprises three contiguous 2′-O-methyl modified nucleosides, and the second sequence comprises three contiguous 2′-O-methyl modified nucleosides.

[1120] 539. The method of embodiment 536, wherein the first sequence comprises four contiguous 2′-O-methyl modified nucleosides, and the second sequence comprises five contiguous 2′-O-methyl modified nucleosides.

[1121] 540. The method of embodiment 536, wherein the first sequence comprises seven contiguous 2′-O-methyl modified nucleosides, and the second sequence comprises five contiguous 2′-O-methyl modified nucleosides.

[1122] 541. The method of embodiment 536, wherein the first sequence comprises at least four contiguous 2′-O-methyl modified nucleosides.

[1123] 542. The method of embodiment 536, wherein the first sequence comprises at least five contiguous 2′-O-methyl modified nucleosides.

[1124] 543. The method of embodiment 536, wherein the first sequence comprises at least six contiguous 2′-O-methyl modified nucleosides.

[1125] 544. The method of embodiment 536, wherein the first sequence comprises at least seven contiguous 2′-O-methyl modified nucleosides.

[1126] 545. The method of any one of embodiments 541-544, wherein the second sequence comprises at least four contiguous 2′-O-methyl modified nucleosides.

[1127] 546. The method of any one of embodiments 541-544, wherein the second sequence comprises at least five contiguous 2′-O-methyl modified nucleosides.

[1128] 547. The method of any one of embodiments 511-544, wherein the second sequence comprises at least six contiguous 2′-O-methyl modified nucleosides.

[1129] 548. The method of any one of embodiments 511-544, wherein the second sequence comprises at least seven contiguous 2′-O-methyl modified nucleosides.

[1130] 549. The method of any one of embodiments 368-548, wherein the sense strand comprises a ribose.

[1131] 550. The method of embodiment 549, wherein the sense strand comprises about 1, 2, 3, 4, 5, 6, 7, 8, 9, 10, 11, 12, 13, 14, 15, 16, 17, 18, 19, 20, or 21 ribose.

[1132] 551. The method of embodiment 549 or embodiment 550, wherein the first nucleoside of the sense strand comprises the ribose, in a 5′ to 3′ direction.

[1133] 552. The method of any one of embodiments 549-551, wherein the second nucleoside of the sense strand comprises the ribose, in a 5′ to 3′ direction.

[1134] 553. The method of any one of embodiments 549-552, wherein the third nucleoside of the sense strand comprises the ribose, in a 5′ to 3′ direction.

[1135] 554. The method of any one of embodiments 549-553, wherein the fourth nucleoside of the sense strand comprises the ribose, in a 5′ to 3′ direction.

[1136] 555. The method of any one of embodiments 549-554, wherein the fifth nucleoside of the sense strand comprises the ribose, in a 5′ to 3′ direction.

[1137] 556. The method of any one of embodiments 549-555, wherein the sixth nucleoside of the sense strand comprises the ribose, in a 5′ to 3′ direction.

[1138] 557. The method of any one of embodiments 549-556, wherein the seventh nucleoside of the sense strand comprises the ribose, in a 5′ to 3′ direction.

[1139] 558. The method of any one of embodiments 549-557, wherein the eighth nucleoside of the sense strand comprises the ribose, in a 5′ to 3′ direction.

[1140] 559. The method of any one of embodiments 549-558, wherein the ninth nucleoside of the sense strand comprises the ribose, in a 5′ to 3′ direction.

[1141] 560. The method of any one of embodiments 549-559, wherein the tenth nucleoside of the sense strand comprises the ribose, in a 5′ to 3′ direction.

[1142] 561. The method of any one of embodiments 549-560, wherein the eleventh nucleoside of the sense strand comprises the ribose, in a 5′ to 3′ direction.

[1143] 562. The method of any one of embodiments 549-561, wherein the twelfth nucleoside of the sense strand comprises the ribose, in a 5′ to 3′ direction.

[1144] 563. The method of any one of embodiments 549-562, wherein the thirteenth nucleoside of the sense strand comprises the ribose, in a 5′ to 3′ direction.

[1145] 564. The method of any one of embodiments 549-563, wherein the fourteenth nucleoside of the sense strand comprises the ribose, in a 5′ to 3′ direction.

[1146] 565. The method of any one of embodiments 549-564, wherein the fifteenth nucleoside of the sense strand comprises the ribose, in a 5′ to 3′ direction.

[1147] 566. The method of any one of embodiments 549-565, wherein the sixteenth nucleoside of the sense strand comprises the ribose, in a 5′ to 3′ direction.

[1148] 567. The method of any one of embodiments 549-566, wherein the seventeenth nucleoside of the sense strand comprises the ribose, in a 5′ to 3′ direction.

[1149] 568. The method of any one of embodiments 549-567, wherein the eighteenth nucleoside of the sense strand comprises the ribose, in a 5′ to 3′ direction.

[1150] 569. The method of any one of embodiments 549-568, wherein the nineteenth nucleoside of the sense strand comprises the ribose, in a 5′ to 3′ direction.

[1151] 570. The method of any one of embodiments 549-569, wherein the twentieth nucleoside of the sense strand comprises the ribose, in a 5′ to 3′ direction.

[1152] 571. The method of any one of embodiments 549-570, wherein the twenty-first nucleoside of the sense strand comprises the ribose, in a 5′ to 3′ direction.

[1153] 572. The method of any one of embodiments 368-571, wherein the antisense strand comprises a ribose.

[1154] 573. The method of embodiment 572, wherein the antisense strand comprises about 1, 2, 3, 4, 5, 6, 7, 8, 9, 10, 11, 12, 13, 14, 15, 16, 17, 18, 19, 20, or 21 ribose.

[1155] 574. The method of embodiment 572 or embodiment 573, wherein the first nucleoside of the antisense strand comprises the ribose, in a 5′ to 3′ direction.

[1156] 575. The method of any one of embodiments 572-574, wherein the second nucleoside of the antisense strand comprises the ribose, in a 5′ to 3′ direction.

[1157] 576. The method of any one of embodiments 572-575, wherein the third nucleoside of the antisense strand comprises the ribose, in a 5′ to 3′ direction.

[1158] 577. The method of any one of embodiments 572-576, wherein the fourth nucleoside of the antisense strand comprises the ribose, in a 5′ to 3′ direction.

[1159] 578. The method of any one of embodiments 572-577, wherein the fifth nucleoside of the antisense strand comprises the ribose, in a 5′ to 3′ direction.

[1160] 579. The method of any one of embodiments 572-578, wherein the sixth nucleoside of the antisense strand comprises the ribose, in a 5′ to 3′ direction.

[1161] 580. The method of any one of embodiments 572-579, wherein the seventh nucleoside of the antisense strand comprises the ribose, in a 5′ to 3′ direction.

[1162] 581. The method of any one of embodiments 572-580, wherein the eighth nucleoside of the antisense strand comprises the ribose, in a 5′ to 3′ direction.

[1163] 582. The method of any one of embodiments 572-581, wherein the ninth nucleoside of the antisense strand comprises the ribose, in a 5′ to 3′ direction.

[1164] 583. The method of any one of embodiments 572-582, wherein the tenth nucleoside of the sense antisense comprises the ribose, in a 5′ to 3′ direction.

[1165] 584. The method of any one of embodiments 572-583, wherein the eleventh nucleoside of the antisense strand comprises the ribose, in a 5′ to 3′ direction.

[1166] 585. The method of any one of embodiments 572-584, wherein the twelfth nucleoside of the antisense strand comprises the ribose, in a 5′ to 3′ direction.

[1167] 586. The method of any one of embodiments 572-585, wherein the thirteenth nucleoside of the antisense strand comprises the ribose, in a 5′ to 3′ direction.

[1168] 587. The method of any one of embodiments 572-586, wherein the fourteenth nucleoside of the antisense strand comprises the ribose, in a 5′ to 3′ direction.

[1169] 588. The method of any one of embodiments 572-587, wherein the fifteenth nucleoside of the antisense strand comprises the ribose, in a 5′ to 3′ direction.

[1170] 589. The method of any one of embodiments 572-588, wherein the sixteenth nucleoside of the antisense strand comprises the ribose, in a 5′ to 3′ direction.

[1171] 590. The method of any one of embodiments 572-589, wherein the seventeenth nucleoside of the antisense strand comprises the ribose, in a 5′ to 3′ direction.

[1172] 591. The method of any one of embodiments 572-590, wherein the eighteenth nucleoside of the antisense strand comprises the ribose, in a 5′ to 3′ direction.

[1173] 592. The method of any one of embodiments 572-591, wherein the nineteenth nucleoside of the antisense strand comprises the ribose, in a 5′ to 3′ direction.

[1174] 593. The method of any one of embodiments 572-592, wherein the twentieth nucleoside of the antisense strand comprises the ribose, in a 5′ to 3′ direction.

[1175] 594. The method of any one of embodiments 572-593, wherein the twenty-first nucleoside of the antisense strand comprises the ribose, in a 5′ to 3′ direction.

[1176] 595. The method of any one of embodiments 368-594, further comprising a lipid attached at either 3′ or 5′ terminus.

[1177] 596. The method of embodiment 595, wherein the lipid comprises cholesterol, myristoyl, palmitoyl, stearoyl, lithocholoyl, docosanoyl, docosahexaenoyl, myristyl, palmityl stearyl, α-tocopherol, or a combination thereof.

[1178] 597. The method of embodiment 595 or embodiment 596, wherein the lipid comprises a first lipid on the sense strand and a second lipid on the antisense strand.

[1179] 598. The method of any one of embodiments 595-597, wherein the lipid is positioned on the sense strand.

[1180] 599. The method of embodiment 598, wherein the lipid is positioned at the 5′ end of the sense strand.

[1181] 600. The method of embodiment 598, wherein the lipid is positioned at the 3′ end of the sense strand.

[1182] 601. The method of any one of embodiments 595-600, wherein the lipid is positioned on the antisense strand.

[1183] 602. The method of embodiment 601, wherein the lipid is positioned at the 5′ end of the antisense strand.

[1184] 603. The method of embodiment 601, wherein the lipid is positioned at the 3′ end of the antisense strand.

[1185] 604. The method of any one of embodiments 368-594, further comprising an arginine-glycine-aspartic acid (RGD) ligand attached at a 3′ terminus and/or a 5′ terminus.

[1186] 605. The method of any one of embodiments 368-603, further comprising an RGD ligand attached at either a 3′ terminus or a 5′ terminus.

[1187] 606. The method of embodiment 604 or 605, wherein the RGD ligand comprises Cyclo(-Arg-Gly-Asp-D-Phe-Cys), Cyclo(-Arg-Gly-Asp-D-Phe-Lys), Cyclo(-Arg-Gly-Asp-D-Phe-azido), Cyclo(-Arg-Gly-Asp-D-Phe-alkynyl), amino benzoic acid-based RGD, or a combination thereof.

[1188] 607. The method of embodiment 604 or embodiment 605, wherein the RGD ligand is composed of 2, 3 or 4 RGD ligands.

[1189] 608. The method of any one of embodiments 604-607, wherein the RGD is positioned on the sense strand.

[1190] 609. The method of embodiment 608, wherein the RGD is positioned at the 5′ end of the sense strand.

[1191] 610. The method of embodiment 608, wherein the RGD is positioned at the 3′ end of the sense strand.

[1192] 611. The method of any one of embodiments 604-607, wherein the RGD is positioned on the antisense strand.

[1193] 612. The method of embodiment 611, wherein the RGD ligand is positioned at the 5′ end of the antisense strand.

[1194] 613. The method of embodiment 611, wherein the RGD ligand is positioned at the 3′ end of the antisense strand.

[1195] 614. The method of any one of embodiments 368-613, wherein the sense strand and the antisense strand form a double-stranded RNA duplex.

[1196] 615. The method of embodiment 614, wherein the double-stranded RNA duplex comprises from about 14 to about 30 nucleosides.

[1197] 616. The method of embodiment 614, wherein the double-stranded RNA duplex comprises from about 17 to about 30 nucleosides.

[1198] 617. The method of embodiment 614, wherein the double-stranded RNA duplex comprises about 21 nucleosides.

[1199] 618. The method of any one of embodiments 614-617, wherein the double-stranded RNA duplex comprises at least one base pair.

[1200] 619. The method of embodiment 618, wherein the first base pair of the double-stranded RNA duplex is an AU base pair.

[1201] 620. The method of any one of embodiments 368-614, wherein the sense strand comprises pattern 1S: 5′ fN s mN s fN-mN-fN-mN-fN-fN-fN-mN-fN-mN-fN-mN-fN-mN-fN-mN-fN s mN s mN 3′ (SEQ ID NO: 11381), wherein “fN” is a 2′-fluoro-modified nucleoside, “mN” is a 2′-O-methyl modified nucleoside, “-” is a phosphodiester, and “s” is a phosphorothioate.

[1202] 621. The method of any one of embodiments 368-614, wherein the sense strand comprises pattern 2S: 5′ mN s mN s mN-mN-fN-mN-fN-fN-fN-mN-mN-mN-mN-mN-mN-mN-mN-mN-mN s mN s mN 3′ (SEQ ID NO: 11382), wherein “fN” is a 2′-fluoro-modified nucleoside, “mN” is a 2′-O-methyl modified nucleoside, “-” is a phosphodiester, and “s” is a phosphorothioate.

[1203] 622. The method of any one of embodiments 368-614, wherein the sense strand comprises pattern 3S: 5′ mN s mN s mN-mN-fN-mN-fN-mN-fN-mN-mN-mN-mN-mN-mN-mN-mN-mN-mN s mN s mN 3′ (SEQ ID NO: 11383), wherein “fN” is a 2′-fluoro-modified nucleoside, “mN” is a 2′-O-methyl modified nucleoside, “-” is a phosphodiester, and “s” is a phosphorothioate.

[1204] 623. The method of any one of embodiments 368-614, wherein the sense strand comprises pattern 4S: 5′ fN s mN s fN-mN-fN-mN-fN-fN-fN-mN-fN-mN-fN-mN-fN-mN-fN-mN-fN s mN s mN—N-Lipid 3′ (SEQ ID NO: 11384), wherein “fN” is a 2′-fluoro-modified nucleoside, “mN” is a 2′-O-methyl modified nucleoside, “-” is a phosphodiester, “s” is a phosphorothioate, and N comprises one or more nucleosides.

[1205] 624. The method of embodiment 623, wherein the one or more nucleosides is three nucleosides.

[1206] 625. The method of embodiment 623 or 624, wherein each of the one or more nucleosides independently comprise a ribose or deoxyribose.

[1207] 626. The method of any one of embodiments 368-619, wherein the sense strand comprises pattern 5S: 5′ mN s mN s mN-mN-fN-mN-fN-fN-fN-mN-mN-mN-mN-mN-mN-mN-mN-mN-mN s mN s mN—N-Lipid 3′ (SEQ ID NO: 11385), wherein “fN” is a 2′-fluoro-modified nucleoside, “mN” is a 2′-O-methyl modified nucleoside, “-” is a phosphodiester, “s” is a phosphorothioate, and N comprises one or more nucleosides.

[1208] 627. The method of embodiment 626, wherein the one or more nucleosides is three nucleosides.

[1209] 628. The method of embodiment 626 or 627, wherein each of the one or more nucleosides independently comprise a ribose or deoxyribose.

[1210] 629. The method of any one of embodiments 368-628, wherein the antisense strand comprises pattern 1AS: 5′ mN s fN s mN-fN-mN-fN-mN-fN-mN-fN-mN-mN-mN-fN-mN-fN-mN-fN-mN s mN s mN 3′ (SEQ ID NO: 11386), wherein “fN” is a 2′-fluoro-modified nucleoside, “mN” is a 2′-O-methyl modified nucleoside, “-” is a phosphodiester, and “s” is a phosphorothioate.

[1211] 630. The method of any one of embodiments 368-628, wherein the antisense strand comprises pattern 2AS: 5′ mN s fN s mN-mN-mN-fN-mN-fN-fN-mN-mN-mN-mN-fN-mN-fN-mN-mN-mN s mN s mN 3′ (SEQ ID NO: 11387), wherein “fN” is a 2′-fluoro-modified nucleoside, “mN” is a 2′-O-methyl modified nucleoside, “-” is a phosphodiester, and “s” is a phosphorothioate.

[1212] 631. The method of any one of embodiments 368-628, wherein the antisense strand comprises pattern 3AS: 5′ mN s fN s mN-mN-mN-fN-mN-mN-mN-mN-mN-mN-mN-fN-mN-fN-mN-mN-mN s mN s mN 3′ (SEQ ID NO: 11388), wherein “fN” is a 2′-fluoro-modified nucleoside, “mN” is a 2′-O-methyl modified nucleoside, “-” is a phosphodiester, and “s” is a phosphorothioate.

[1213] 632. The method of any one of embodiments 368-628, wherein the antisense strand comprises pattern 4AS: 5′ mN s fN s mN-fN-mN-fN-mN-mN-mN-mN-mN-mN-mN-fN-mN-fN-mN-mN-mN s mN s mN 3′ (SEQ ID NO: 11389), wherein “fN” is a 2′-fluoro-modified nucleoside, “mN” is a 2′-O-methyl modified nucleoside, “-” is a phosphodiester, and “s” is a phosphorothioate.

[1214] 633. The method of any one of embodiments 368-619, wherein the sense strand comprises pattern 1S and the antisense strand comprises pattern 1AS.

[1215] 634. The method of any one of embodiments 368-619, wherein the sense strand comprises pattern 2S and the antisense strand comprises pattern 2AS.

[1216] 635. The method of any one of embodiments 368-619, wherein the sense strand comprises pattern 3S and the antisense strand comprises pattern 3AS.

[1217] 636. The method of any one of embodiments 368-619, wherein the sense strand comprises pattern 4S and the antisense strand comprises pattern 4AS.

### FURTHER EMBODIMENTS

[1218] 1. A composition comprising an oligonucleotide that targets angiopoietin-like 7 (ANGPTL7) and when administered to a cell decreases expression of ANGPTL7, wherein the oligonucleotide comprises a small interfering RNA (siRNA) comprising a sense strand and an antisense strand, and
[1219] wherein:
[1220] (i) the sense strand comprises the modification pattern of: 5′-NfsnsNfnNfnNfnNfnNfnNfnNfnNfnNfsnsn-3′ (SEQ ID NO: 11394);
[1221] (ii) the antisense strand comprises a modification pattern selected from the group consisting of: 5′-nsNfsnNfnNfnNfnNfnNfnNfnNfnNfnsnsn-3′ (SEQ ID NO: 11399), 5′-nsNfsnNfnNfnNfNfnnnnNfnNfnnnsnsn-3′ (SEQ ID NO: 11400), and 5′-nsNfsnnnnnnnnnnnNfnnnnnsnsn-3′ (SEQ ID NO: 11401); or
[1222] (iii) a combination of (i) and (ii),
[1223] wherein “Nf” is a 2′-fluoro-modified nucleoside, “n” is a 2′-O-methyl modified nucleoside, and “s” is a phosphorothioate linkage.

[1224] 2. The composition of embodiment 1, wherein the oligonucleotide comprises a lipid attached at a 3′ or a 5′ terminus of the oligonucleotide.

[1225] 3. The composition of embodiment 2, wherein the oligonucleotide comprises a lipid attached at a 3′ terminus of the sense strand.

[1226] 4. The composition of embodiment 2, wherein the oligonucleotide comprises a lipid attached at a 5′ terminus of the sense strand.

[1227] 5. A composition comprising an oligonucleotide that targets angiopoietin-like 7 (ANGPTL7) and when administered to a cell decreases expression of ANGPTL7, wherein the oligonucleotide comprises a small interfering RNA (siRNA) comprising a sense strand and an antisense strand, and
[1228] wherein the sense strand comprises the modification pattern of: 5′-nsnsnnNfnNfnNfnnnnnnnnnnsnsn-Lipid-3′ (SEQ ID NO: 11396),
[1229] wherein “Nf” is a 2′-fluoro-modified nucleoside, “n” is a 2′-O-methyl modified nucleoside, and “s” is a phosphorothioate linkage.

[1230] 6. The composition of any one of the preceding embodiments, wherein the lipid is selected from the group consisting of: cholesterol, myristoyl, palmitoyl, stearoyl, lithocholoyl, docosanoyl, docosahexaenoyl, myristyl, palmityl stearyl, α-tocopherol, and any combination thereof.

[1231] 7. The composition of embodiment 6, wherein the lipid comprises cholesterol.

[1232] 8. The composition of any one of the preceding embodiments, wherein the oligonucleotide further comprises an arginine-glycine-aspartic acid (RGD) peptide attached at a 3′ or 5′ terminus of the oligonucleotide.

[1233] 9. The composition of embodiment 8, wherein the RGD peptide is selected from the group consisting of: Cyclo(-Arg-Gly-Asp-D-Phe-Cys), Cyclo(-Arg-Gly-Asp-D-Phe-Lys), Cyclo(-Arg-Gly-Asp-D-Phe-azido), an amino benzoic acid derived RGD, and any combination thereof.

[1234] 10. The composition of any one of the preceding embodiments, wherein the antisense strand is complementary to a portion of a nucleic acid having the nucleoside sequence of SEQ ID NO: 11085.

[1235] 11. The composition of any one of the preceding embodiments, wherein the sense strand and the antisense strand each have 14 to 30 nucleotides.

[1236] 12. The composition of any one of the preceding embodiments, wherein the sense strand comprises a nucleoside sequence having at least 85% sequence identity to any one of SEQ ID NOS: 1-2206, 11450-11474, or 11529-11533.

[1237] 13. The composition of any one of the preceding embodiments, wherein the sense strand comprises the nucleoside sequence of any one of SEQ ID NOS: 1-2206, 11450-11474, or 11529-11533, or a sense strand sequence thereof having 1 or 2 nucleoside substitutions, additions, or deletions.

[1238] 14. The composition of any one of the preceding embodiments, wherein the sense strand comprises the nucleoside sequence of any one of SEQ ID NOS: 1-2206, 11450-11474, or 11529-11533.

[1239] 15. The composition of any one of the preceding embodiments, wherein the sense strand consists of the nucleoside sequence of any one of SEQ ID NOS: 1-2206, 11450-11474, or 11529-11533.

[1240] 16. The composition of any one of the preceding embodiments, wherein the sense strand comprises one of SEQ ID NOS: 11470, 11473, or 11474.

[1241] 17. The composition of any one of the preceding embodiments, wherein the antisense strand comprises a nucleoside sequence having at least 85% sequence identity to any one of SEQ ID NOS: 2207-4412, 11475-11499, or 11534-11538.

[1242] 18. The composition of any one of the preceding embodiments, wherein the antisense strand comprises the nucleoside sequence of any one of SEQ ID NOS: 2207-4412, 11475-11499, or 11534-11538, or an antisense strand sequence thereof having 1 or 2 nucleoside substitutions, additions, or deletions.

[1243] 19. The composition of any one of the preceding embodiments, wherein the antisense strand comprises the nucleoside sequence of any one of SEQ ID NOS: 2207-4412, 11475-11499, or 11534-11538.

[1244] 20. The composition of any one of the preceding embodiments, wherein the antisense strand consists of the nucleoside sequence of any one of SEQ ID NOS: 2207-4412, 11475-11499, or 11534-11538.

[1245] 21. The composition of any one of the preceding embodiments, wherein the antisense strand comprises one of SEQ ID NOS: 11495, 11498, or 11499.

[1246] 22. A composition comprising an oligonucleotide that targets angiopoietin like 7 (ANGPTL7) and when administered to a cell decreases expression of ANGPTL7, wherein the oligonucleotide comprises a small interfering RNA (siRNA) comprising a sense strand comprising a nucleoside sequence having at least 85% sequence identity to any one of SEQ ID NOS: 11402-11421, 11442-11445, or 11500-11503; and an antisense strand comprising a nucleoside sequence having at least 85% sequence identity to any one of SEQ ID NOS: 11422-11441, 11446-11449, or 11504-11507.

[1247] 23. The composition of embodiment 22, wherein the sense strand comprises the nucleoside sequence of any one of SEQ ID NOS: 11402-11421, 11442-11445, or 11500-11503, or a sense strand sequence thereof having 1 or 2 nucleoside substitutions, additions, or deletions.

[1248] 24. The composition of embodiment 22 or 23, wherein the sense strand comprises the nucleoside sequence of any one of SEQ ID NOS: 11402-11421, 11442-11445, or 11500-11503.

[1249] 25. The composition of any one of the embodiments 22-24, wherein the sense strand consists of the nucleoside sequence of any one of SEQ ID NOS: 11402-11421, 11442-11445, or 11500-11503.

[1250] 26. The composition of any one of embodiments 22-25, wherein the antisense strand comprises the nucleoside sequence of any one of SEQ ID NOS: 11422-11441, 11446-11449, or 11504-11507, or an antisense strand sequence thereof having 1 or 2 nucleoside substitutions, additions, or deletions.

[1251] 27. The composition of any one of embodiments 22-26, wherein the antisense strand comprises the nucleoside sequence of any one of SEQ ID NOS: 11422-11441, 11446-11449, or 11504-11507.

[1252] 28. The composition of any one of the embodiments 22-27, wherein the antisense strand consists of the nucleoside sequence of any one of SEQ ID NOS: 11422-11441, 11446-11449, or 11504-11507.

[1253] 29. A composition comprising an oligonucleotide that targets angiopoietin like 7 (ANGPTL7) and when administered to a cell decreases expression of ANGPTL7, wherein the oligonucleotide comprises a small interfering RNA (siRNA) comprising a sense strand comprising a nucleoside sequence of any one of SEQ ID NOS: 11377, 11442, 11445, 11500, 11501, 11502, or 11503; and an antisense strand comprising a nucleoside sequence of any one of SEQ ID NOS: 11306, 11446, 11449, 11504, 11505, 11506, or 11507.

[1254] 30. The composition of embodiment 29, wherein the sense strand consists of a nucleoside sequence of any one of SEQ ID NOS: 11377, 11442, 11445, 11500, 11501, 11502, or 11503.

[1255] 31. The composition of embodiment 29 or 30, wherein the antisense strand consists of a nucleoside sequence of any one of SEQ ID NOS: 11306, 11446, 11449, 11504, 11505, 11506, or 11507.

[1256] 32. A pharmaceutical composition comprising:
[1257] (a) a composition of any one of the preceding embodiments; and
[1258] (b) a pharmaceutically acceptable carrier.

[1259] 33. A method of decreasing expression of angiopoietin-like 7 (ANGPTL7) in a cell, the method comprising administering to the cell a composition of any one of the preceding embodiments, thereby decreasing expression of ANGPTL7 in the cell.

[1260] 34. A method of treating an ocular disorder in a subject in need thereof, the method comprising administering to the subject a therapeutically effective amount of a composition of any one of the preceding embodiments, thereby treating the ocular disorder in the subject.

[1261] 35. The method of embodiment 34, wherein the ocular disorder comprises a glaucoma.

[1262] 36. The method of embodiment 34 or 35, wherein the composition decreases intraocular pressure in an eye of the subject relative to a baseline intraocular pressure measurement obtained from the subject prior to administering the composition to the subject.

[1263] 37. The method of any one of embodiments 34-36, wherein the composition decreases intraocular pressure in the eye of the subject by at least 10% relative to the baseline intraocular pressure measurement obtained from the subject prior to administering the composition.

### EXAMPLES

[1264] The following non-limiting examples serve to illustrate selected embodiments. It will be appreciated that variations in proportions and alternatives in elements of the components shown will be apparent to those skilled in the art and are within the scope of embodiments presented herein.

### Example 1. Association of ANGPTL7 Protein Altering Variants with IOP and Glaucoma

[1265] Applicant evaluated approximately 30,000,000 imputed variants in ˜375,000 individuals from the UK Biobank cohort for associations with glaucoma and intraocular pressure (IOP) (see Table 2A). Elevated IOP is a primary causal feature and risk factor for glaucoma.

TABLE 2A
Definitions and Sample Counts for Evaluated Phenotypes

| Trait | Case Definition | Case # | Control # |
|---|---|---|---|
| Glaucoma | Hospital diagnosis of glaucoma OR | 12,173 | 363,361 |
| | glaucoma surgery or meds OR self- | | |
| | reported history of glaucoma | | |
| IOP | intra-ocular pressure measure | 79,791 | NA |

[1266] Associations were observed between a rare missense variant (rs28991009; minor allele frequency ˜0.0073) within ANGPTL7 and glaucoma and related traits (see Table 2B). The major allele of this variant (chrl-11253684-G, hg19) encodes for a glutamine and the minor allele (chrl-11253684-T, hg19) a histidine at amino acid position 175 of the full length ANGPTL7 protein (Gln175His; Q175H). Each copy of the minor (T) allele in carriers of this variant confers an approximately 35% reduction in glaucoma risk compared with non-carriers (p=8.67×10\hat{ }-7; OR=0.65), and a significant association with reduced IOP was observed (p=1.94×10\hat{ }-13; beta=−0.21).

TABLE 2B
Association of ANGPTL7 Variant rs28991009
with Glaucoma and Related Traits

| Trait | Variant | Effect Size | P |
|---|---|---|---|
| Glaucoma | rs28991009 | 0.65 (OR) | 8.67E−07 |
| IOP | rs28991009 | −0.21 (Beta) | 1.95E−13 |

[1267] Next, an evaluation of the likely deleterious subset of the directly genotyped protein altering variants in ANTPTL7 was performed, resulting in inclusion of the Q175H missense variant (MAF=0.0073; rs28991009), an R140H missense variant (MAF=0.0024; rs28991002), and an R177Ter stop gain variant (MAF=0.0004; rs143435072). Gene burden tests are used to aggregate rare variants in a gene by functional class that are too rare to be tested individually. Although imputation of array genotypes has improved significantly with the availability of large reference datasets consisting of haplotypes observed in whole genome sequencing studies, imputation of very rare variants remains challenging and can be inaccurate. Individuals carrying predicted ANGPTL7 protein altering variants had a significantly lower IOP when compared to non-carriers (Table 3).

TABLE 3
Association of ANGPTL7 Protein Altering Variants with IOP

| RSID | Function | AAF | REF | ALT | BETA | P |
|---|---|---|---|---|---|---|
| rs28991009 | Missense | 7.27E−03 | G | T | −0.21 | 1.95E−13 |
| | (Q175H) | | | | | |
| rs28991002 | Missense | 2.36E−03 | G | A | −0.18 | 1.88E−04 |
| | (R140H) | | | | | |
| rs143435072 | Stop gain | 3.81E−04 | C | T | −0.62 | 1.00E−03 |
| | (R177Ter) | | | | | |

[1268] The protective (i.e. IOP-lowering) associations with Q175H and R140H were directionally consistent with the predicted loss of function variant R177Ter; in other words, the minor allele of all three variants was associated with decreased IOP. By inference, these data indicate that loss of function (LOF) of ANGPTL7 protects against the development of ocular hypertension and glaucoma. Accordingly, in some cases therapeutic inhibition or modulation of ANGPTL7 may be an effective genetically-informed method of treatment for these diseases.

### Example 2. Protective (i.e. IOP-Lowering) Variants in ANGPTL7 Result in Less Secreted ANGPTL7 Protein

[1269] Pre-mRNA or protein-coding sequence (CDS) expression constructs encoding for wild type, Q175H, R140H and R177Ter proteins were generated (FIG. 1). The pre-mRNA or CDS of the protein coding transcript (ENST00000376819) of ANGPTL7 was cloned into a pcDNA3.1(+) vector driven by a CMV promoter. Note that the pre-mRNA constructs contained exons, introns, and 5′ and 3′ UTRs, while the CDS constructs contained only exons. The purpose in utilizing pre-mRNA constructs is that they allow for evaluation of alternatively spliced transcripts. Empty vector and a GFP tagged vector were used as controls. For Q175H (rs28991009) expression constructs, the T allele replaces the G allele at DNA sequence position chrl:11253684 (human genome build 37). This creates a Gln175His amino acid substitution in the ANGPTL7 protein. For R140H (rs28991002) expression constructs, the A allele replaces the G allele at DNA position chrl:11252369 (human genome build 37). For R177Ter (rs143435072) expression constructs, the T allele replaces the C allele at DNA sequence position chrl:11253688 (human genome build 37). This creates an Arg177Ter premature stop codon.

[1270] Transfections of HEK293 cells were optimized using the GFP-tagged and ANGPTL7 WT and Q175H pre-mRNA constructs. Briefly, HEK293 cells were plated at 10,000 cells/well in a 96-well plate in complete growth media and grown for 48 hours followed by a media change. Cells were then transfected with 50 ng or 100 ng of plasmid DNA and 0.15 ul/well or 0.30 ul/well of TransIT-2020 or 0.20 ul/well or 0.40 ul/well Lipofectamine LTX reagents. Cells were incubated for 60 hours, and then either imaged for GFP fluorescence (see FIG. 2) or harvested with Cells-to-Ct reagent and qPCR used to assess ANGPTL7 expression (see FIG. 3). The GFP vector transfection confirmed high transfection efficiency with TransIT-2020 reagent and the qPCR assay confirmed that both the wild-type and Q175H constructs produce ANGPTL7.

[1271] To evaluate, in parallel, the effects of the Q175H, R140H and R177Ter IOP-lowering variants on mRNA and protein expression levels, wild-type and variant constructs were transiently transfected and expressed in HEK293 cells. ANGPTL7 mRNA expression in empty vector transfected HEK293 cells was negligible, while expression from the plasmid constructs was robust and equivalent between the wild-type and variant (Q175H, R140H and R177Ter) transfected cells (FIG. 4).

[1272] Cell lysates and media from transfected cells were assayed to evaluate intracellular and secreted ANGPTL7 protein by western blot (FIG. 5). In empty vector transfected HEK293 cells, ANGPTL7 was not detectable by western blot. In cells transfected with the Q175H construct, ANGPTL7 was markedly reduced in the medium and increased in the cell lysate, suggesting a secretion defect. No protein was detected in lysates or media from cells transfected with the R177Ter construct, in spite of mRNA levels that are equivalent to wild type, suggesting degradation at the protein level rather than nonsense mediated decay. There was no apparent difference between wild type and R140H in either secreted or intracellular protein abundance by western blot.

[1273] Western blot results were validated using a quantitative ELISA assay (FIG. 6). Q175H protein was 6.8-fold more abundant in the cell lysate compared to wild-type, whereas the wild-type protein was 3.3-fold more abundant in the media. This results in a heavily skewed ratio of protein in the media versus lysate when comparing wild-type and Q175H missense protein (˜22:1 ratio) (FIG. 7). The R140H protein demonstrated a lower secretion ratio than wild type, though this difference was modest. Protein was below the ELISA limit of detection in both the media and cell lysate for cells transfected with the R177Ter construct, consistent with the western blot results.

[1274] Similar experiments were performed using CDS constructs rather than pre-mRNA constructs, and results were equivalent to those for the pre-mRNA constructs, as demonstrated by western Blot (FIG. 8).

[1275] Therefore, experimental evaluation of ANGPTL7 proteins demonstrates that genetic variants in ANGPTL7 that are observed to lower IOP and protect from ocular hypertension and glaucoma result in reduced intracellular and/or extracellular ANGPTL7 protein, thereby confirming utility of inhibiting or modulating ANGPTL7 for treatment of these diseases.

### Example 3. RNA Synthesis and Duplex Annealing

### 1. Oligonucleotide Synthesis:

[1276] All oligonucleotides are synthesized on an AKTA oligopilot synthesizer or an ABI 394 synthesizer. Commercially available controlled pore glass solid support (dT-CPG, 500A, Prime Synthesis) and RNA phosphoramidites with standard protecting groups, 5′-O-dimethoxytrityl N6-benzoyl-2′-t-butyldimethylsilyl-adenosine-3′-O—N,N′-diisopropyl-2-cyanoethylphosphoramidite, 5′-O-dimethoxytrityl-N4-acetyl-2′-t-butyldimethylsilyl-cytidine-3′-O—N,N′-diisopropyl-2-cyanoethylphosphoramidite, 5′-O-dimethoxytrityl-N2-isobutyryl-2′-t-butyldimethylsilyl-guanosine-3′-O—N,N′-diisopropyl-2-cyanoethylphosphoramidite, and 5′-O-dimethoxytrityl-2′-t-butyldimethylsilyl-uridine-3′-O—N,N′-diisopropyl-2-cyanoethylphosphoramidite (Pierce Nucleic Acids Technologies) are used for the oligonucleotide synthesis unless otherwise specified. The 2′-F phosphoramidites, 5′-O-dimethoxytrityl-N4-acetyl-2′-fluoro-cytidine-3′-O—N,N′-diisopropyl-2-cyanoethyl-phosphoramidite and 5′-O-dimethoxytrityl-2′-fluoro-uridine-3′-O—N,N′-diisopropyl-2-cyanoethyl-phosphoramidite are purchased from (Promega). All phosphoramidites are used at a concentration of 0.2M in acetonitrile (CH3CN) except for guanosine which is used at 0.2M concentration in 10% THF/ANC (v/v). Coupling/recycling time of 16 minutes is used. The activator is 5-ethyl thiotetrazole (0.75M, American International Chemicals), for the PO-oxidation Iodine/Water/Pyridine is used and the PS-oxidation PADS (2%>) in 2,6-lutidine/ACN (1:1 v/v) is used.

### 2. Deprotection-I (Nucleobase Deprotection)

[1277] After completion of synthesis, the support is transferred to a 100 ml glass bottle (VWR). The oligonucleotide is cleaved from the support with simultaneous deprotection of base and phosphate groups with 80 mL of a mixture of ethanolic ammonia [ammonia: ethanol (3:1)] for 6.5h at 55° C. The bottle is cooled briefly on ice and then the ethanolic ammonia mixture is filtered into a new 250 ml bottle. The CPG is washed with 2×40 mL portions of ethanol/water (1:1 v/v). The volume of the mixture is then reduced to ˜30 ml by roto-vap. The mixture is then frozen on dry ice and dried under vacuum on a speed vac.

3. Deprotection-II (Removal of 2′ TBDMS group)

[1278] The dried residue is resuspended in 26 ml of triethylamine, triethylamine trihydro fluoride (TEA.3HF) or pyridine-HF and DMSO (3:4:6) and heated at 60° C. for 90 minutes to remove the tert-butyldimethylsilyl (TBDMS) groups at the 2′ position. The reaction is then quenched with 50 ml of 20 mM sodium acetate and pH adjusted to 6.5, and stored in freezer until purification.

### 4. Analysis

[1279] The oligonucleotides are analyzed by high-performance liquid chromatography (HPLC) prior to purification and selection of buffer and column depends on nature of the sequence and or conjugated ligand.

### 5. HPLC Purification

[1280] The ligand conjugated oligonucleotides are purified reverse phase preparative HPLC. The unconjugated oligonucleotides are purified by anion-exchange HPLC on a TSK gel column packed in house. The buffers are 20 mM sodium phosphate (pH 8.5) in 10% CH3CN (buffer A) and 20 mM sodium phosphate (pH 8.5) in 10% CH3CN, 1M NaBr (buffer B). Fractions containing full-length oligonucleotides are pooled, desalted, and lyophilized. Approximately 0.15 OD of desalted oligonucleotides are diluted in water to 150 μL and then pipetted in special vials for CGE and LC/MS analysis.

[1281] Compounds are finally analyzed by LC-ESMS and CGE.

6. siRNA Preparation

[1282] For the preparation of siRNA, equimolar amounts of sense and antisense strand are heated in 1×PBS at 95° C. for 5 min and slowly cooled to room temperature.

[1283] Integrity of the duplex is confirmed by HPLC analysis.

### Example 4: Selection of Sequences in Order to Identify Therapeutic siRNAs to Modulate Expression of the ANGPTL7 mRNA

[1284] Screening sets were defined based by bioinformatic analysis. The therapeutic siRNA molecule had to target human ANGPTL7 as well as the ANGPTL7 sequence of at least one toxicology-relevant species, in this case, the non-human primates (NHP) rhesus and cynomolgus monkeys. The key drivers for the design of the screening set were predicted specificity of the siRNAs against the transcriptome of the relevant species as well as cross-reactivity between species. Predicted specificity in human, rhesus monkey, cynomolgus monkey, mouse, rat and dog was determined for sense (S) and antisense (AS) strand. These were assigned a “specificity score” which considers the likelihood of unintended downregulation of any other transcript by full or partial complementarity of an siRNA strand (up to 4 mismatches within positions 2-18) as well as the number and positions of mismatches. Thus, the predicted most likely off-target(s) for antisense and sense strand of each siRNA can be identified. In addition, the number of potential off-targets is used as an additional specificity factor in the specificity score. It is preferable to identify siRNAs with high specificity and a low number of predicted off-targets.

[1285] In addition to selecting siRNA sequences with high sequence specificity to ANGPTL7 mRNA, siRNA sequences within the seed region were analyzed for similarity to seed regions of known miRNAs. siRNAs can function in a miRNA like manner via base-pairing with complementary sequences within the 3′-UTR of mRNA molecules. The complementarity typically encompasses the 5′-bases at positions 2-7 of the miRNA (seed region). In order to circumvent siRNAs to act via functional miRNA binding sites, siRNA strands are avoided that contain natural miRNA seed regions. Seed regions identified in miRNAs from human, mouse, rat, rhesus monkey, dog, rabbit and pig are referred to as “conserved”. Combining the “specificity score” with miRNA seed analysis yields the “specificity category”. This is divided into categories 1-4, with 1 having the highest specificity and 4 having the lowest specificity. Each strand of the siRNA is assigned to a specificity category.

[1286] Species cross-reactivity was assessed for human, cynomolgus monkey, rhesus monkey, mouse, rat, dog, and rabbit. The analysis was based on a canonical siRNA design using 19 bases and 17 bases (without considering positions 1 and 19) for cross-reactivity. Full match as well as single mismatch analysis was included.

[1287] Analysis of the human Single Nucleotide Polymorphism (SNP) database (NCBI-DB-SNP) to identify siRNAs targeting regions with known SNPs was also carried out in order to identify siRNAs that may be non-functional in individuals containing the SNP. Information regarding the positions of SNPs within the target sequence as well as minor allele frequency (MAF) in case data was obtained in this analysis.

[1288] Initial analysis of the relevant ANGPTL7 mRNA sequence revealed few sequences can be identified that fulfil the specificity requirements and at the same time target ANGPTL7 mRNA in all relevant species. Therefore, it was decided to design independent screening subsets for the therapeutic siRNAs.

All siRNAs in these subsets recognize the human ANGPTL7 sequence, as a human cell culture system was selected for determination of in vitro activity. Therefore, all siRNAs in these subsets can be used to target human ANGPTL7 in a therapeutic setting.

[1289] The number of 19mer sequences that can be derived from human ANGPTL7 mRNA (NM_021146.4) without consideration of specificity or species cross-reactivity is 2,206 (sense strand SEQ ID NOS: 1-2206). This set would encompass all possible ANGPTL7 siRNA sequences.

[1290] Prioritizing sequences for target specificity, species cross-reactivity, miRNA seed region sequences and SNPs as described above yields siRNA subset A. This subset is composed of 207 siRNAs with sense strand SEQ ID NOS: 7, 39, 42, 92, 93, 94, 95, 98, 99, 103, 112, 113, 114, 115, 117, 118, 119, 120, 124, 125, 127, 206, 207, 227, 257, 271, 272, 480, 487, 488, 489, 490, 491, 492, 493, 497, 498, 499, 501, 579, 583, 584, 587, 588, 592, 593, 594, 596, 598, 600, 601, 602, 603, 604, 605, 606, 629, 630, 634, 636, 637, 642, 645, 646, 649, 652, 657, 658, 739, 740, 741, 742, 743, 751, 756, 804, 813, 817, 819, 845, 846, 849, 852, 871, 872, 873, 874, 875, 876, 878, 879, 881, 905, 906, 907, 908, 915, 916, 917, 918, 919, 920, 923, 943, 944, 948, 952, 953, 958, 960, 974, 976, 977, 979, 982, 983, 984, 985, 986, 988, 989, 990, 991, 992, 993, 997, 1000, 1001, 1002, 1003, 1004, 1009, 1011, 1016, 1020, 1021, 1085, 1086, 1087, 1088, 1092, 1094, 1097, 1105, 1107, 1131, 1132, 1133, 1134, 1138, 1140, 1197, 1198, 1199, 1201, 1202, 1260, 1262, 1263, 1264, 1424, 1425, 1427, 1429, 1430, 1434, 1435, 1436, 1438, 1460, 1463, 1524, 1525, 1527, 1528, 1530, 1532, 1533, 1537, 1538, 1539, 1541, 1639, 1640, 1654, 1691, 1692, 1693, 1694, 1762, 1764, 1765, 1794, 1795, 1796, 1797, 1798, 1968, 1969, 2030, 2085, 2087, 2089, 2091, 2095, 2099, and 2192.

[1291] The siRNAs in siRNA subset A has the following characteristics:
[1292] 1. Cross-reactivity: With 19mer in human ANGPTL7 mRNA, with 17mer/19mer in NHP ANGPTL7
[1293] 2. Specificity category: For human and NHP:—AS2 or better, SS3 or better miRNA seeds: AS+SS strand:—seed region not conserved in human, mouse, and rat and not present in >4 species
[1294] 3. Off-target frequency: <20 human off-targets matched with 2 mismatches by antisense strand
[1295] 4. SNPs: siRNA target sites do not harbor SNPs with a MAF ≥1% (pos. 2-18)

[1296] The siRNA sequences in siRNA subset A can further be selected for more stringent specificity to yield siRNA subset B. SiRNA subset B is composed of 173 siRNAs with sense strand SEQ ID NOS: 7, 39, 92, 93, 94, 95, 98, 99, 112, 113, 114, 115, 117, 118, 119, 120, 124, 125, 127, 207, 257, 271, 272, 487, 488, 489, 490, 491, 492, 493, 497, 498, 499, 501, 579, 583, 587, 588, 593, 594, 596, 598, 600, 601, 602, 603, 604, 605, 606, 629, 630, 634, 636, 637, 642, 645, 646, 649, 652, 739, 740, 741, 742, 743, 804, 813, 817, 845, 849, 852, 871, 872, 873, 874, 875, 876, 878, 879, 881, 905, 906, 907, 908, 915, 916, 917, 918, 919, 920, 923, 944, 952, 953, 958, 960, 974, 976, 977, 979, 982, 984, 985, 989, 990, 991, 992, 993, 997, 1000, 1001, 1002, 1003, 1004, 1009, 1016, 1021, 1085, 1086, 1087, 1088, 1092, 1094, 1097, 1105, 1107, 1131, 1132, 1133, 1134, 1138, 1140, 1197, 1198, 1199, 1201, 1202, 1262, 1263, 1424, 1425, 1427, 1429, 1430, 1434, 1435, 1436, 1460, 1463, 1524, 1525, 1527, 1528, 1530, 1532, 1533, 1537, 1538, 1539, 1541, 1639, 1654, 1691, 1692, 1764, 1765, 1794, 1795, 1796, 1797, 1798, 1968, 2091, and 2095.

[1297] The siRNAs in siRNA subset B has the following characteristics:
[1298] 1. Cross-reactivity: With 19mer in human ANGPTL7 mRNA, with 17mer/19mer in NHP ANGPTL7
[1299] 2. Specificity category: For human and NHP:—AS2 or better, SS3 or better miRNA seeds: AS+SS strand:—seed region not conserved in human, mouse, and rat and not present in >4 species
[1300] 3. Off-target frequency: ≤15 human off-targets matched with 2 mismatches by antisense strand
[1301] 4. SNPs: siRNA target sites do not harbor SNPs with a MAF ≥1% (pos. 2-18)

[1302] The siRNA sequences in siRNA subset B can further be selected for absence of seed regions in the AS strand that are identical to a seed region of known human miRNA to yield siRNA subset C. SiRNA subset C is composed of 120 siRNAs with sense strand SEQ ID NOS: 7, 39, 92, 94, 113, 114, 115, 117, 118, 119, 120, 127, 207, 257, 271, 272, 488, 489, 490, 498, 499, 501, 579, 587, 588, 593, 594, 596, 600, 601, 605, 606, 629, 630, 636, 642, 645, 646, 739, 740, 741, 742, 743, 813, 845, 849, 871, 872, 873, 878, 879, 881, 905, 906, 907, 908, 916, 917, 918, 919, 952, 958, 976, 979, 982, 984, 989, 990, 991, 992, 993, 1000, 1002, 1003, 1004, 1009, 1016, 1087, 1088, 1092, 1094, 1097, 1105, 1107, 1131, 1132, 1133, 1134, 1198, 1199, 1201, 1202, 1262, 1424, 1427, 1434, 1435, 1463, 1524, 1525, 1527, 1528, 1530, 1532, 1533, 1537, 1538, 1541, 1639, 1691, 1692, 1764, 1765, 1794, 1796, 1797, 1798, 1968, 2091, and 2095.

[1303] The siRNAs in siRNA subset C has the following characteristics:
[1304] 1. Cross-reactivity: With 19mer in human ANGPTL7 mRNA, with 17mer/19mer in NHP ANGPTL7
[1305] 2. Specificity category: For human and NHP:—AS2 or better, SS3 or better miRNA seeds: AS+SS strand:—seed region not conserved in human, mouse, and rat and not present in >4 species. AS strand:—seed region not identical to seed region of known human miRNA
[1306] 3. Off-target frequency: ≤15 human off-targets matched with 2 mismatches by antisense strand
[1307] 4. SNPs: siRNA target sites do not harbor SNPs with a MAF ≥1% (pos. 2-18)

[1308] The siRNA sequences in siRNA subset C can also be selected for absence of seed regions in the AS or S strands that are identical to a seed region of known human miRNA to yield siRNA subset D. SiRNA subset D is composed of 90 siRNAs with sense strand SEQ ID NOS: 92, 113, 115, 119, 120, 127, 488, 490, 499, 579, 587, 588, 592, 593, 594, 600, 601, 605, 606, 630, 642, 657, 658, 740, 742, 743, 813, 846, 871, 872, 878, 881, 905, 907, 916, 917, 918, 919, 943, 948, 958, 979, 982, 983, 984, 989, 990, 991, 992, 1000, 1002, 1003, 1004, 1016, 1020, 1087, 1088, 1097, 1105, 1107, 1131, 1132, 1133, 1134, 1199, 1202, 1260, 1262, 1264, 1427, 1435, 1438, 1463, 1524, 1525, 1527, 1528, 1532, 1538, 1541, 1639, 1692, 1762, 1765, 1794, 1797, 1968, 2030, 2095, and 2192.

[1309] The siRNAs in siRNA subset D has the following characteristics:
[1310] 1. Cross-reactivity: With 19mer in human ANGPTL7 mRNA, with 17mer/19mer in NHP ANGPTL7
[1311] 2. Specificity category: For human and NHP:—AS2 or better, SS3 or better miRNA seeds: AS+SS strand:—seed region not conserved in human, mouse, and rat and not present in >4 species. AS+SS strand:—seed region not identical to seed region of known human miRNA
[1312] 3. Off-target frequency: ≤20 human off-targets matched with 2 mismatches by antisense strand
[1313] 4. SNPs: siRNA target sites do not harbor SNPs with a MAF ≥1% (pos. 2-18)

[1314] The siRNA sequences in siRNA subset D can further be selected for more stringent specificity to yield siRNA subset E. SiRNA subset E is composed of 76 siRNAs with sense strand SEQ ID NOS: 92, 113, 115, 119, 120, 127, 488, 490, 499, 579, 587, 588, 593, 594, 600, 601, 605, 606, 630, 642, 740, 742, 743, 813, 871, 872, 878, 881, 905, 907, 916, 917, 918, 919, 958, 979, 982, 984, 989, 990, 991, 992, 1000, 1002, 1003, 1004, 1016, 1087, 1088, 1097, 1105, 1107, 1131, 1132, 1133, 1134, 1199, 1202, 1262, 1427, 1435, 1463, 1524, 1525, 1527, 1528, 1532, 1538, 1541, 1639, 1692, 1765, 1794, 1797, 1968, and 2095.

[1315] The siRNAs in siRNA subset E has the following characteristics:
[1316] 1. Cross-reactivity: With 19mer in human ANGPTL7 mRNA, with 17mer/19mer in NHP ANGPTL7
[1317] 2. Specificity category: For human and NHP:—AS2 or better, SS3 or better miRNA seeds: AS+SS strand:—seed region not conserved in human, mouse, and rat and not present in >4 species. AS+SS strand:—seed region not identical to seed region of known human miRNA
[1318] 3. Off-target frequency: ≤15 human off-targets matched with 2 mismatches by antisense strand
[1319] 4. SNPs: siRNA target sites do not harbor SNPs with a MAF ≥1% (pos. 2-18)

### Example 5. siRNA-Mediated Modulation of ANGPTL7 and Effects on Intraocular Pressure in Mice

[1320] In this experiment, C57BL/6J mice are used to evaluate the effect of siRNA inhibition of ANGPTL7 on IOP.

[1321] Adult (12 weeks old) C57BL/6J mice are obtained from the Jackson Laboratory (Bar Harbor, ME). The animals are kept in environmentally controlled rooms under specific pathogen-free conditions (temperature, 20-26° C.); humidity, 30-70%) with a 12-hour light-dark cycle for 2 weeks before use. Food and water are available ad libitum. All animals are used in accordance with animal care guidelines.

[1322] Mice are divided into 7 groups. All treatments are applied to both eyes. Group 1 (n=6) is treated with vehicle. Group 2 (n=6) is treated with a negative control siRNA. Groups 3-7 (n=6) are treated with an ANGPTL7-targeting siRNA. Vehicle and siRNAs are delivered via intravitreal injection.

[1323] The ANGPTL7 siRNA has the following sequence: sense strand 5′ GUACAACUGCUGCACAGACUU 3′ (SEQ ID NO:11089), antisense strand 5′ GUCUGUGCAGCAGUUGUACUU 3′ (SEQ ID NO: 11090). Some preferred siRNA sequences may include any one of ETD00342 (sense strand 5′ CfsasAfaGfgUfGfGfcUfaCfuGfgUfaAfsusu 3′ (SEQ ID NO: 11172), antisense strand 5′ usUfsaCfcAfgUfaGfccaCfcUfuUfgsusu 3′ (SEQ ID NO: 11292)), ETD00343 (sense strand 5′ AfsasGfgUfgGfCfUfaCfuGfgUfaCfaAfsusu 3′ (SEQ ID NO: 11173), antisense strand 5′ usUfsgUfaCfcAfgUfagcCfaCfcUfususu 3′ (SEQ ID NO: 11293)), ETD00344 (sense strand 5′ GfsusGfgCfuAfCfUfgGfuAfcAfaCfuAfsusu 3′ (SEQ ID NO: 11174), antisense strand 5′ usAfsgUfuGfuAfcCfaguAfgCfcAfcsusu 3′ (SEQ ID NO: 11294)), ETD00345 (sense strand 5′ UfsgsGfuAfcAfAfCfuGfcUfgCfaCfaAfsusu 3′ (SEQ ID NO: 11175), antisense strand 5′ usUfsgUfgCfaGfcAfguuGfuAfcCfasusu 3′ (SEQ ID NO: 11295)) ETD00346 (sense strand 5′ GfsusAfcAfaCfUfGfcUfgCfaCfaGfaAfsusu 3′ (SEQ ID NO: 11176), antisense strand 5′ usUfscUfgUfgCfaGfcagUfuGfuAfcsusu 3′ (SEQ ID NO: 11296)), ETD00910 (sense strand 5′ CfsasAfcCfaGfAfUfuGfaCfaUfcAfuGfsusu 3′ (SEQ ID NO: 11520), antisense strand 5′ csAfsuGfaUfgUfcAfaucUfgGfuUfgsusu 3′ (SEQ ID NO: 11524)), or ETD00914 (sense strand 5′ CfsasAfaCfaUfCfCfuCfaGfuCfaAfaAfsusu 3′ (SEQ ID NO: 11521), antisense strand 5′ usUfsuUfgAfcUfgAfggaUfgUfuUfgsusu 3′ (SEQ ID NO: 11525)). Some embodiments include any one of ETD00342, ETD00343, ETD00344, ETD00345, ETD00346, ETD00910, or ETD00914, but without the modification patterns of any of SEQ ID NOs: 11172-11176 or 11292-11296, 11520, 11521, 11524, or 11525, or with different modifications or modification patterns than those SEQ ID NOs. A hydrophobic moiety, such as cholesterol, may also be attached to the siRNA. A ligand that binds to receptors on the cell surface, such as RGD to integrins, may also be attached to the siRNA. Hydrophobic groups may be combined with cell-targeting ligands to increase cellular uptake. The non-targeting control siRNA has the following sequence: sense strand 5′ GUUGUACAGCAUGCGGAGAUU 3′ (SEQ ID NO: 11091), antisense strand 5′ UCUCCGCAUGCUGUACAACUU 3′ (SEQ ID NO: 11092), or ETD01046 (sense strand 5′ csascaCfaGfUfAfugaacuacugsusu[Chol-TEG]3′ (SEQ ID NO: 11522), antisense strand 5′ csAfsguaGfuucauacUfgUfgugsusu 3′ (SEQ ID NO: 11526)).

[1324] For intravitreal injection, mice are anesthetized with ketamine/xylazine and pupils are dilated with topical administration of Cyclomydryl. Following sedation and dilation, a total volume of 1 μl per eye is injected into the vitreous at the pars plana using a Hamilton syringe and a 33-gauge needle. The eyes are then rinsed with saline solution and Gentak is applied to the injection site.

[1325] The study length is 55 days. Oligonucleotide treatment (siRNA or scrambled controls) occurs on days 5 and 18.

[1326] IOP is measured on days 1, 3, 6, 9, 13, 16, 20, 23, 27, 30, 34, 37, 41, 44, 48, 51, and 55. Mice are first anesthetized with 2.5% isoflurane supplemented with 2 liters per minute of oxygen in a small chamber. They are subsequently transferred to a platform containing a nose cone providing continuous isoflurane supply. A TonoLab rebound tonometer (iCare) is used to take 3 independent readings, each comprising an automatic average of 6 consecutive measurements. The TonoLab releases a small probe which measures ocular resistance as a function of IOP.

[1327] Mice are euthanized on day 55. Following sedation with ketamine/xylazine, mice are euthanized via intracardial administration of Euthasol. Both eyes from each animal are harvested and dissected along the equator and each hemisphere is placed in RNAlater. Total RNA is extracted from homogenized tissue and reverse transcribed to cDNA using a First-Strand III cDNA Synthesis kit. Normalized cDNA quantification is carried out by real-time TaqMan PCR using fluorescently labeled TaqMan probes/primers sets of selected genes (ANGPTL7, MYOC, COL1A1, COL5A1, VCAN, FN1, and PPIA). Reactions are carried out in 20 μL aliquots using TaqMan Universal PCR Master Mix No AmpErase UNG ran on an ABI Prism 7500 Fast Real-Time PCR System Sequence Detection System and analyzed by the 7500 System software. Relative Quantification (RQ) values between treated and untreated samples are calculated by the formula 2^{-ΔΔCT}, where C_{T} is the cycle at threshold (automatic measurement), ΔC_{T} is C_{T} of the assayed gene minus C_{T} of the endogenous control (PPIA), and ΔΔC_{T} is the ΔC_{T} of the normalized assayed gene in the treated sample minus the ΔC_{T} of the same gene in the untreated one (calibrator).

### Example 6: siRNA-Mediated Modulation of ANGPTL7 in a Mouse Model of Spontaneous Glaucoma

[1328] In this experiment, the DBA/2J mouse model of glaucoma is used to evaluate the effect of siRNA inhibition of ANGPTL7 on IOP. DBA/J2 mice develop age related IOP increases and retinal nerve damage characteristic of human disease. DBA/2J mice normally demonstrate peak IOP elevation at 8 months of age.

[1329] Adult mice from inbred strains DBA/2J are obtained from the Jackson Laboratory (Bar Harbor, ME). The animals are kept in environmentally controlled rooms under specific pathogen-free conditions (temperature, 20-26° C.); humidity, 30-70%) with a 12-hour light-dark cycle for 2 weeks before use. Food and water are available ad libitum. All animals are used in accordance with animal care guidelines.

[1330] Experiments are performed on 6-month-old mice. Mice are divided into six groups. Group A (n=4) is an untreated control group. Group B (n=4) is treated with ANGPTL7 targeting siRNA via intraocular/intracameral injection into the anterior chamber. Group C (n=4) is treated with a non-targeting control siRNA via intraocular injection into the anterior chamber. Group D (n=4) is treated with vehicle.

[1331] The ANGPTL7 siRNA has the following sequence: sense strand 5′ GUACAACUGCUGCACAGACUU 3′ (SEQ ID NO:11089), antisense strand 5′ GUCUGUGCAGCAGUUGUACUU 3′ (SEQ ID NO: 11090). The non-targeting control siRNA has the following sequence: sense strand 5′ GUUGUACAGCAUGCGGAGAUU 3′ (SEQ ID NO: 11091), antisense strand 5′ UCUCCGCAUGCUGUACAACUU 3′ (SEQ ID NO: 11092), or ETD01046 (sense strand 5′ csascaCfaGfUfAfugaacuacugsusu[Chol-TEG]3′ (SEQ ID NO: 11522), antisense strand 5′ csAfsguaGfuucauacUfgUfgugsusu 3′ (SEQ ID NO: 11526)). Some preferred siRNA sequences may include any one of ETD00342 (sense strand 5′ CfsasAfaGfgUfGfGfcUfaCfuGfgUfaAfsusu 3′ (SEQ ID NO: 11172), antisense strand 5′ usUfsaCfcAfgUfaGfccaCfcUfuUfgsusu 3′ (SEQ ID NO: 11292)), ETD00343 (sense strand 5′ AfsasGfgUfgGfCfUfaCfuGfgUfaCfaAfsusu 3′ (SEQ ID NO: 11173), antisense strand 5′ usUfsgUfaCfcAfgUfagcCfaCfcUfususu 3′ (SEQ ID NO: 11293)), ETD00344 (sense strand 5′ GfsusGfgCfuAfCfUfgGfuAfcAfaCfuAfsusu 3′ (SEQ ID NO: 11174), antisense strand 5′ usAfsgUfuGfuAfcCfaguAfgCfcAfcsusu 3′ (SEQ ID NO: 11294)), ETD00345 (sense strand 5′ UfsgsGfuAfcAfAfCfuGfcUfgCfaCfaAfsusu 3′ (SEQ ID NO: 11175), antisense strand 5′ usUfsgUfgCfaGfcAfguuGfuAfcCfasusu 3′ (SEQ ID NO: 11295)) ETD00346 (sense strand 5′ GfsusAfcAfaCfUfGfcUfgCfaCfaGfaAfsusu 3′ (SEQ ID NO: 11176), antisense strand 5′ usUfscUfgUfgCfaGfcagUfuGfuAfcsusu 3′ (SEQ ID NO: 11296)), ETD00910 (sense strand 5′ CfsasAfcCfaGfAfUfuGfaCfaUfcAfuGfsusu 3′ (SEQ ID NO: 11520), antisense strand 5′ csAfsuGfaUfgUfcAfaucUfgGfuUfgsusu 3′ (SEQ ID NO: 11524)), or ETD00914 (sense strand 5′ CfsasAfaCfaUfCfCfuCfaGfuCfaAfaAfsusu 3′ (SEQ ID NO: 11521), antisense strand 5′ usUfsuUfgAfcUfgAfggaUfgUfuUfgsusu 3′ (SEQ ID NO: 11525)). Some embodiments include any one of ETD00342, ETD00343, ETD00344, ETD00345, ETD00346, ETD00910 or ETD00914 but without the modification patterns of any of SEQ ID NOs: 11172-11176, 11292-11296, 11520, 11521, 11524, or 11525, or with different modifications or modification patterns than those SEQ ID NOs. A hydrophobic moiety, such as cholesterol, may also be attached to the siRNA. A ligand that binds to receptors on the cell surface, such as RGD to integrins, may also be attached to the siRNA. Hydrophobic groups may be combined with cell-targeting ligands to increase cellular uptake.

[1332] For intracameral injections, a topical anesthetic (tetracaine hydrochloride 0.5%, Bausch & Lomb) is applied to the desired eye. 10 μg of siRNA in 1 μl of vehicle is injected using a 36G beveled needle mounted on a 10 μl microsyringe. An UltraMicroPump II (World precision instrument's UMP2 and UMC4) is used to precisely control the volume of injection. The needle is entered at the limbus and care is taken not to traumatize the iris or the lens. Mice with injury to iris or lens are excluded from the study. As the needle is withdrawn after injection, a cotton tip applicator is applied for about 1 minute to prevent aqueous reflux.

[1333] IOP is measured a day prior to injections, and also measured at two-, four-, six- and eight-weeks post-injection. Mice from each group are anaesthetized using intraperitoneal injection (0.1 μl) of ketamine (100 mg/kg) and xylazine (9 mg/kg). One mouse is anaesthetized at a time and IOP is measured as soon as the mouse fails to respond to touch. All care is taken to ensure that the mice are in a similar level of anesthesia when the IOP measurements are made. To measure the IOP, a handheld tonometer (TonoLab, Colonial Medical Supply, Franconia, NH) is used.

[1334] Mice are euthanized after the final, eight-week IOP measurements. Trabecular meshwork tissue is dissected out of the enucleated eyes under a dissecting microscope and prepared for RNA extraction. Total RNA is reverse transcribed to cDNA using a First-Strand III cDNA Synthesis kit. Normalized cDNA quantification is carried out by real-time TaqMan PCR using fluorescently labeled TaqMan probes/primers sets of selected genes (ANGPTL7, MYOC, COL1A1, COL5A1, VCAN, FN1, and PPIA). Reactions are carried out in 20 μL aliquots using TaqMan Universal PCR Master Mix No AmpErase UNG run on an ABI Prism 7500 Fast Real-Time PCR System Sequence Detection System and analyzed by the 7500 System software. Relative Quantification (RQ) values between treated and untreated samples are calculated by the formula 2^{-ΔΔCT}, where C_{T} is the cycle at threshold (automatic measurement), ΔC_{T} is C_{T} of the assayed gene minus C_{T} of the endogenous control (PPIA), and ΔΔC_{T} is the ΔC_{T} of the normalized assayed gene in the treated sample minus the ΔC_{T} of the same gene in the untreated one (calibrator).

### Example 7: Chemically Modified ANGPTL7 siRNAs

[1335] The siRNAs targeting ANGPTL7 can be synthesized with chemical modifications with the sense strand having the pattern 5′ NfsnsNfnNfnNfNfNfnNfnNfnNfnNfnNfsnsn 3′ (Modification pattern 1S, SEQ ID NO: 11381) and the antisense strand having the pattern nsNfsnNfnNfnNfnNfnnnNfnNfnNfnsnsn 3′ (Modification pattern 1AS, SEQ ID NO: 11386). “N” can be any nucleoside (for example ribose, deoxyribose, or derivatives thereof), “Nf” is a 2′-fluoro-modified nucleoside, “n” is a 2′-O-methyl modified nucleoside, and “s” is a phosphorothioate linkage. In addition, adenosine can be placed at position 19 in the sense strand and uridine at position 1 in the antisense strand. Some siRNAs that may include these chemical modifications comprise sequences of any of SEQ ID NOs: 11093-11376.

[1336] The siRNAs targeting ANGPTL7 can also be synthesized with chemical modifications with the sense strand having the pattern of modifications 5′ nsnsnnNfnNfNfNfnnnnnnnnnnsnsn (SEQ ID NO: 11382) and antisense strand having the pattern of modifications 5′ nsNfsnnnNfnnnnnnnNfnNfnnnsnsn 3′ (SEQ ID NO: 11388). “N” can be any nucleoside (for example ribose, deoxyribose, or derivatives thereof), “Nf” is a 2′-fluoro-modified nucleoside, “n” is a 2′-O-methyl modified nucleoside, and “s” is a phosphorothioate linkage. In addition, adenosine can be placed at position 19 in the sense strand and uridine at position 1 in the antisense strand.

### Example 8. Screening ANGPTL7 siRNAs for Activity in Human Cells in Culture

[1337] Chemically modified ANGPTL7 siRNAs cross reactive for human and non-human primate and derived from sequences in siRNA subset C were assayed for ANGPTL7 mRNA knockdown activity in cells in culture. ARPE-19 (ATCC® CRL-2302™) cells were seeded in 96-well tissue culture plates at a cell density of 7,500 cells per well in DMEM:F12 (ATCC Catalog No. 30-2006) supplemented with 10% fetal bovine serum and incubated overnight in a water-jacketed, humidified incubator at 37° C. in an atmosphere composed of air plus 5% carbon dioxide. The ANGPTL7 siRNAs were individually transfected into ARPE-19 cells in duplicate wells at 10 nM final concentration using 0.3 μL Lipofectamine RNAiMax (Fisher) per well. Silencer Select Negative Control #1 (ThermoFisher, Catalog #4390843) was transfected at 10 nM final concentration as a control. After incubation for 48 hours at 37° C., total RNA was harvested from each well and cDNA prepared using TaqMan® Fast Advanced Cells-to-CT™ Kit (ThermoFisher, Catalog #A35374) according to the manufacturer's instructions. The level of ANGPTL7 mRNA from each well was measured in triplicate by real-time qPCR on an Applied Biosystems 7500 Fast Real-Time PCR machine using TaqMan Gene Expression Assay for human ANGPTL7 (ThermoFisher, assay #Hs00221727_m1). The level of PPIA mRNA was measured using TaqMan Gene Expression Assay (ThermoFisher, assay #Hs99999904_m1) and used to determine relative ANGPTL7 mRNA levels in each well using the delta-delta Ct method. All data were normalized to relative ANGPTL7 mRNA levels in untreated ARPE-19 cells. Results are shown in Table 4.

TABLE 4
Knockdown Activity of ANGPLT7-Specific
siRNAs at 10 nM in Human ARPE-19 Cells

| | | Antisense | Relative |
|---|---|---|---|
| | Sense Strand | Strand | ANGPTL7 |
| siRNA name | (SEQ ID NO) | (SEQ ID NO) | Expression |
| Untreated Cells | — | — | 1.00 |
| Negative Control siRNA | — | — | 0.67 |
| ETD00263 | 11093 | 11213 | 0.72 |
| ETD00264 | 11094 | 11214 | 0.34 |
| ETD00265 | 11095 | 11215 | 0.33 |
| ETD00266 | 11096 | 11216 | 0.26 |
| ETD00267 | 11097 | 11217 | 0.24 |
| ETD00268 | 11098 | 11218 | 0.29 |
| ETD00269 | 11099 | 11219 | 0.18 |
| ETD00270 | 11100 | 11220 | 0.09 |
| ETD00271 | 11101 | 11221 | 0.23 |
| ETD00272 | 11102 | 11222 | 0.22 |
| ETD00273 | 11103 | 11223 | 0.19 |
| ETD00274 | 11104 | 11224 | 0.09 |
| ETD00275 | 11105 | 11225 | 0.14 |
| ETD00276 | 11106 | 11226 | 0.18 |
| ETD00277 | 11107 | 11227 | 0.77 |
| ETD00278 | 11108 | 11228 | 0.58 |
| ETD00279 | 11109 | 11229 | 0.26 |
| ETD00280 | 11110 | 11230 | 0.15 |
| ETD00281 | 11111 | 11231 | 1.64 |
| ETD00282 | 11112 | 11232 | 0.95 |
| ETD00283 | 11113 | 11233 | 0.29 |
| ETD00284 | 11114 | 11234 | 0.54 |
| ETD00285 | 11115 | 11235 | 0.53 |
| ETD00286 | 11116 | 11236 | 0.16 |
| ETD00287 | 11117 | 11237 | 0.80 |
| ETD00288 | 11118 | 11238 | 0.14 |
| ETD00289 | 11119 | 11239 | 0.22 |
| ETD00290 | 11120 | 11240 | 0.60 |
| ETD00291 | 11121 | 11241 | 0.20 |
| ETD00292 | 11122 | 11242 | 0.34 |
| ETD00293 | 11123 | 11243 | 0.25 |
| ETD00294 | 11124 | 11244 | 0.18 |
| ETD00295 | 11125 | 11245 | 0.07 |
| ETD00296 | 11126 | 11246 | 0.06 |
| ETD00297 | 11127 | 11247 | 0.16 |
| ETD00298 | 11128 | 11248 | 0.14 |
| ETD00299 | 11129 | 11249 | 0.33 |
| ETD00300 | 11130 | 11250 | 0.49 |
| ETD00301 | 11131 | 11251 | 0.60 |
| ETD00302 | 11132 | 11252 | 0.17 |
| ETD00303 | 11133 | 11253 | 0.37 |
| ETD00304 | 11134 | 11254 | 0.27 |
| ETD00305 | 11135 | 11255 | 0.36 |
| ETD00306 | 11136 | 11256 | 0.30 |
| ETD00307 | 11137 | 11257 | 0.77 |
| ETD00308 | 11138 | 11258 | 0.93 |
| ETD00309 | 11139 | 11259 | 0.31 |
| ETD00310 | 11140 | 11260 | 0.37 |
| ETD00311 | 11141 | 11261 | 0.84 |
| ETD00312 | 11142 | 11262 | 1.69 |
| ETD00313 | 11143 | 11263 | 0.13 |
| ETD00314 | 11144 | 11264 | 0.24 |
| ETD00315 | 11145 | 11265 | 0.11 |
| ETD00316 | 11146 | 11266 | 0.16 |
| ETD00317 | 11147 | 11267 | 0.14 |
| ETD00318 | 11148 | 11268 | 0.21 |
| ETD00319 | 11149 | 11269 | 0.27 |
| ETD00320 | 11150 | 11270 | 0.11 |
| ETD00321 | 11151 | 11271 | 0.14 |
| ETD00322 | 11152 | 11272 | 0.08 |
| ETD00323 | 11153 | 11273 | 0.32 |
| ETD00324 | 11154 | 11274 | 0.44 |
| ETD00325 | 11155 | 11275 | 0.17 |
| ETD00326 | 11156 | 11276 | 0.18 |
| ETD00327 | 11157 | 11277 | 0.34 |
| ETD00328 | 11158 | 11278 | 0.17 |
| ETD00329 | 11159 | 11279 | 0.08 |
| ETD00330 | 11160 | 11280 | 0.11 |
| ETD00331 | 11161 | 11281 | 0.08 |
| ETD00332 | 11162 | 11282 | 0.17 |
| ETD00333 | 11163 | 11283 | 0.31 |
| ETD00334 | 11164 | 11284 | 0.41 |
| ETD00335 | 11165 | 11285 | 0.06 |
| ETD00336 | 11166 | 11286 | 0.22 |
| ETD00337 | 11167 | 11287 | 0.12 |
| ETD00338 | 11168 | 11288 | 0.19 |
| ETD00339 | 11169 | 11289 | 0.17 |
| ETD00340 | 11170 | 11290 | 0.18 |
| ETD00341 | 11171 | 11291 | 0.13 |
| ETD00342 | 11172 | 11292 | 0.13 |
| ETD00343 | 11173 | 11293 | 0.32 |
| ETD00344 | 11174 | 11294 | 0.22 |
| ETD00345 | 11175 | 11295 | 0.37 |
| ETD00346 | 11176 | 11296 | 0.14 |
| ETD00347 | 11177 | 11297 | 0.20 |
| ETD00348 | 11178 | 11298 | 0.20 |
| ETD00349 | 11179 | 11299 | 0.65 |
| ETD00350 | 11180 | 11300 | 0.34 |
| ETD00351 | 11181 | 11301 | 0.13 |
| ETD00352 | 11182 | 11302 | 0.11 |
| ETD00353 | 11183 | 11303 | 0.11 |
| ETD00354 | 11184 | 11304 | 0.14 |
| ETD00355 | 11185 | 11305 | 0.13 |
| ETD00356 | 11186 | 11306 | 0.10 |
| ETD00357 | 11187 | 11307 | 0.38 |
| ETD00358 | 11188 | 11308 | 0.05 |
| ETD00359 | 11189 | 11309 | 0.11 |
| ETD00360 | 11190 | 11310 | 2.23 |
| ETD00361 | 11191 | 11311 | 0.42 |
| ETD00362 | 11192 | 11312 | 0.61 |
| ETD00363 | 11193 | 11313 | 0.48 |
| ETD00364 | 11194 | 11314 | 0.65 |
| ETD00365 | 11195 | 11315 | 0.24 |
| ETD00366 | 11196 | 11316 | 0.38 |
| ETD00367 | 11197 | 11317 | 0.77 |
| ETD00368 | 11198 | 11318 | 0.16 |
| ETD00369 | 11199 | 11319 | 0.11 |
| ETD00370 | 11200 | 11320 | 0.43 |
| ETD00371 | 11201 | 11321 | 0.35 |
| ETD00372 | 11202 | 11322 | 0.79 |
| ETD00373 | 11203 | 11323 | 0.45 |
| ETD00374 | 11204 | 11324 | 0.34 |
| ETD00375 | 11205 | 11325 | 0.15 |
| ETD00376 | 11206 | 11326 | 0.64 |
| ETD00377 | 11207 | 11327 | 0.29 |
| ETD00378 | 11208 | 11328 | 0.17 |
| ETD00379 | 11209 | 11329 | 0.56 |
| ETD00380 | 11210 | 11330 | 0.36 |
| ETD00381 | 11211 | 11331 | 0.42 |
| ETD00382 | 11212 | 11332 | 0.19 |

“—” untreated ARPE-19 cells; Negative Control siRNA, Silencer Select Negative Control #1

[1338] A subset of the ANGPTL7 siRNA at were tested in a second screen for activity at 1 nM concentration using ARPE-19 cells and the transfection procedures as described above. Results are shown in Table 5.

TABLE 5
Knockdown Activity of ANGPLT7-Specific
siRNAs at 1 nM in Human ARPE-19 Cell

| | | Antisense | Relative |
|---|---|---|---|
| | Sense Strand | Strand | ANGPTL7 |
| siRNA name | (SEQ ID NO) | (SEQ ID NO) | Expression |
| Untreated Cells | — | — | 1.00 |
| Negative Control siRNA | — | — | 1.06 |
| ETD00269 | 11100 | 11220 | 0.16 |
| ETD00270 | 11143 | 11263 | 0.19 |
| ETD00273 | 11161 | 11281 | 0.27 |
| ETD00276 | 11183 | 11303 | 0.21 |
| ETD00280 | 11186 | 11306 | 0.28 |
| ETD00286 | 11188 | 11308 | 0.43 |
| ETD00291 | 11099 | 11219 | 0.47 |
| ETD00294 | 11103 | 11223 | 0.41 |
| ETD00297 | 11106 | 11226 | 0.45 |
| ETD00302 | 11110 | 11230 | 0.13 |
| ETD00313 | 11116 | 11236 | 0.34 |
| ETD00316 | 11121 | 11241 | 0.31 |
| ETD00318 | 11124 | 11244 | 0.42 |
| ETD00325 | 11127 | 11247 | 0.50 |
| ETD00326 | 11132 | 11252 | 0.67 |
| ETD00328 | 11146 | 11266 | 0.49 |
| ETD00331 | 11148 | 11268 | 0.39 |
| ETD00332 | 11155 | 11275 | 1.09 |
| ETD00338 | 11156 | 11276 | 0.96 |
| ETD00339 | 11158 | 11278 | 0.27 |
| ETD00340 | 11162 | 11282 | 0.31 |
| ETD00347 | 11168 | 11288 | 0.46 |
| ETD00348 | 11169 | 11289 | 0.45 |
| ETD00353 | 11170 | 11290 | 0.53 |
| ETD00356 | 11177 | 11297 | 0.21 |
| ETD00358 | 11178 | 11298 | 0.31 |
| ETD00368 | 11198 | 11318 | 0.48 |
| ETD00375 | 11205 | 11325 | 0.44 |
| ETD00378 | 11208 | 11328 | 0.51 |
| ETD00382 | 11212 | 11332 | 0.28 |

“—” untreated ARPE-19 cells; Negative Control siRNA, Silencer Select Negative Control #1

### Example 9. Screening ANGPTL7 siRNAs for Activity in Mouse Cells in Culture

[1339] It can be advantageous to possess ANGPTL7 siRNAs that are cross-reactive for human and rodent species. Chemically modified ANGPTL7 siRNAs derived from those that are predicted to be cross-reactive for human and mouse ANGPTL7 were assayed for ANGPTL7 mRNA knockdown activity in mouse cells in culture. C166 (ATCC® CRL-2581™) cells were seeded in 96-well tissue culture plates at a cell density of 10,000 cells per well in DMEM supplemented with 10% fetal bovine serum and incubated overnight in a water-jacketed, humidified incubator at 37° C. in an atmosphere composed of air plus 5% carbon dioxide. The ANGPTL7 siRNAs were individually transfected into C166 cells in duplicate wells at 1 nM and 10 nM final concentration using 0.3 μL Lipofectamine RNAiMax (Fisher) per well. Silencer Select Negative Control #1 (ThermoFisher, Catalog #4390843) was transfected at 10 nM final concentration as a control. After incubation for 48 hours at 37° C., total RNA was harvested from each well and cDNA prepared using TaqMan® Fast Advanced Cells-to-CT™ Kit (ThermoFisher, Catalog #A35374) according to the manufacturer's instructions. The level of ANGPTL7 mRNA from each well was measured in triplicate by real-time qPCR on an Applied Biosystems 7500 Fast Real-Time PCR machine using TaqMan Gene Expression Assay for mouse ANGPTL7 (ThermoFisher, assay #Mm00480431_m1). The level of PPIA mRNA was measured using TaqMan Gene Expression Assay (ThermoFisher, assay #Mm02342430_g1) and used to determine relative ANGPTL7 mRNA levels in each well using the delta-delta Ct method. All data were normalized to relative ANGPTL7 mRNA levels in untreated C166 cells. Results are shown in Table 6. In some embodiments, an oligonucleotide such as an siRNA described herein, that targets human ANGPTL7 is cross-reactive with human, NHP, mouse, rat, and/or dog ANGPTL7 (e.g. any one of ETD00342-ETD00346, or a version thereof with different sequence modifications, or without sequence modifications).

TABLE 6
Knockdown Activity of ANGPLT7-Specific siRNAs
at 1 nM and 10 nM in Mouse C166 cells

| | | | Relative ANGPTL7 | |
|---|---|---|---|---|
| | | Antisense | Expression | |
| | Sense Strand | Strand | 1 nM | 10 nM |
| siRNA name | (SEQ ID NO) | (SEQ ID NO) | siRNA | siRNA |
| Untreated Cells | — | — | 1.00 | — |
| Negative Control | — | — | 0.66 | — |
| siRNA | | | | |
| ETD00241 | 11333 | 11355 | 1.04 | 0.92 |
| ETD00242 | 11334 | 11356 | 0.71 | 0.78 |
| ETD00243 | 11335 | 11357 | 0.85 | 0.83 |
| ETD00244 | 11336 | 11358 | 0.54 | 0.79 |
| ETD00245 | 11337 | 11359 | 0.43 | 0.71 |
| ETD00246 | 11338 | 11360 | 0.59 | 0.83 |
| ETD00247 | 11339 | 11361 | 0.35 | 0.76 |
| ETD00248 | 11340 | 11362 | 0.93 | 0.90 |
| ETD00249 | 11341 | 11363 | 0.67 | 0.90 |
| ETD00250 | 11342 | 11364 | 0.77 | 0.89 |
| ETD00251 | 11343 | 11365 | 0.52 | 0.82 |
| ETD00252 | 11344 | 11366 | 0.44 | 0.77 |
| ETD00253 | 11345 | 11367 | 0.82 | 0.81 |
| ETD00254 | 11346 | 11368 | 0.94 | 0.87 |
| ETD00255 | 11347 | 11369 | 0.76 | 0.83 |
| ETD00256 | 11348 | 11370 | 0.89 | 0.91 |
| ETD00257 | 11349 | 11371 | 0.52 | 0.92 |
| ETD00258 | 11350 | 11372 | 0.89 | 0.94 |
| ETD00259 | 11351 | 11373 | 0.70 | 0.91 |
| ETD00260 | 11352 | 11374 | 0.52 | 0.92 |
| ETD00261 | 11353 | 11375 | 0.55 | 0.89 |
| ETD00262 | 11354 | 11376 | 0.78 | 0.95 |

“—” untreated C166 cells; Negative Control siRNA, Silencer Select Negative Control #1

### Example 10. Determining the IC50 of ANGPTL7 SIRNAS in Human ARPE-19 Cells

[1340] The IC50 values for knockdown of ANGPTL7 mRNA by select ANGPTL7 siRNAs were determined in ARPE-19 cells. The ETD00269, ETD00270, ETD00353, ETD00356, ETD00358, ETD00370, ETD00377, ETD00378 and ETD00382 siRNAs were assayed individually at 3 nM, 1 nM, 0.3 nM, 0.1 nM and 0.03 nM. A subset of siRNAs was also assayed at 0.01 nM. The ARPE-19 (ATCC® CRL-2302™) cells were seeded in 96-well tissue culture plates at a cell density of 7,500 cells per well in DMEM supplemented with 10% fetal bovine serum and incubated overnight in a water-jacketed, humidified incubator at 37° C. in an atmosphere composed of air plus 5% carbon dioxide. The ANGPTL7 siRNAs were individually transfected into ARPE-19 cells in triplicate wells using 0.3 μL Lipofectamine RNAiMax (Fisher) per well. Silencer Select Negative Control #1 (ThermoFisher, Catalog #4390843) was transfected at 0.03 and 3 nM final concentration as a control. After incubation for 48 hours at 37° C., total RNA was harvested from each well and cDNA prepared using TaqMan® Fast Advanced Cells-to-CT™ Kit (ThermoFisher, Catalog #A35374) according to the manufacturer's instructions. The level of ANGPTL7 mRNA from each well was measured in triplicate by real-time qPCR on an Applied Biosystems 7500 Fast Real-Time PCR machine using TaqMan Gene Expression Assay for human ANGPTL7 (ThermoFisher, assay #Hs00221727_m1). The level of PPIA mRNA was measured using TaqMan Gene Expression Assay (ThermoFisher, assay #Hs99999904_m1) and used to determine relative ANGPTL7 mRNA levels in each well using the delta-delta Ct method. All data were normalized to relative ANGPTL7 mRNA levels in untreated ARPE-19 cells. Curve fit was accomplish using the [inhibitor]vs. response (three parameters) function in GraphPad Prism software. Results are shown in Table 7, Table 8, and Table 9.

TABLE 7
IC50 Values of ETD00269, ETD00270, ETD00358
and ETD00382 ANGPTL7 siRNAs

| | | | Relative ANGPTL7 | |
|---|---|---|---|---|
| siRNA | [siRNA] | | mRNA Levels | IC50 |
| — | — | | 1.000 | ND |
| Negative Control siRNA | 3 | nM | 0.713 | ND |
| | 0.03 | nM | 0.712 | ND |
| ETD00269 | 3 | nM | 0.156 | 0.23 |
| | 1 | nM | 0.649 | |
| | 0.3 | nM | 0.849 | |
| | 0.1 | nM | 1.469 | |
| | 0.03 | nM | 1.808 | |
| ETD00270 | 3 | nM | 0.305 | 0.044 |
| | 1 | nM | 0.445 | |
| | 0.3 | nM | 0.225 | |
| | 0.1 | nM | 0.720 | |
| | 0.03 | nM | 0.907 | |
| ETD00358 | 3 | nM | 0.129 | 0.15 |
| | 1 | nM | 0.140 | |
| | 0.3 | nM | 0.553 | |
| | 0.1 | nM | 0.936 | |
| | 0.03 | nM | 1.292 | |
| ETD00382 | 3 | nM | 0.316 | 0.28 |
| | 1 | nM | 0.492 | |
| | 0.3 | nM | 0.229 | |
| | 0.1 | nM | 0.205 | |
| | 0.03 | nM | 0.206 | |

TABLE 8
IC50 Values of ETD00353 and ETD00356 ANGPTL7 siRNAs

| | | | Relative ANGPTL7 | |
|---|---|---|---|---|
| siRNA | [siRNA] | | mRNA Levels | IC50 |
| — | — | | 1.000 | ND |
| Negative Control siRNA | 3 | nM | 1.487 | ND |
| | 0.03 | nM | 0.188 | ND |
| ETD00353 | 3 | nM | 0.383 | 1.52 |
| | 1 | nM | 0.772 | |
| | 0.3 | nM | 1.140 | |
| | 0.1 | nM | 1.423 | |
| | 0.03 | nM | 1.257 | |
| | 0.01 | nM | 1.424 | |
| ETD00356 | 3 | nM | 0.107 | 0.12 |
| | 1 | nM | 0.152 | |
| | 0.3 | nM | 0.294 | |
| | 0.1 | nM | 0.712 | |
| | 0.03 | nM | 0.793 | |
| | 0.01 | nM | 1.073 | |

TABLE 9
IC50 Values of ETD00370, ETD00377
and ETD00378 ANGPTL7 siRNAs

| | | | Relative ANGPTL7 | |
|---|---|---|---|---|
| siRNA | [siRNA] | | mRNA Levels | IC50 |
| — | — | | 1.000 | ND |
| Negative Control siRNA | 0.03 | nM | 1.951 | ND |
| | 3 | nM | 1.579 | ND |
| ETD00370 | 3 | nM | 0.251 | 0.49 |
| | 1 | nM | 0.589 | |
| | 0.3 | nM | 0.990 | |
| | 0.1 | nM | 1.736 | |
| | 0.03 | nM | 1.566 | |
| ETD00377 | 3 | nM | 0.358 | 2.64 |
| | 1 | nM | 0.462 | |
| | 0.3 | nM | 0.476 | |
| | 0.1 | nM | 0.548 | |
| | 0.03 | nM | 1.361 | |
| ETD00378 | 3 | nM | 0.281 | 0.17 |
| | 1 | nM | 0.575 | |
| | 0.3 | nM | 1.037 | |
| | 0.1 | nM | 1.570 | |
| | 0.03 | nM | 1.816 | |

### Example 11. Assessing the Extent of Nuclease Resistance of ANGPTL7 siRNAs

[1341] Resistance of select ANGPTL7 siRNAs to nuclease digestion was assessed by incubating the siRNAs in rat liver tritosomes. Each siRNA (7 ng/μL final concentration) was placed into a PCR tube containing a cocktail prepared on ice containing 1× catabolic buffer (Xenotech, Catalog #K5200, Lot #18-1-0698), 0.5× rat tritosomes (Xenotech, Catalog #R0610.LT, Lot #1610405), 0.1 U/μL porcine intestinal heparin (Zageno, Catalog #H3149-10KU). An aliquot was removed, an equal volume of 50 mM EDTA was added, and the sample placed at −80° C. This sample was designated as the 0 hr timepoint. The remainder of the reaction was placed in an Eppendorf Mastercycler Gradient and incubated at 37° C. After incubation for 4 and 24 hours, an aliquot was removed from the reaction and stopped by addition of an equal volume of 50 mM EDTA and placed at −80° C. until analysis by gel electrophoresis. All samples were then thawed on ice and 6×DNA Gel Loading Dye (ThermoFisher Catalog #R0611) was added to 1× final concentration. 20 μL of each sample was loaded onto a 20% polyacrylamide TBE gel (ThermoFisher, Catalog #EC63155BOX). Electrophoresis was carried out at a constant 100V for 75 minutes in an XCell SureLock Mini-Cell Electrophoresis System (ThermoFisher) using 1×TBE (Tris/boric/EDTA) (Fisher, Catalog #FERB52) as the tank buffer. The siRNA was visualized by staining the gel with a 1:10,000 dilution of SYBR Gold (ThermoFisher, Catalog #S-11494) in TBE for 15 minutes at room temperature with rocking. The gel was washed with 1×TBE for 15 minutes and then placed on a FotoPrep1 UV transilluminator (Fotodyne). The gel was imaged using the camera app set on MONO on an iPhone 6s with a yellow gel filter (Neewer) placed over the lens. Band intensity was measured using NIH ImageJ using the “Analyze: Gels” function. The remaining siRNA percent was normalized to the value obtained at the 0 hr timepoint for that siRNA. Results are shown in Table 10. By using this assay, we were able to determine that some siRNAs are more resistant to nuclease digestion with more

TABLE 10
Resistance of ANGPTL7 siRNAs to Nucleases
Present in Rat Liver Tritosomes

| siRNA | Timepoint (hr) | % remaining |
|---|---|---|
| ETD00269 | 0 | 100% |
| | 4 | 109% |
| | 24 | 69% |
| ETD00270 | 0 | 100% |
| | 4 | 69% |
| | 24 | 47% |
| ETD00276 | 0 | 100% |
| | 4 | 103% |
| | 24 | 78% |
| ETD00302 | 0 | 100% |
| | 4 | 68% |
| | 24 | 26% |
| ETD00353 | 0 | 100% |
| | 4 | 75% |
| | 24 | 34% |
| ETD00356 | 0 | 100% |
| | 4 | 66% |
| | 24 | 29% |
| ETD00358 | 0 | 100% |
| | 4 | 89% |
| | 24 | 48% |
| ETD00382 | 0 | 100% |
| | 4 | 126% |
| | 24 | 64% |
| ETD00370 | 0 | 100% |
| | 4 | 97% |
| | 24 | 55% |
| ETD00374 | 0 | 100% |
| | 4 | 54% |
| | 24 | 2% |
| ETD00377 | 0 | 100% |
| | 4 | 92% |
| | 24 | 49% |
| ETD00378 | 0 | 100% |
| | 4 | 87% |
| | 24 | 55% |
| ETD00381 | 0 | 100% |
| | 4 | 54% |
| | 24 | 5% |

### Example 12. siRNA-Mediated Knockdown of ANGPTL7 Expression in Primary Human Trabecular Meshwork Cells in the Presence of Dexamethasone

[1342] In this experiment, primary human trabecular meshwork cells exposed to dexamethasone were treated with a siRNA targeting ANGPTL7. Primary HTM cells (Cell Applications Catalog #634-05a) were grown to confluency in high-glucose DMEM (Cytiva cat #SH30243.01) supplemented with 10% FBS (Gemini Bio Catalog #900-108) in a water-jacketed, humidified incubator at 37° C. in an atmosphere composed of air plus 5% carbon dioxide. The cells were harvested with Trypsin/EDTA (PromoCell Catalog #C-41010), resuspended in DMEM+10% FBS at a cell density of 200,000 cells/mL, then seeded in 24-well tissue culture plates at 20,000 cells/well. Once the cells reached 80% confluency, the media was replaced, and cells were serum starved in DMEM for 24 hrs in a water-jacketed, humidified incubator at 37° C. in an atmosphere composed of air plus 5% carbon dioxide. Next, 5 μL of dexamethasone (Sigma Catalog #D4902-100MG) prepared at 50 uM was added to the wells to give a final concentration of 500 nM and the plates incubated an additional 24 hours. This was designated Day 0. On Day 1, the media was replaced with 0.5 mL DMEM, 0.5 mL DMEM containing 1 uM negative control siRNA (Accell Non-targeting Control siRNA #2, Dharmacon Catalog #D-001910-02-20) or 0.5 mL DMEM containing 1 uM ETD00752 targeting ANGPTL7. The ANGPTL7 siRNA ETD00752 has a TEG-cholesterol moiety attached to the 3′ end of the sense strand and is derived from ETD00356. ETD00752 includes the following sequences: sense strand 5′ AfsusAfuGfuAfCfCfaAfgGfaUfgUfuAfsusu[Chol-TEG]3′ (SEQ ID NO: 11377), antisense strand 5′ usAfsaCfaUfcCfuUfgguAfcAfuAfususu 3′ (SEQ ID NO: 11306). On Day 2, Day 4 and Day 6, 5 μL of 50 uM dexamethasone was added to all wells. On Day 3 and Day 5, media was replaced with 0.5 mL of fresh DMEM, 0.5 mL fresh DMEM containing 1 uM negative control siRNA (Accell Non-targeting Control siRNA #2, Dharmacon #D-001910-02-20) or 0.5 mL fresh DMEM containing 1 uM ETD00752 targeting ANGPTL7 in the appropriate wells. Controls also included cells that did not receive siRNA or dexamethsone.

[1343] On Day 8, media was collected for quantitation of ANGPTL7 protein by ELISA (RayBio® Human ANGPTL7 ELISA Kit Catalog #ELH-ANGPTL7-1) according to the manufacturer's instructions. Total RNA was harvested from the cells and cDNA prepared using TaqMan® Fast Advanced Cells-to-CT™ Kit (ThermoFisher, Catalog #A35374) according to the manufacturer's instructions. The level of ANGPTL7 mRNA from cells in each well was measured in triplicate by real-time qPCR on an Applied Biosystems 7500 Fast Real-Time PCR machine using TaqMan Gene Expression Assay for human ANGPTL7 (ThermoFisher, assay #Hs00221727_m1). The level of PPIA mRNA was measured using TaqMan Gene Expression Assay (ThermoFisher, assay #Hs99999904_m1) and used to determine relative ANGPTL7 mRNA levels from cells in each well using the delta-delta Ct method. All data were normalized to relative ANGPTL7 mRNA levels in cells treated with dexamethasone alone. Results are shown in Table 11. Results indicate primary HTM cells treated with dexamethasone have much higher levels of ANGPTL7 mRNA and ANGPTL7 protein than cells that have not been treated with dexamethasone. In addition, primary HTM cells exposed to dexamethasone and treated with ETD00752 had much lower levels of ANGPTL7 mRNA and ANGPTL7 protein than cells that had not been treated with ETD00752 or had been treated with the Accell Non-targeting Control siRNA #2.

TABLE 11
Induction of ANGPTL7 Expression by Dexamethasone and Knockdown
of ANGPTL7 expression by ETD00752 in Primary HTM Cells

| | Relative | ANGPTL7 |
|---|---|---|
| | ANGPTL7 | Protein |
| siRNA name | mRNA | (ng/uL) |
| Cells with dexamethasone | 1.00 | 15.7 |
| Accell Non-targeting Control siRNA #2 | 0.44 | 8.1 |
| ETD00752 | 0.021 | 1.6 |
| Cells without dexamethasone | 0.027 | 1.9 |

### Example 13. siRNA-Mediated Knockdown of ANGPTL7 Expression in a 3D In Vitro Model of Glaucoma

[1344] In the human eye, homeostatic intraocular pressure (IOP) is maintained by formation and drainage of the aqueous humor, primarily through the human trabecular meshwork (HTM). Approximately, 70-90% of the aqueous humor is drained through this tissue and it is believed that a decrease in outflow through the TM leads to elevated IOP. An in vitro 3D HTM model (3D-HTM™) that recapitulates the biological and physiological characteristics of the HTM has been established by the contract research organization Glauconix. The following study was performed using 3D-HTM™ in order to provide proof of concept of siRNA-mediated knockdown of ANGPTL7 in an in vitro model system of glaucoma.

[1345] The 3D-HTM™ constructs were cultured in 10% FBS-IMEM using primary donor trabecular meshwork cells over a two-week period. Once the 3D-HTM™ constructs were ready, they were placed in 6.7% FBS-IMEM for 24 h prior to the treatments. Treatments included the following: On Day 0, media was replaced with fresh 6.7% FBS medium containing 500 nM dexamethasone. On Day 3, the media was replaced with fresh 6.7% FBS medium containing 500 nM dexamethasone. On Day 4, the media was replaced with fresh 6.7% FBS medium without dexamethasone and transfected with siRNA. The siRNAs used in this study were ETD00153, ETD00353 and ETD00356. ETD00153 is an siRNA that does not target ANGPTL7 and functioned as a negative control siRNA. ETD00153 has the following sequences: sense strand 5′ UfsgsUfgGfcCfCfGfcAfcGfgGfgCfaAfsusu 3′ (SEQ ID NO: 11378), antisense strand 5′ usUfsgCfcCfcGfuGfcggGfcCfaCfasusu 3′ (SEQ ID NO: 11379). ETD00353 and ETD00356 are siRNAs that target ANGPTL7. ETD00353 has the following sequences: sense strand 5′ CfsasUfgGfaUfCfUfaCfcUfaCfuCfcAfsusu 3′ (SEQ ID NO: 11183), antisense strand 5′ usGfsgAfgUfaGfgUfagaUfcCfaUfgsusu 3′ (SEQ ID NO: 11303). ETD00356 has the following sequences: sense strand 5′ AfsusAfuGfuAfCfCfaAfgGfaUfgUfuAfsusu 3′ (SEQ ID NO:11186), antisense strand 5′ usAfsaCfaUfcCfuUfgguAfcAfuAfususu 3′ (SEQ ID NO: 11306). Transfection was accomplished using Targefect-RAW (Targeting Systems, Catalog #RAW-01). Transfection complexes were prepared on ice. First, 100 nM siRNA from 100 μM stock was added to 4.5 g/L DMEM without antibiotics and the tubes were flicked 12 times to accomplish mixing. Next, a volume of targetfect that was 1/50^{th} of the total volume of the mixture was added to the diluted siRNA and the tubes were flicked 12 times to accomplish mixing. To this a volume of the virofect enhancer reagent that was 1/25^{th} of the total volume of the mixture was added. The tubes were flicked 12 times to accomplish mixing. The mixture was then incubated at 37° C. for 25 minutes to allow the formation of the transfection complexes. Complete medium (10% pFBS DMEM with antibiotics) was then added to the transfection complexes at double the volume of the complex. For example, if the volume of the complexes was 0.5 mL, 1 mL of complete medium was added. Next, 225 μL of the complex plus complete medium mixture was added to the appropriate wells. On Day 5, dexamethasone was added to 500 nM without changing the media. On Day 6, the media was replaced with fresh media containing 6.7% FBS without dexamethasone and the wells receiving siRNA were transfected a second time using the protocol for the first transfection described above. On Day 7, dexamethasone was added to 500 nM without changing the media.

[1346] On Day 8, Total RNA was harvested from the cells using the RNAeasy Plus Mini kit (Qiagen, Catalog #74134) according to the manufacturer's instructions. The cDNA was prepared from 500 ng of total RNA using the Maxima first strand synthesis kit (ThermoFisher Catalog #K1642) according to the manufacturer's instructions. The level of ANGPTL7 mRNA from cells in each well was measured in triplicate by real-time qPCR on an Applied Biosystems 7500 Fast Real-Time PCR machine using TaqMan Gene Expression Assay for human ANGPTL7 (ThermoFisher, assay #Hs00221727_m1). The level of PPIA mRNA was measured using TaqMan Gene Expression Assay (ThermoFisher, assay #Hs99999904_m1) and used to determine relative ANGPTL7 mRNA levels from cells in each well using the delta-delta Ct method. All data were normalized to relative ANGPTL7 mRNA levels in cells treated with dexamethasone alone. Results are shown in Table 12. Results indicate 3D-HTM™ cells exposed to dexamethasone and transfected with siRNAs ETD00353 or ETD00356 had much lower levels of ANGPTL7 mRNA than 3D-HTM™ cells not receiving siRNA or those that had been transfected with the negative control siRNA ETD00153.

TABLE 12
siRNA-mediated Knockdown of ANGPTL7
expression in 3D-HTMTM cells

| siRNA name | Relative ANGPTL7 mRNA |
|---|---|
| 3D-HTM ™ cells with dexamethasone | 1.00 |
| ETD00153 | 0.95 |
| ETD00353 | 0.54 |
| ETD00356 | 0.31 |

### Example 14. Additional ANGPTL7 siRNAs for Activity in Human Cells in Culture

[1347] Chemically modified ANGPTL7 siRNAs cross reactive for human and non-human primate were assayed for ANGPTL7 mRNA knockdown activity in cells in culture. ARPE-19 (ATCC® CRL-2302™) cells were seeded in 96-well tissue culture plates at a cell density of 7,500 cells per well in DMEM:F12 (ATCC Catalog No. 30-2006) supplemented with 10% fetal bovine serum and incubated overnight in a water-jacketed, humidified incubator at 37° C. in an atmosphere composed of air plus 5% carbon dioxide. The ANGPTL7 siRNAs were individually transfected into ARPE-19 cells in duplicate wells at 1 nM or 10 nM final concentration using 0.3 μL Lipofectamine RNAiMax (Fisher) per well. Silencer Select Negative Control #1 (ThermoFisher, Catalog #4390843) was transfected at 10 nM final concentration as a control. After incubation for 48 hours at 37° C., total RNA was harvested from each well and cDNA prepared using TaqMan® Fast Advanced Cells-to-CT™ Kit (ThermoFisher, Catalog #A35374) according to the manufacturer's instructions. The level of ANGPTL7 mRNA from each well was measured in triplicate by real-time qPCR on an Applied Biosystems 7500 Fast Real-Time PCR machine using TaqMan® Gene Expression Assay for human ANGPTL7 (ThermoFisher, assay #Hs00221727_m1). The level of PPIA mRNA was measured using TaqMan® Gene Expression Assay (ThermoFisher, assay #Hs99999904_m1) and used to determine relative ANGPTL7 mRNA levels in each well using the delta-delta Ct method. All data were normalized to relative ANGPTL7 mRNA levels in untreated ARPE-19 cells. Sequences of the modified ANGPTL7 siRNAs are shown in Table 13, and results are shown in Table 14.

TABLE 13
Sequences of chemically modified ANGPTL7-specific siRNAs

| siRNA name | Sense strand (5′ to 3′) | Antisense strand (5′ to 3′) |
|---|---|---|
| ETD00936 | asasaaCfaAfCfAfaaguggcgagsusu | csUfscgcCfacuuuguUfgUfuuususu |
| | (SEQ ID NO: 11402) | (SEQ ID NO: 11422) |
| ETD00937 | CsuscaCfcCfAfAfacccacaaaasusu | usUfsuugUfggguuugGfgUfgagsusu |
| | (SEQ ID NO: 11403) | (SEQ ID NO: 11423) |
| ETD00938 | gsusauAfaGfCfUfuccuccugaususu | asUfscagGfaggaagcUfuAfuacsusu |
| | (SEQ ID NO: 11404) | (SEQ ID NO: 11424) |
| ETD00939 | csusgaGfuAfUfAfgccacuuugususu | asCfsaaaGfuggcuauAfcUfcagsusu |
| | (SEQ ID NO: 11405) | (SEQ ID NO: 11425) |
| ETD00940 | ususggGfcAfAfUfgaacucaacasusu | usGfsuugAfguucauuGfcCfcaasusu |
| | (SEQ ID NO: 11406) | (SEQ ID NO: 11426) |
| ETD00941 | csasuaAfcAfAfCfacagccuucasusu | usGfsaagGfcuguguuGfuUfaugsusu |
| | (SEQ ID NO: 11407) | (SEQ ID NO: 11427) |
| ETD00942 | usasugUfaCfCfAfaggauguuacsusu | gsUfsaacAfuccuuggUfaCfauasusu |
| | (SEQ ID NO: 11408) | (SEQ ID NO: 11428) |
| ETD00943 | usasccAfaGfGfAfuguuacaguasusu | usAfscugUfaacauccUfuGfguasusu |
| | (SEQ ID NO: 11409) | (SEQ ID NO: 11429) |
| ETD00944 | gsasugUfuAfCfAfguaaacaggasusu | usCfscugUfuuacuguAfaCfaucsusu |
| | (SEQ ID NO: 11410) | (SEQ ID NO: 11430) |
| ETD00945 | usgsuuAfcAfGfUfaaacaggaugsusu | csAfsuccUfguuuacuGfuAfacasusu |
| | (SEQ ID NO: 11411) | (SEQ ID NO: 11431) |
| ETD00946 | usgscuAfaAfAfAfgaaccauauususu | asAfsuauGfguucuuuUfuAfgcasusu |
| | (SEQ ID NO: 11412) | (SEQ ID NO: 11432) |
| ETD00947 | gsgsccUfuUfGfAfguguuagagasusu | usCfsucuAfacacucaAfaGfgccsusu |
| | (SEQ ID NO: 11413) | (SEQ ID NO: 11433) |
| ETD00948 | gsgscaCfaAfAfAfcugccuuaaasusu | usUfsuaaGfgcaguuuUfgUfgccsusu |
| | (SEQ ID NO: 11414) | (SEQ ID NO: 11434) |
| ETD00949 | gsusaaGfaAfAfCfaagcucaaggsusu | csCfsuugAfgcuuguuUfcUfuacsusu |
| | (SEQ ID NO: 11415) | (SEQ ID NO: 11435) |
| ETD00950 | asasaaCfuGfAfAfgguagauggususu | asCfscauCfuaccuucAfgUfuuususu |
| | (SEQ ID NO: 11416) | (SEQ ID NO: 11436) |
| ETD00951 | asascuGfaAfGfGfuagauggugususu | asCfsaccAfucuaccuUfcAfguususu |
| | (SEQ ID NO: 11417) | (SEQ ID NO: 11437) |
| ETD00952 | asusggUfgUfUfAfuaguuaauaasusu | usUfsauuAfacuauaaCfaCfcaususu |
| | (SEQ ID NO: 11418) | (SEQ ID NO: 11438) |
| ETD00953 | ususucCfuUfCfUfacaauaaacasusu | usGfsuuuAfuuguagaAfgGfaaasusu |
| | (SEQ ID NO: 11419) | (SEQ ID NO: 11439) |
| ETD00954 | csasauGfaAfCfUfcaacagcuaususu | asUfsagcUfguugaguUfcAfuugsusu |
| | (SEQ ID NO: 11420) | (SEQ ID NO: 11440) |
| ETD00955 | usgsaaAfuUfAfUfcuugagucuasusu | usAfsgacUfcaagauaAfuUfucasusu |
| | (SEQ ID NO: 11421) | (SEQ ID NO: 11441) |

where “Nf” is a 2′-fluoro-modified nucleoside, “n” is a 2′-O-methyl modified nucleoside, “s” is a phosphorothioate linkage, and N comprises a nucleoside.

TABLE 14
Knockdown Activity of ANGPLT7-Specific siRNAs
at 1 nM and 10 nM in Human ARPE- 19 cells

| | | | Relative ANGPTL7 | |
|---|---|---|---|---|
| | | Antisense | mRNA Level | |
| | Sense Strand | Strand | 1 nM | 10 nM |
| siRNA name | (SEQ ID NO) | (SEQ ID NO) | siRNA | siRNA |
| Untreated Cells | — | — | 1.00 | 1.00 |
| Negative Control | — | — | 0.69 | 1.50 |
| siRNA | | | | |
| ETD00936 | 11402 | 11422 | 1.54 | 1.40 |
| ETD00937 | 11403 | 11423 | 1.01 | 0.47 |
| ETD00938 | 11404 | 11424 | 0.83 | 0.45 |
| ETD00939 | 11405 | 11425 | 0.75 | 0.29 |
| ETD00940 | 11406 | 11426 | 1.07 | 0.86 |
| ETD00941 | 11407 | 11427 | 1.12 | 0.57 |
| ETD00942 | 11408 | 11428 | 0.59 | 0.12 |
| ETD00943 | 11409 | 11429 | 0.22 | 0.07 |
| ETD00944 | 11410 | 11430 | 0.83 | 0.31 |
| ETD00945 | 11411 | 11431 | 0.96 | 0.44 |
| ETD00946 | 11412 | 11432 | 0.33 | 0.50 |
| ETD00947 | 11413 | 11433 | 0.55 | 0.23 |
| ETD00948 | 11414 | 11434 | 0.41 | 0.20 |
| ETD00949 | 11415 | 11435 | 1.35 | 1.02 |
| ETD00950 | 11416 | 11436 | 0.61 | 0.20 |
| ETD00951 | 11417 | 11437 | 0.31 | 0.10 |
| ETD00952 | 11418 | 11438 | 0.19 | 0.29 |
| ETD00953 | 11419 | 11439 | 0.52 | 0.62 |
| ETD00954 | 11420 | 11440 | 0.19 | 0.09 |
| ETD00955 | 11421 | 11441 | 0.23 | 0.21 |

“—” untreated ARPE-19 cells; Negative Control siRNA, Silencer Select Negative Control #1

### Example 15. Determining the IC50 of Additional ANGPTL7 siRNAs in Human ARPE-19 Cells

[1348] The IC50 values for knockdown of ANGPTL7 mRNA by select ANGPTL7 siRNAs were determined in ARPE-19 cells. The ETD00942, ETD00943, ETD00951, ETD00952, ETD00954 and ETD00955 siRNAs were assayed individually at 3 nM, 1 nM, 0.3 nM, 0.1 nM and 0.03 nM. A subset of siRNAs was also assayed at 0.01 nM. The ARPE-19 (ATCC® CRL-2302™) cells were seeded in 96-well tissue culture plates at a cell density of 7,500 cells per well in DMEM supplemented with 10% fetal bovine serum and incubated overnight in a water-jacketed, humidified incubator at 37° C. in an atmosphere composed of air plus 5% carbon dioxide. The ANGPTL7 siRNAs were individually transfected into ARPE-19 cells in triplicate wells using 0.3 μL Lipofectamine RNAiMax (Fisher) per well. Silencer Select Negative Control #1 (Thermofisher, Catalog #4390843) was transfected at 0.03 and 3 nM final concentration as a control. After incubation for 48 hours at 37° C., total RNA was harvested from each well and cDNA prepared using TaqMan® Fast Advanced Cells-to-CT™ Kit (ThermoFisher, Catalog #A35374) according to the manufacturer's instructions. The level of ANGPTL7 mRNA from each well was measured in triplicate by real-time qPCR on an Applied Biosystems 7500 Fast Real-Time PCR machine using TaqMan® Gene Expression Assay for human ANGPTL7 (ThermoFisher, assay #Hs00221727_m1). The level of PPJA mRNA was measured using TaqMan® Gene Expression Assay (ThermoFisher, assay #Hs99999904_m1) and used to determine relative ANGPTL7 mRNA levels in each well using the delta-delta Ct method. All data were normalized to relative ANGPTL7 mRNA levels in untreated ARPE-19 cells. Curve fit was accomplished using the [inhibitor]vs. response (three parameters) function in GraphPad Prism software. Results are shown in Table 15.

TABLE 15
IC50 Values of ETD00942, ETD00943, ETD00951,
ETD00952, ETD00954 and ETD00955 ANGPTL7
siRNAs in Human ARPE-19 Cells

| | | Relative | |
|---|---|---|---|
| | | ANGPTL7 | |
| | | mRNA | |
| siRNA | [siRNA] | Level | IC50 |
| — | — | 1.000 | ND |
| Negative Control | 1 nM | 1.42 | ND |
| siRNA | | | |
| ETD00942 | 30 nM | 0.12 | 0.16 |
| | 10 nM | 0.27 | |
| | 3 nM | 0.46 | |
| | 1 nM | 0.71 | |
| | 0.3 nM | 0.82 | |
| | 0.1 nM | 1.50 | |
| | 0.03 nM | 1.95 | |
| ETD00943 | 30 nM | 0.10 | 0.25 |
| | 10 nM | 0.24 | |
| | 3 nM | 0.36 | |
| | 1 nM | 0.71 | |
| | 0.3 nM | 0.88 | |
| | 0.1 nM | 1.36 | |
| | 0.03 nM | 1.76 | |
| ETD00951 | 30 nM | 0.09 | 0.29 |
| | 10 nM | 0.17 | |
| | 3 nM | 0.24 | |
| | 1 nM | 0.58 | |
| | 0.3 nM | 0.98 | |
| | 0.1 nM | 1.36 | |
| | 0.03 nM | 1.77 | |
| ETD00952 | 30 nM | 0.37 | 0.08 |
| | 10 nM | 0.34 | |
| | 3 nM | 0.30 | |
| | 1 nM | 0.43 | |
| | 0.3 nM | 0.64 | |
| | 0.1 nM | 1.10 | |
| | 0.03 nM | 1.57 | |
| ETD00954 | 30 nM | 0.16 | 0.24 |
| | 10 nM | 0.31 | |
| | 3 nM | 0.39 | |
| | 1 nM | 1.00 | |
| | 0.3 nM | 1.58 | |
| | 0.1 nM | 2.30 | |
| | 0.03 nM | 3.09 | |
| ETD00955 | 30 nM | 0.34 | 0.24 |
| | 10 nM | 0.53 | |
| | 3 nM | 0.76 | |
| | 1 nM | 1.33 | |
| | 0.3 nM | 1.77 | |
| | 0.1 nM | 2.65 | |
| | 0.03 nM | 3.39 | |

“—” untreated ARPE-19 cells; Negative Control siRNA, Silencer Select Negative Control #1

### Example 16. Assessing the Extent of Nuclease Resistance of Additional ANGPTL7 siRNAs

[1349] Resistance of select ANGPTL7 siRNAs to nuclease digestion was assessed by incubating the siRNAs in rat liver tritosomes. Each siRNA (7 ng/μL final concentration) was placed into a PCR tube containing a cocktail prepared on ice containing 1× catabolic buffer (Xenotech, Catalog #K5200, Lot #18-1-0698), 0.5× rat tritosomes (Xenotech, Catalog #R0610.LT, Lot #1610405), 0.1 U/μL porcine intestinal heparin (Zageno, Catalog #H3149-10KU). An aliquot was removed, an equal volume of 50 mM EDTA was added, and the sample placed at −80° C. This sample was designated as the 0 hr timepoint. The remainder of the reaction was placed in an Eppendorf Mastercycler Gradient and incubated at 37° C. After incubation for 4 and 24 hours, an aliquot was removed from the reaction and stopped by addition of an equal volume of 50 mM EDTA and placed at −80° C. until analysis by gel electrophoresis. All samples were then thawed on ice and 6×DNA Gel Loading Dye (ThermoFisher Catalog #R0611) was added to 1× final concentration. 20 μL of each sample was loaded onto a 20% polyacrylamide TBE gel (ThermoFisher, Catalog #EC63155BOX). Electrophoresis was carried out at a constant 100V for 75 minutes in an XCell SureLock Mini-Cell Electrophoresis System (ThermoFisher) using 1×TBE (Tris/boric/EDTA) (Fisher, Catalog #FERB52) as the tank buffer. The siRNA was visualized by staining the gel with a 1:10,000 dilution of SYBR Gold (ThermoFisher, Catalog #S-11494) in TBE for 15 minutes at room temperature with rocking. The gel was washed with 1×TBE for 15 minutes and then placed on a FotoPrep1 UV transilluminator (Fotodyne). The gel was imaged using the camera app set on MONO on an iPhone 6s with a yellow gel filter (Neewer) placed over the lens. Band intensity was measured using NIH ImageJ using the “Analyze: Gels” function. The remaining siRNA percent was normalized to the value obtained at the 0 hr timepoint for that siRNA. Results are shown in Table 16. By using this assay, it was determined that some siRNAs are more resistant to nuclease digestion with more remaining intact over time compared with other siRNAs with the same modification pattern.

TABLE 16
Resistance of ANGPTL7 siRNAs to Nucleases
Present in Rat Liver Tritosomes

| | Timepoint | % |
|---|---|---|
| siRNA | (hr) | remaining |
| ETD00942 | 0 | 100% |
| | 4 | 24% |
| | 24 | 9% |
| ETD00943 | 0 | 100% |
| | 4 | 77% |
| | 24 | 19% |
| ETD00951 | 0 | 100% |
| | 4 | 75% |
| | 24 | 52% |
| ETD00952 | 0 | 100% |
| | 4 | 85% |
| | 24 | 13% |
| ETD00954 | 0 | 100% |
| | 4 | 57% |
| | 24 | 34% |
| ETD00955 | 0 | 100% |
| | 4 | 52% |
| | 24 | 28% |
| ETD00356 | 0 | 100% |
| | 4 | 57% |
| | 24 | 38% |

### Example 17. siRNA-Mediated Knockdown of ANGPTL7 Expression in Primary Human Trabecular Meshwork Cells in the Presence of Dexamethasone

[1350] In this experiment, primary human trabecular meshwork cells exposed to dexamethasone were treated with a siRNA targeting ANGPTL7. Primary HTM cells (Cell Applications Catalog #634-05a) were grown to confluency in high-glucose DMEM (Cytiva cat #SH30243.01) supplemented with 10% FBS (Gemini Bio Catalog #900-108) in a water-jacketed, humidified incubator at 37° C. in an atmosphere composed of air plus 5% carbon dioxide. The cells were harvested with Trypsin/EDTA (PromoCell Catalog #C-41010), resuspended in DMEM+10% FBS at a cell density of 200,000 cells/mL, then seeded in 24-well tissue culture plates at 20,000 cells/well. Once the cells reached 80% confluency, the media was replaced, and cells were serum starved in DMEM for 24 hrs in a water-jacketed, humidified incubator at 37° C. in an atmosphere composed of air plus 5% carbon dioxide. Next, 5 μL of dexamethasone (Sigma Catalog #D4902-100MG) prepared at 50 μM was added to the wells to give a final concentration of 500 nM and the plates incubated an additional 24 hours. This was designated Day 0. On Day 1, the media was replaced with 0.5 mL DMEM, 0.5 mL DMEM containing 1 μM ETD01040, ETD01041, ETD01042 or ETD01043 targeting ANGPTL7. The ANGPTL7 siRNAs have a TEG-cholesterol moiety attached to the 3′ end of their sense strands and are derived from ETD00370, ETD00377, ETD00378 and ETD00381, respectively. ETD01040 includes the following sequences: sense strand 5′-AfsgsCfaGfuAfGfCfuUfgUfcUfuUfuAfsusu-[Chol-TEG]-3′ (SEQ ID NO: 11442), antisense strand 5′-usAfsaAfaGfaCfaAfgcuAfcUfgCfususu-3′ (SEQ ID NO: 11446). ETD01041 includes the following sequences: sense strand 5′-AfscsAfcAfaAfAfAfuUfgUfuCfgGfcAfsusu-[Chol-TEG]-3′ (SEQ ID NO: 11443), antisense strand 5′-usGfscCfgAfaCfaAfuuuUfuGfuGfususu-3′ (SEQ ID NO: 11447). ETD01042 includes the following sequences: sense strand 5′-CfsasCfaAfaAfAfUfuGfuUfcGfgCfuAfsusu-[Chol-TEG]-3′ (SEQ ID NO: 11444), antisense strand 5′-usAfsgCfcGfaAfcAfauuUfuUfgUfgsusu-3′ (SEQ ID NO: 11448). ETD01043 includes the following sequences: sense strand 5′-GfsasAfgGfuAfGfAfuGfgUfgUfuAfuAfsusu-[Chol-TEG]-3′ (SEQ ID NO: 11445), antisense strand 5′-usAfsuAfaCfaCfcAfucuAfcCfuUfcsusu-3′ (SEQ ID NO: 11449).

[1351] On Day 2, Day 4, and Day 6, 5 μL of 50 μM dexamethasone was added to all wells. On Day 3 and Day 5, media was replaced with 0.5 mL of fresh DMEM or 0.5 mL fresh DMEM containing 1 μM ETD01040, ETD01041, ETD01042, or ETD01043 targeting ANGPTL7 in the appropriate wells. Controls also included cells that did not receive siRNA or dexamethsone.

[1352] On Day 8, total RNA was harvested from the cells and cDNA prepared using TaqMan® Fast Advanced Cells-to-CT™ Kit (ThermoFisher, Catalog #A35374) according to the manufacturer's instructions. The level of ANGPTL7 mRNA from cells in each well was measured in triplicate by real-time qPCR on an Applied Biosystems 7500 Fast Real-Time PCR machine using TaqMan Gene Expression Assay for human ANGPTL7 (ThermoFisher, assay #Hs00221727_m1). The level of PPIA mRNA was measured using TaqMan Gene Expression Assay (ThermoFisher, assay #Hs99999904_m1) and used to determine relative ANGPTL7 mRNA levels from cells in each well using the delta-delta Ct method. All data were normalized to relative ANGPTL7 mRNA levels in cells treated with dexamethasone alone. Results are shown in Table 17. Results indicate primary HTM cells treated with dexamethasone have much higher levels of ANGPTL7 mRNA than cells that have not been treated with dexamethasone. In addition, primary HTM cells exposed to dexamethasone and treated with ETD01040, ETD01041, ETD01042, or ETD01043 had much lower levels of ANGPTL7 mRNA than cells that had not been treated with siRNA.

TABLE 17
Induction of ANGPTL7 Expression by
Dexamethasone and Knockdown of ANGPTL7
expression by ETD01040, ETD01041, ETD01042
and ETD01043 in Primary HTM Cells

| | Relative |
|---|---|
| | ANGPTL7 |
| | mRNA |
| siRNA name | Level |
| Cells treated with dexamethasone | 1.00 |
| Untreated cells | 0.20 |
| ETD01040 | 0.01 |
| ETD01041 | 0.05 |
| ETD01042 | 0.05 |
| ETD01043 | 0.03 |

### Example 18. siRNA-Mediated Knockdown of ANGPTL7 Expression in a 3D In Vitro Model of Glaucoma

[1353] In the human eye, homeostatic intraocular pressure (IOP) is maintained by formation and drainage of the aqueous humor, primarily through the human trabecular meshwork (HTM). Approximately, 70-90% of the aqueous humor is drained through this tissue and it is believed that a decrease in outflow through the HTM leads to elevated IOP. An in vitro 3D HTM model (3D-HTM™) that recapitulates the biological and physiological characteristics of the HTM has been established by the contract research organization Glauconix. The following study was performed using 3D-HTM™ in order to provide proof of concept that siRNA-mediated knockdown of ANGPTL7 in an in vitro model system of glaucoma can increase outflow through the HTM.

[1354] Separate 3D-HTM™ constructs containing primary trabecular cells from four separate donors were cultured in 10% FBS-IMEM over a two-week period. Once the 3D-HTM™ constructs were ready, they were placed in 6.7% FBS-IMEM for 24 h prior to the treatments. Treatments included the following: On Day 0, media was replaced with fresh 6.7% FBS medium containing 500 nM dexamethasone. On Day 3, the media was replaced with fresh 6.7% FBS medium in the control wells or 6.7% FBS medium containing 500 nM dexamethasone. On Day 4, the media was replaced with fresh 6.7% FBS medium without dexamethasone and transfected with siRNA. The siRNAs used in this study were ETD00153 and ETD00356. ETD00153 is an siRNA that does not target ANGPTL7 and functioned as a negative control siRNA. ETD00153 has the following sequences: sense strand 5′ UfsgsUfgGfcCfCfGfcAfcGfgGfgCfaAfsusu 3′ (SEQ ID NO: 11378), antisense strand 5′ usUfsgCfcCfcGfuGfcggGfcCfaCfasusu 3′ (SEQ ID NO: 11379). ETD00356 is an siRNA that targets ANGPTL7. ETD00356 has the following sequences: sense strand 5′ AfsusAfuGfuAfCfCfaAfgGfaUfgUfuAfsusu 3′ (SEQ ID NO: 11186), antisense strand 5′ usAfsaCfaUfcCfuUfgguAfcAfuAfususu 3′ (SEQ ID NO: 11306). Transfection was accomplished using Targefect-RAW (Targeting Systems, Catalog #RAW-01). Transfection complexes were prepared on ice. First, 100 nM siRNA from 100 μM stock was added to 4.5 g/L DMEM without antibiotics and the tubes were flicked 12 times to accomplish mixing. Next, a volume of Targefect that was 1/50^{th} of the total volume of the mixture was added to the diluted siRNA and the tubes were flicked 12 times to accomplish mixing. To this, a volume of the virofect enhancer reagent that was 1/25^{th} of the total volume of the mixture was added. The tubes were flicked 12 times to accomplish mixing. The mixture was then incubated at 37° C. for 25 minutes to allow the formation of the transfection complexes. Complete medium (10% pFBS DMEM with antibiotics) was then added to the transfection complexes at double the volume of the complex. For example, if the volume of the complexes was 0.5 mL, 1 mL of complete medium was added. Next, 225 μL of the complex plus complete medium mixture was added to the appropriate wells. On Day 5, dexamethasone was added to 500 nM without changing the media only in the wells containing the tissue constructs undergoing dexamethasone treatment. On Day 6, the media in all wells was replaced with fresh media containing 6.7% FBS without dexamethasone and the wells receiving siRNA were transfected a second time using the protocol for the first transfection described above. On Day 7, dexamethasone was added to 500 nM without changing the media only in the wells containing the tissue constructs undergoing dexamethasone treatment. All treatments were performed on tissue constructs in parallel wells. One set of wells was used to measure mRNA and protein and the other set for perfusion studies to measure outflow.

[1355] On Day 8, media was collected for quantitation of ANGPTL7 protein by ELISA (RayBio® Human ANGPTL7 ELISA Kit Catalog #ELH-ANGPTL7-1) according to the manufacturer's instructions. Total RNA was harvested from the cells using the RNAeasy Plus Mini kit (Qiagen, Catalog #74134) according to the manufacturer's instructions. The cDNA was prepared from 500 ng of total RNA using the Maxima first strand synthesis kit (ThermoFisher Catalog #K1642) according to the manufacturer's instructions. The level of ANGPTL7 mRNA from cells in each well was measured in triplicate by real-time qPCR on an Applied Biosystems 7500 Fast Real-Time PCR machine using TaqMan Gene Expression Assay for human ANGPTL7 (ThermoFisher, assay #Hs00221727_m1). The level of PPIA mRNA was measured using TaqMan Gene Expression Assay (ThermoFisher, assay #Hs99999904_m1) and used to determine relative ANGPTL7 mRNA levels from cells in each well using the delta-delta Ct method. All data were normalized to relative ANGPTL7 mRNA levels in cells treated with dexamethasone alone. The mean values of the four donors are shown in Table 18. Results indicate that on Day 8, 3D-HTM™ cells exposed to dexamethasone and transfected with ETD00356 had much lower levels of ANGPTL7 mRNA and ANGPTL7 protein than 3D-HTM™ cells exposed to dexamethasone and not receiving siRNA or those that had been transfected with the negative control siRNA ETD00153.

[1356] In the parallel set of wells, the tissue constructs were perfused to determine outflow. Briefly, the constructs were securely placed in the perfusion chamber and then perfused at various rates for 5 hours per flow rate (2, 4, 8, and 16 μl/min) with medium. Samples were perfused in an apical-to-basal direction, with perfusion medium consisting of Dulbecco's modified Eagle's medium (DMEM) with 0.1% gentamicin. The temperature was maintained at 34C. Pressure was continuously monitored and recorded. Additionally, the “outflow facility” was calculated mathematically after the treatments. The mean values of the four donors are shown in Table 18. Results indicate that on Day 8, 3D-HTM™ cells exposed to dexamethasone and transfected with ETD00356 had much greater outflow facility than 3D-HTM™ cells exposed to dexamethasone and not receiving siRNA or those that had been transfected with the negative control siRNA ETD00153.

TABLE 18
siRNA-mediated Knockdown of ANGPTL7
expression in 3D-HTM ™ cells

| | Relative | | |
|---|---|---|---|
| | ANGPTL7 | ANGPTL7 | |
| | mRNA | protein | Outflow facility |
| Treatment | Level | (ng/ml) | (μL/min/mm2/mmHg) |
| 3D-HTM ™ cells with | 16.06 | 56.75 | 0.32 |
| dexamethasone | | | |
| Untreated 3D-HTM ™ | 1.00 | ND | 0.57 |
| cells | | | |
| ETD00153 | 10.74 | 46.12 | 0.27 |
| ETD00356 | 2.59 | 11.83 | 0.54 |

### Example 19. Additional siRNA-Mediated Knockdown of ANGPTL7 Expression in a 3D In Vitro Model of Glaucoma

[1357] In the human eye, homeostatic intraocular pressure (IOP) is maintained by formation and drainage of the aqueous humor, primarily through the human trabecular meshwork (HTM). Approximately, 70-90% of the aqueous humor is drained through this tissue and it is believed that a decrease in outflow through the HTM leads to elevated IOP. An in vitro 3D HTM model (3D-HTM™) that recapitulates the biological and physiological characteristics of the HTM has been established by the contract research organization Glauconix. The following study is performed using 3D-HTM™ in order to provide proof of concept that siRNA-mediated knockdown of ANGPTL7 in an in vitro model system of glaucoma can increase outflow through the HTM.

[1358] Separate 3D-HTM™ constructs containing primary trabecular cells from four separate donors are cultured in 10% FBS-IMEM over a two-week period. Once the 3D-HTM™ constructs are ready, they are placed in 0.5% FBS-IMEM for 24 hours prior to the treatments. Treatments include the following: On Day 0, media is replaced with fresh 0.5% FBS medium containing 500 nM dexamethasone in 0.5% FBS medium. On Day 3, the media is replaced with fresh 0.5% FBS medium in the control wells or 0.5% FBS medium containing 500 nM dexamethasone. On Day 4, the media is replaced with fresh 0.5% FBS medium without dexamethasone and siRNA is applied.

[1359] The siRNAs used in this study are ETD01053 and ETD00752. ETD01053 is an siRNA that does not target ANGPTL7 and functions as a negative control siRNA. ETD01053 has the following sequences: sense strand 5′-csusuaCfgCfUfGfaguacuucgasusu[Chol-TEG]-3′ (SEQ ID NO: 11523), antisense strand 5′-usCfsgaaGfuacucagCfgUfaagsusu-3′ (SEQ ID NO: 11527). ETD00752 is an siRNA that targets ANGPTL7. ETD00752 includes the following sequences: sense strand 5′-AfsusAfuGfuAfCfCfaAfgGfaUfgUfuAfsusu[Chol-TEG]-3′ (SEQ ID NO: 11377), antisense strand 5′-usAfsaCfaUfcCfuUfgguAfcAfuAfususu-3′ (SEQ ID NO: 11306). Transfection is accomplished without the use of a transfection reagent. Specifically, 16 μl of 100 μM stock siRNA to 1584 μl of fresh media containing 0.5% FBS. Next, 500 μL of the siRNA+medium mixture is added to appropriate wells. On Day 5, dexamethasone is added to 500 nM without changing the media only in the wells containing the tissue constructs undergoing dexamethasone treatment. On Day 6, the media in all wells is replaced with fresh media containing 0.5% FBS without dexamethasone and the wells receiving siRNA are transfected a second time using the protocol for the first transfection described above. On Day 7, dexamethasone is added to 500 nM without changing the media only in the wells containing the tissue constructs undergoing dexamethasone treatment. On Day 8, the media in all wells is replaced with fresh media containing 0.5% FBS without dexamethasone and the wells receiving siRNA are transfected a third time using the protocol for the first transfection described above. Cells are harvested on Day 10. All treatments are performed on tissue constructs in parallel wells. One set of wells is used to measure mRNA and protein and the other set is used for perfusion studies to measure outflow facility.

[1360] On Days 3 and 10, media is collected for quantitation of ANGPTL7 protein by ELISA (RayBio® Human ANGPTL7 ELISA Kit, Catalog #ELH-ANGPTL7-1) according to the manufacturer's instructions. Total RNA is harvested from the cells using the RNeasy® Plus Mini kit (Qiagen, Catalog #74134) according to the manufacturer's instructions. The cDNA is prepared from 500 ng of total RNA using the Maxima® First Strand cDNA synthesis kit (ThermoFisher, Catalog #K1642) according to the manufacturer's instructions. The level of ANGPTL7 mRNA from cells in each well is measured in triplicate by real-time qPCR on an Applied Biosystems™ 7500 Fast Real-Time PCR machine using TaqMan Gene Expression Assay for human ANGPTL7 (ThermoFisher, assay #Hs00221727_m1). The level of PPIA mRNA is measured using TaqMan® Gene Expression Assay (ThermoFisher, assay #Hs99999904_m1) and used to determine relative ANGPTL7 mRNA levels from cells in each well using the delta-delta Ct method. All data are normalized to relative ANGPTL7 mRNA levels in cells treated with dexamethasone alone.

[1361] In the parallel set of wells, the tissue constructs are perfused to determine outflow. Briefly, the constructs are securely placed in the perfusion chamber and then perfused at various rates for 5 hours per flow rate (2, 4, 8, and 16 l/min) with medium. Samples are perfused in an apical-to-basal direction, with perfusion medium consisting of Dulbecco's modified Eagle's medium (DMEM) with 0.1% gentamicin. The temperature is maintained at 34° C. Pressure is continuously monitored and recorded. Additionally, the “outflow facility” is calculated mathematically after the treatments.

### Example 20. siRNA-Mediated Modulation of ANGPTL7 and Effects on Intraocular Pressure in Non-Human Primates

[1362] In this experiment, non-human primates are used to evaluate the effect of siRNA inhibition of ANGPTL7 in the eye.

[1363] Cynomolgus monkeys are divided into 4 groups. All treatments are applied to both eyes via intravitreal injection (IVT). Group A (n=4) is treated with vehicle, and Groups B, C, and D (n=4 per group) are treated with ANGPTL7 targeting siRNAs.

[1364] The ANGPTL7 siRNA has the following sequence: sense strand 5′ GUACAACUGCUGCACAGACUU 3′ (SEQ ID NO:11089), antisense strand 5′ GUCUGUGCAGCAGUUGUACUU 3′ (SEQ ID NO: 11090). Some preferred siRNA sequences may include any one of ETD00342 (sense strand 5′ CfsasAfaGfgUfGfGfcUfaCfuGfgUfaAfsusu 3′ (SEQ ID NO: 11172), antisense strand 5′ usUfsaCfcAfgUfaGfccaCfcUfuUfgsusu 3′ (SEQ ID NO: 11292)), ETD00343 (sense strand 5′ AfsasGfgUfgGfCfUfaCfuGfgUfaCfaAfsusu 3′ (SEQ ID NO: 11173), antisense strand 5′ usUfsgUfaCfcAfgUfagcCfaCfcUfususu 3′ (SEQ ID NO: 11293)), ETD00344 (sense strand 5′ GfsusGfgCfuAfCfUfgGfuAfcAfaCfuAfsusu 3′ (SEQ ID NO: 11174), antisense strand 5′ usAfsgUfuGfuAfcCfaguAfgCfcAfcsusu 3′ (SEQ ID NO: 11294)), ETD00345 (sense strand 5′ UfsgsGfuAfcAfAfCfuGfcUfgCfaCfaAfsusu 3′ (SEQ ID NO: 11175), antisense strand 5′ usUfsgUfgCfaGfcAfguuGfuAfcCfasusu 3′ (SEQ ID NO: 11295)), ETD00346 (sense strand 5′ GfsusAfcAfaCfUfGfcUfgCfaCfaGfaAfsusu 3′ (SEQ ID NO: 11176), antisense strand 5′ usUfscUfgUfgCfaGfcagUfuGfuAfcsusu 3′ (SEQ ID NO: 11296)), ETD00752 (sense strand 5′ AfsusAfuGfuAfCfCfaAfgGfaUfgUfuAfsusu[Chol-TEG]3′ (SEQ ID NO: 11377), antisense strand 5′ usAfsaCfaUfcCfuUfgguAfcAfuAfususu 3′ (SEQ ID NO: 11306), ETD01040 (sense strand 5′-AfsgsCfaGfuAfGfCfuUfgUfcUfuUfuAfsusu-[Chol-TEG]-3′ (SEQ ID NO: 11442), antisense strand 5′-usAfsaAfaGfaCfaAfgcuAfcUfgCfususu-3′ (SEQ ID NO: 11446)), ETD01043 (sense strand 5′-GfsasAfgGfuAfGfAfuGfgUfgUfuAfuAfsusu-[Chol-TEG]-3′ (SEQ ID NO: 11445), antisense strand 5′-usAfsuAfaCfaCfcAfucuAfcCfuUfcsusu-3′ (SEQ ID NO: 11449)). Some embodiments include any one of ETD00342, ETD00343, ETD00344, ETD00345, ETD00346, ETD00752, ETD01040, or ETD1043 but without the modification patterns of any of SEQ ID NOs: 11172-11176, 11377, 11442, 11445, 11292-11296, 11306, 11443, 11449, or with different modifications or modification patterns than those SEQ ID NOs. A hydrophobic moiety, such as cholesterol, may also be attached to the siRNA. A ligand that binds to receptors on the cell surface, such as RGD to integrins, may also be attached to the siRNA. Hydrophobic groups may be combined with cell-targeting ligands to increase cellular uptake. The non-targeting control siRNA has the following sequence: sense strand 5′ GUUGUACAGCAUGCGGAGAUU 3′ (SEQ ID NO: 11091), antisense strand 5′ UCUCCGCAUGCUGUACAACUU 3′ (SEQ ID NO: 11092).

[1365] At designated time points, an eye speculum is placed followed by a drop of proparacaine hydrochloride 0.5% and 5% Betadine solution, and a rinse with sterile saline. IVT injections are performed according to the treatment assignments. IVT injections to the central vitreous are administered using a 31-gauge 0.375 inch needle inserted inferotemporally at the level of the ora serrata ˜2 mm posterior to the limbus. A topical triple antibiotic neomycin, polymyxin, bacitracin ophthalmic ointment (or equivalent) is administered following injections.

[1366] The study length is 44 days. siRNA or vehicle treatment occurs on day 0.

[1367] IOP is measured on days 3, 7, 14, 21, 28, 35, 42, and 44. At designated time points between 8:00 and 11:00 a.m., intraocular pressure (IOP) is measured OU within ten minutes of sedation after placement of the monkey in a supine position. IOP measures are performed with a TonoVet tonometer set to the dog (d) calibration setting. Three measures are taken from each eye at each examination time point and the mean IOP defined.

[1368] Once prior to dosing (baseline), on Days 3, 7, 21, and 42, slit lamp biomicroscopy is performed. Clinical ophthalmic findings are documented and quantified using a modified Hackett-McDonald nonhuman primate scoring system. A composite clinical score is calculated as the sum of scored components of the ophthalmic scoring system.

[1369] Once prior to dosing (baseline), on Days 21 and 42, color fundus imaging is performed. Once prior to dosing (baseline), on Days 21 and 42, retinal thickness is determined using color fundus imaging.

[1370] Animals are euthanized on day 44. Both eyes from each animal are harvested and dissected along the equator and each hemisphere is placed in RNAlater. Total RNA is extracted from homogenized tissue and reverse transcribed to cDNA using a First-Strand III cDNA Synthesis kit. Normalized cDNA quantification is carried out by real-time TaqMan® PCR using fluorescently labeled TaqMan® probes/primers sets of selected genes (ANGPTL7, MYOC, COL1A1, COL5A1, VCAN, FN1, and PPIA). Reactions are carried out in 20 μL aliquots using TaqMan® Universal PCR Master Mix No AmpErase UNG ran on an ABI Prism 7500 Fast Real-Time PCR System Sequence Detection System and analyzed by the 7500 System software. Relative Quantification (RQ) values between treated and untreated samples are calculated by the formula 2^{-ΔΔCT}, where C_{T} is the cycle at threshold (automatic measurement), ΔC_{T} is C_{T} of the assayed gene minus C_{T} of the endogenous control (PPIA), and ΔΔC_{T} is the ΔC_{T} of the normalized assayed gene in the treated sample minus the ΔC_{T} of the same gene in the untreated one (calibrator).

### Example 21. siRNA-Mediated Knockdown of ANGPTL7 Expression in Primary Human Trabecular Meshwork Cells in the Presence of Dexamethasone

[1371] In this experiment, the cell line ARPE-19 (ATCC® CRL-2302™) was used to evaluate gene knockdown by cholesterol-conjugated siRNAs targeting ANGPTL7. Cells were seeded in 96-well tissue culture plates at a density of 10,000 cells per well in DMEM:F12 (ATCC Catalog No. 30-2006) supplemented with 10% fetal bovine serum and incubated overnight in a water-jacketed, humidified incubator at 37° C. in an atmosphere composed of air plus 5% carbon dioxide. Once the cells reached 80% confluency, the media was replaced, and cells were serum starved in DMEM for 24 hrs in a water-jacketed, humidified incubator at 37° C. in an atmosphere composed of air plus 5% carbon dioxide. On Day 1, the media was replaced with 0.5 mL DMEM, 0.5 mL DMEM containing 1 uM negative control siRNA targeting luciferase sense strand: 5′-csusuaCfgCfUfGfaguacuucgasusu[cholTEG]-3′ (SEQ ID NO: 11523) and antisense strand: 5′-usCfsgaaGfuacucagCfgUfaagsusu-3′ (SEQ ID NO: 11540), or 0.5 mL DMEM containing 1 uM of siRNA's that target human ANGPTL7 from Table 19. In Table 19, Nf (e.g. Af, Uf, Cf, or Gf) includes a 2′-fluoro-modified nucleoside, n (e.g. a, u, c, or g) includes a 2′-O-methyl modified nucleoside, and “s” is a phosphorothioate linkage. The modified versions of EDT1066-EDT1070 were used in this experiment. The modified versions of the sense strands in Table 19 include the unmodified sequences (shown for reference), with modification pattern 2S in addition to a 3′ CholTEG moiety. The modified versions of the antisense strands in Table 19 include the unmodified sequences (shown for reference), with modification pattern 3AS.

TABLE 19
siRNA information

| | | Unmodified | Unmodified | Modified | Modified |
|---|---|---|---|---|---|
| | | version- | version- | version- | version- |
| | | sense | antisense | sense | antisense |
| Duplex | | sequence | sequence | sequence | sequence |
| number | Position | 5′ to 3′ | 5′ to 3′ | 5′ to 3′ | 5′ to 3′ |
| ETD | 1425 | UAUGUACCA | GUAACAUCCU | usasugUfaCfCfAfagga | usUfsaac Afuccuug |
| 1066 | | AGGAUGUUA | UGGUACAUA | uguuacsusu (SEQ ID | gUfaCfauasusu |
| | | C | (SEQ ID NO: | NO: 11408)- | (SEQ ID NO: |
| | | (SEQ ID NO: | 11534) | [CholTEG] | 11539) |
| | | 11529) | | | |
| ETD | 1429 | UACCAAGGA | UACUGUAACA | usascc AfaGfGfAfuguu | usAfscugUfaacaucc |
| 1067 | | UGUUACAGU | UCCUUGGUA | acaguasusu (SEQ ID | UfuGfguasusu |
| | | A (SEQ ID NO: | (SEQ ID NO: | NO: 11409)- | (SEQ ID NO: |
| | | 11530) | 11535) | [CholTEG] | 11429) |
| ETD | 2087 | AACUGAAGG | ACACCAUCUA | asascuGfaAfGfGfuaga | asCfsaccAfucuaccu |
| 1068 | | UAGAUGGUG | CCUUCAGUU | uggugususu (SEQ ID | UfcAfguususu |
| | | U (SEQ ID NO: | (SEQ ID NO: | NO: 11417)- | (SEQ ID NO: |
| | | 11531) | 11536) | [CholTEG] | 11437) |
| ETD | 2099 | AUGGUGUUA | UUAUUAACUA | asusgg UfgUfUfAfuagu | usUfsauuAfacuaua |
| 1069 | | UAGUUAAUA | UAACACCAU | uaauaasusu (SEQ ID | aCfaCfcaususu |
| | | A (SEQ ID NO: | (SEQ ID NO: | NO: 11418)- | (SEQ ID NO: |
| | | 11532) | 11537) | [CholTEG] | 11438) |
| ETD | 948 | CAAUGAACU | AUAGCUGUUG | csasauGfaAfCfUfcaaca | asUfsagcUfguugag |
| 1070 | | CAACAGCUA | AGUUCAUUG | gcuaususu (SEQ ID | uUfcAfuugsusu |
| | | U (SEQ ID NO: | (SEQ ID NO: | NO: 11420)- | (SEQ ID NO: |
| | | 11533) | 11538) | [CholTEG] | 11440) |

[1372] On Day 3, the delivery was repeated and media was replaced with 0.5 mL of fresh DMEM, 0.5 mL fresh DMEM containing 1 uM negative control siRNA targeting luciferase sense strand or 0.5 mL fresh DMEM containing 1 uM siRNA's ETD 1066-1070 (modified versions) in the appropriate wells.

[1373] On Day 5, total RNA was harvested from the cells and cDNA prepared using TaqMan® Fast Advanced Cells-to-CT™ Kit (ThermoFisher, Catalog #A35374) according to the manufacturer's instructions. The level of ANGPTL7 mRNA from cells in each well was measured in triplicate by real-time qPCR on an Applied Biosystems QuantStudio 6 Pro real-time PCR machine using TaqMan Gene Expression Assay for human ANGPTL7 (ThermoFisher, assay #Hs00221727_m1). The level of PPIA mRNA was measured using TaqMan Gene Expression Assay (ThermoFisher, assay #Hs99999904_m1) and used to determine relative ANGPTL7 mRNA levels from cells in each well using the delta-delta Ct method. All data were normalized to relative ANGPTL7 mRNA levels in cells treated with luciferase control. Results are shown in Table 20. Results indicate primary ARPE cells treated with luciferase siRNA had much higher levels of ANGPTL7 mRNA than cells treated with ANGPTL7 targeting siRNA's. Thus, cholesterol-conjugated siRNAs that target ANGPTL7 may be useful in one or more of the methods or compositions described herein.

TABLE 20
Knockdown of ANGPTL7 expression by
ETD1066-ETD1070 in ARPE-19 Cells

| | Relative |
|---|---|
| | ANGPTL7 |
| siRNA name | mRNA |
| Luc siRNA | 1.00 |
| ETD1066 | 0.28 |
| ETD1067 | 0.32 |
| ETD1068 | 0.49 |
| ETD1069 | 0.41 |
| ETD1070 | 0.21 |

### Example 22. Screening ANGPTL7 siRNAs for Activity in Human Cells in Culture

[1374] Chemically modified ANGPTL7 siRNAs cross reactive for human and non-human primate and derived from sequences in siRNA subset C were assayed for ANGPTL7 mRNA knockdown activity in cells in culture. ARPE-19 (ATCC® CRL-2302™) cells were seeded in 96-well tissue culture plates at a cell density of 7,500 cells per well in DMEM:F12 (ATCC Catalog No. 30-2006) supplemented with 10% fetal bovine serum and incubated overnight in a water-jacketed, humidified incubator at 37° C. in an atmosphere composed of air plus 5% carbon dioxide. The ANGPTL7 siRNAs were individually transfected into ARPE-19 cells in duplicate wells at 10 nM final concentration using 0.3 μL Lipofectamine RNAiMax (Fisher) per well. Silencer Select Negative Control #1 (ThermoFisher, Catalog #4390843) was transfected at 10 nM final concentration as a control. After incubation for 48 hours at 37° C., total RNA was harvested from each well and cDNA prepared using TaqMan® Fast Advanced Cells-to-CT™ Kit (ThermoFisher, Catalog #A35374) according to the manufacturer's instructions. The level of ANGPTL7 mRNA from each well was measured in triplicate by real-time qPCR on an Applied Biosystems 7500 Fast Real-Time PCR machine using TaqMan Gene Expression Assay for human ANGPTL7 (ThermoFisher, assay #Hs00221727_m1). The level of PPIA mRNA was measured using TaqMan Gene Expression Assay (ThermoFisher, assay #Hs99999904_m1) and used to determine relative ANGPTL7 mRNA levels in each well using the delta-delta Ct method. All data were normalized to relative ANGPTL7 mRNA levels in untreated ARPE-19 cells. Details of the siRNAs used in this experiment are included in Table 21. Results are shown in Table 22. The results indicate a surprising utility of these siRNAs for reducing expression of ANGPTL7 mRNA or protein, and further indicate their usefulness in treating a disease described herein, such as an eye disease.

TABLE 21
Sequences of some ANGPLT7-Specific siRNAs

| SIRNA | Modified Sense | Modified Antisense | |
|---|---|---|---|
| name | strand | strand | Notes |
| ETD01172 | asUfsaUfgUfaCfCfa | usAfsaCfaUfcCfuUf | SS all |
| | aggaUfgUfUfasusu | gguAfcAfuAfususu | purines |
| | (SEQ ID NO: 11545) | (SEQ ID NO: 11306) | OMe |
| ETD01173 | AfsusAfuGfuAfccAf | usAfsaCfaUfcCfuUfg | SS all |
| | AfGfGfAfuGfuuAfsu | guAfcAfuAfususu | pyrimidines |
| | su | (SEQ ID NO: 11306) | OMe |
| | (SEQ ID NO: 11546) | | |
| ETD01174 | AfsusAfuGfuAfcCfa | usAfsacauccuugGfu | AS all |
| | AfgGfaUfgUfuAfsus | AfcAfuAfususu | pyrimidines |
| | u | (SEQ ID NO: 11547) | OMe |
| | (SEQ ID NO: 11500) | | |
| ETD01175 | AfsusAfuGfuAfcCfa | usAfsAfcAfuccuugG | AS all |
| | AfgGfaUfgUfuAfsusu | fuAfcAfuAfususu | pyrimidines |
| | (SEQ ID NO: 11500) | (SEQ ID NO: 11548) | OMe |

TABLE 22
Knockdown Activity of ANGPLT7-Specific
siRNAs at 10 nM in Human ARPE-19 Cells

| | Relative |
|---|---|
| | ANGPTL7 |
| siRNA name | Expression |
| Untreated Cells | 1.00 |
| ETD01172 | 0.31 |
| ETD01173 | 0.57 |
| ETD01174 | 0.39 |
| ETD01175 | 0.28 |

### Example 23: Intravitreal Injection of siRNA Duplexes

[1375] For intravitreal injection in mice (4-7 week-old ICR's, Envigo), a 33-gauge needle with a glass microsyringe (10-μL volume; Hamilton Company) was used. The eye was proposed, and the needle was inserted through the equatorial sclera and inserted into the vitreous chamber at an angle of approximately 45 degrees, taking care to avoid touching the posterior part of the lens or the retina. 5 μg of siRNA duplex in 1 μL phosphate-buffered saline vehicle was injected into the vitreous. The siRNA duplexes injected are depicted in Table 23. In the table, “mANGPTL7” refers to mouse ANGPTL7.

TABLE 23
siRNA duplexes

| SIRNA | | | |
|---|---|---|---|
| Name | Target | Sense Strand (5′ to 3′) | Antisense Strand (5′ to 3′) |
| ETD01206 | mANGPTL7 | [ETL3]CfsasAfcCfaGfAfUfuGfaCfa | csAfsuGfaUfgUfcAfaucUfgGfuUf |
| | | UfcAfuGfsusu (SEQ ID NO: 11740) | gsusu (SEQ ID NO: 11752) |
| ETD01207 | mANGPTL7 | [ETL3]CfsaAfcCfaGfAfUfuGfaCfaU | csAfsuGfaUfgUfcAfaucUfgGfuUf |
| | | fcAfuGfsusu (SEQ ID NO: 11741) | gsusu (SEQ ID NO: 11752) |
| ETD01208 | mANGPTL7 | [ETL3]CfaAfcCfaGfAfUfuGfaCfaUf | csAfsuGfaUfgUfcAfaucUfgGfuUf |
| | | cAfuGfsusu (SEQ ID NO: 11742) | gsusu (SEQ ID NO: 11752) |
| ETD01588 | mANGPTL7 | [ETL3]CfaAfcCfaGfAfUfuGfaCfaUf | 5VPusAfsuGfaUfgUfcAfaucUfgG |
| | | cAfuGfsusu (SEQ ID NO: 11742) | fuUfgsusu (SEQ ID NO: 11753) |
| ETD01589 | mANGPTL7 | [ETL3]CfaAfcCfaGfAfUfuGfaCfaUf | usAfsuGfaUfgUfcAfaucUfgGfuUf |
| | | cAfuGfsusu (SEQ ID NO: 11742) | gsusu (SEQ ID NO: 11754) |
| ETD01716 | mANGPTL7 | [ETL3]CfaAfcCfaGfAfUfuGfaCfaUf | 5VPusAfsuGfaUfgUfcAfaucUfgG |
| | | cAfuAfsusu (SEQ ID NO: 11743) | fuUfgsusu (SEQ ID NO: 11753) |
| ETD01736 | mANGPTL7 | [ETL13]CfaAfcCfaGfAfUfuGfaCfaU | csAfsuGfaUfgUfcAfaucUfgGfuUf |
| | | fcAfuGfsusu (SEQ ID NO: 11744) | gsusu (SEQ ID NO: 11752) |
| ETD01778 | mANGPTL7 | [ETL13]CfaAfcCfaGfAfUfuGfaCfaU | 5VPusAfsuGfaUfgUfcAfaucUfgG |
| | | fcAfuAfsusu (SEQ ID NO: 11745) | fuUfgsusu (SEQ ID NO: 11753) |
| ETD01779 | mANGPTL7 | [ETL15]CfaAfcCfaGfAfUfuGfaCfaU | 5VPusAfsuGfaUfgUfcAfaucUfgG |
| | | fcAfuAfsusu (SEQ ID NO: 11746) | fuUfgsusu (SEQ ID NO: 11753) |
| ETD01786 | mANGPTL7 | [ETL13]CfaAfcCfaGfAfUfuGfaCfaU | usAfsuGfaUfgUfcAfaucUfgGfuUf |
| | | fcAfuAfsusu (SEQ ID NO: 11745) | gsusu (SEQ ID NO: 11754) |
| ETD01787 | mANGPTL7 | [ETL16]CfaAfcCfaGfAfUfuGfaCfaU | 5VPusAfsuGfaUfgUfcAfaucUfgG |
| | | fcAfuAfsusu (SEQ ID NO: 11747) | fuUfgsusu (SEQ ID NO: 11753) |
| ETD01313 | mANGPTL7 | [ETL7]CfsasAfcCfaGfAfUfuGfaCfa | csAfsuGfaUfgUfcAfaucUfgGfuUf |
| | | UfcAfuGfsusu (SEQ ID NO: 11748) | gsusu (SEQ ID NO: 11752) |
| ETD01503 | mANGPTL7 | [ETL8]CfsasAfcCfaGfAfUfuGfaCfa | csAfsuGfaUfgUfcAfaucUfgGfuUf |
| | | UfcAfuGfsusu (SEQ ID NO: 11749) | gsusu (SEQ ID NO: 11752) |
| ETD01504 | mANGPTL7 | [ETL9]CfsasAfcCfaGfAfUfuGfaCfa | csAfsuGfaUfgUfcAfaucUfgGfuUf |
| | | UfcAfuGfsusu (SEQ ID NO: 11750) | gsusu (SEQ ID NO: 11752) |
| ETD01505 | mANGPTL7 | [ETL10]CfsasAfcCfaGfAfUfuGfaCfa | csAfsuGfaUfgUfcAfaucUfgGfuUf |
| | | UfcAfuGfsusu (SEQ ID NO: 11751) | gsusu (SEQ ID NO: 11752) |

[1376] Mice were euthanized on day 14 post-injection. Both eyes from each animal were harvested and dissected along the equator, and the anterior and posterior hemispheres were placed in RNAlater. Total RNA was extracted from homogenized tissue and reverse transcribed to cDNA using a First-Strand III cDNA Synthesis kit. Normalized cDNA quantification was carried out by real-time TaqMan PCR using fluorescently labeled TaqMan probes/primers sets of selected genes (ANGPTL7, MYOC, COL1A1, COL5A1, VCAN, FN1, and PPIA). Reactions were carried out in 20 μL aliquots using TaqMan Universal PCR Master Mix No AmpErase UNG ran on an ABI Prism 7500 Fast Real-Time PCR System Sequence Detection System and analyzed by the 7500 System software. Relative Quantification (RQ) values between treated and untreated samples are calculated by the formula 2−ΔΔCT, where CT is the cycle at threshold (automatic measurement), ΔCT is CT of the assayed gene minus CT of the endogenous control (PPIA), and ΔΔCT is the ΔCT of the normalized assayed gene in the treated sample minus the ΔCT of the same gene in the untreated one (calibrator).

[1377] Results are depicted in Table 24. ETD1208 was more efficacious than ETD1207, which was more efficacious than EDT 1206. This demonstrates that less (or no) phosphorothioates at the 5′ end of sense strand was more efficacious than having 2 phosphorothioates at the end where the hydrophobic groups are attached.

[1378] ETD1588 was more active than ETD1589, which means that some sequences showed greater activity with 5′ vinyl phosphonates on the antisense strand than without 5′ vinyl phosphonates on the antisense strand.

[1379] The ETD1716-ETD1787 series enables different hydrophobic groups with 12-25 carbons. All conjugated with phosphorothioates at 5′ end of sense strand.

TABLE 24
mRNA expression levels

| | Average |
|---|---|
| | mRNA |
| | relative to |
| | no treatment |
| | control |
| siRNA | animals |
| ETD01206 | 0.26 |
| ETD01207 | 0.20 |
| ETD01208 | 0.14 |
| ETD01588 | 0.43 |
| ETD01589 | 0.89 |
| ETD01716 | 0.44 |
| ETD01736 | 0.09 |
| ETD01778 | 0.34 |
| ETD01779 | 0.40 |
| ETD01786 | 0.29 |
| ETD01787 | 0.23 |

### Example 24: Intravitreal Injection with mRNA and siRNA Quantitation

[1380] Intravitreal injections were performed as above with 20 g siRNA in 1 μL. 14 days postinjection, the eyes were harvested and mRNA was quantified as shown in the previous example. siRNA was quantified using a stem loop assay according to published procedure (Cheng A, Li M, Liang Y, Wang Y, Wong L, Chen C, Vlassov A V, Magdaleno S 2009. Stem-loop RT-PCR quantification of siRNAs in vitro and in vivo. Oligonucleotides 19: 203-208).

[1381] Results are depicted in Table 25. There was a correlation between the size of the hydrophobic group, the percent knockdown and the levels of siRNA observed in the tissue. In general, hydrophobic groups with more carbons resulted in an increased percent knockdown and in more siRNA observed in the tissue.

TABLE 25
mRNA quantification

| | % KD relative to | | g siRNA/mg | |
|---|---|---|---|---|
| | untreated animals | | of tissue | |
| siRNA Duplex | Anterior | Posterior | Anterior | Posterior |
| ETD01208 (stearyl) | 85 | 90 | 0.031 | 0.005 |
| ETD01313 (t-butyl) | 70 | 80 | 0.006 | 0.005 |
| ETD01503 (n-butyl) | 50 | 0 | 0.012 | 0.024 |
| ETD01504 (octyl) | 67 | 33 | 0.09 | 0.027 |
| ETD01505 (dodecyl) | 70 | 50 | 0.059 | 0.073 |

### Example 25: Brief Description of an ANGPTL7-Targeting siRNA

[1382] An example siRNA is described as follows:
[1383] 21 mer:
   [1384] a. 19 base pairs
   [1385] b. 2 nt overhangs
[1386] antisense strand:
   [1387] a. vinyl phosphonate (VP) at 5′ end
   [1388] b. 2 phosphorothioate bonds (PS) at each end
[1389] sense strand:
   [1390] a. hydrophobic group (C16-C18) at 5′ end
   [1391] b. optional 0-2 PS at 5′ end
   [1392] c. 2 PS at 3′ end
[1393] modification pattern of 2′ fluoro and 2′ methyl groups.

### Example 26: Screening ANGPTL7 siRNAs for Activity in Human Cells in Culture

[1394] Chemically modified ANGPTL7 siRNAs cross reactive for human and non-human primate were assayed for ANGPTL7 mRNA knockdown activity in cells in culture. ARPE-19 (ATCC® CRL-2302™) cells were seeded in 96-well tissue culture plates at a cell density of 7,500 cells per well in DMEM:F12 (ATCC Catalog No. 30-2006) supplemented with 10% fetal bovine serum and incubated overnight in a water-jacketed, humidified incubator at 37° C. in an atmosphere composed of air plus 5% carbon dioxide. The ANGPTL7 siRNAs were individually transfected into ARPE-19 cells in duplicate wells at 10 nM final and 1 nM concentrations using 0.3 μL Lipofectamine RNAiMax (Fisher) per well. Silencer Select Negative Control #1 (ThermoFisher, Catalog #4390843) and Silencer Select-human ANGPTL7-2 1 (ThermoFisher, Catalog #4392420) were transfected as negative and positive controls, respectively. After incubation for 48 hours at 37° C., total RNA was harvested from each well and cDNA prepared using TaqMan® Fast Advanced Cells-to-CT™ Kit (ThermoFisher, Catalog #A35374) according to the manufacturer's instructions. The level of ANGPTL7 mRNA from each well was measured in triplicate by real-time qPCR using an Applied Biosystems QuantStudio 6 Pro instrument using TaqMan Gene Expression Assay for human ANGPTL7 (ThermoFisher, assay #Hs00221727_m1). The level of PPIA mRNA was measured using TaqMan Gene Expression Assay (ThermoFisher, assay #Hs99999904_m1) and used to determine relative ANGPTL7 mRNA levels in each well using the delta-delta Ct method. All data were normalized to relative ANGPTL7 mRNA levels in untreated ARPE-19 cells. Results are shown in Table 27. The siRNA sequences that were tested in Table 27 are included in Table 26A. Unmodified base sequences of the siRNAs Table 26A are shown in Table 26B without 2′ UU overhangs. A selection of siRNAs are shown in Table 26C with SEQ ID NO. Table 26D includes SEQ ID NOs of unmodified base sequences of the siRNA of Table 26C without UU overhangs. In these tables: SS=sense strand, AS =antisense strand, 5VP=5′ vinyl phosphonate, Nf (e.g. Af, Cf, Gf, Tf, or Uf)=2′-fluoro-modified nucleoside, n (e.g. a, c, g, t, or u)=2′-O-methyl modified nucleoside, s=phosphorothioate linkage. In these tables [ETL1], [ETL3], or [ETL12]shown at the left side of the sequence indicates a 5′ conjugated lipid moiety as in Table 1.

TABLE 26A
Example siRNA Sequences

| SIRNA | SEQ ID | Synthesized Sense Sequence | SEQ ID | Synthesized AS Sequence |
|---|---|---|---|---|
| Name | NO: | 5′ → 3′ | NO: | 5′ → 3′ |
| ETD00276 | 11549 | GfsgsCfuCfuGfCfAfuUfuUfcAfuCf | 11596 | usCfsgAfuGfaAfaAfugcAfgAfgCf |
| | | gAfsusu | | csusu |
| ETD00299 | 11550 | CfsasUfcUfcUfGfGfaGfuGfuAfuAf | 11597 | usUfsuAfuAfcAfcUfccaGfaGfaUf |
| | | aAfsusu | | gsusu |
| ETD00300 | 11551 | AfsusCfuCfuGfGfAfgUfgUfaUfaAf | 11598 | usCfsuUfaUfaCfaCfuccAfgAfgAf |
| | | gAfsusu | | ususu |
| ETD00303 | 11552 | CfsasUfcAfuCfCfAfgAfgAfcGfaAfa | 11599 | usUfsuUfcGfuCfuCfuggAfuGfaUf |
| | | Afsusu | | gsusu |
| ETD00304 | 11553 | AfsusCfaUfcCfAfGfaGfaCfgAfaAfa | 11600 | usUfsuUfuCfgUfcUfcugGfaUfgAf |
| | | Afsusu | | ususu |
| ETD00305 | 11554 | UfscsAfuCfcAfGfAfgAfcGfaAfaAfa | 11601 | usUfsuUfuUfcGfuCfucuGfgAfuGf |
| | | Afsusu | | asusu |
| ETD00348 | 11555 | CfsusCfaAfuGfGfAfgUfgUfaCfuAf | 11602 | usGfsuAfgUfaCfaCfuccAfuUfgAf |
| | | cAfsusu | | gsusu |
| ETD00356 | 11556 | AfsusAfuGfuAfCfCfaAfgGfaUfgUf | 11603 | usAfsaCfaUfcCfuUfgguAfcAfuAf |
| | | uAfsusu | | ususu |
| ETD00375 | 11557 | AfsasUfuAfuCfUfUfgAfgUfcUfaCf | 11604 | usUfsgUfaGfaCfuCfaagAfuAfaUf |
| | | aAfsusu | | ususu |
| ETD00377 | 11558 | AfscsAfcAfaAfAfAfuUfgUfuCfgGf | 11605 | usGfscCfgAfaCfaAfuuuUfuGfuGf |
| | | cAfsusu | | ususu |
| ETD00378 | 11559 | CfsasCfaAfaAfAfUfuGfuUfcGfgCfu | 11606 | usAfsgCfcGfaAfcAfauuUfuUfgUf |
| | | Afsusu | | gsusu |
| ETD00381 | 11560 | GfsasAfgGfuAfGfAfuGfgUfgUfuAf | 11607 | usAfsuAfaCfaCfcAfucuAfcCfuUfc |
| | | uAfsusu | | susu |
| ETD00382 | 11561 | GfsusAfgAfuGfGfUfgUfuAfuAfgUf | 11608 | usAfsaCfuAfuAfaCfaccAfuCfuAfc |
| | | uAfsusu | | susu |
| ETD01626 | 11562 | ggcucuGfcAfuuuucaucgasusu | 11609 | uscsgAfuGfaAfaAfuGfcAfgAfgCf |
| | | | | csusu |
| ETD01627 | 11563 | uuucaUfCfgUfggccuuuguasusu | 11610 | usascAfaAfgGfcCfaCfgAfuGfaAfa |
| | | | | susu |
| ETD01628 | 11564 | caucucuGfGfAfGfuguauaaasusu | 11611 | ususuAfuAfcAfcUfcCfaGfaGfaUf |
| | | | | gsusu |
| ETD01629 | 11565 | aucucuGfGfAfGfuguauaagasusu | 11612 | uscsuUfaUfaCfaCfuCfcAfgAfgAf |
| | | | | ususu |
| ETD01630 | 11566 | auaagCfUfUfCfcUfccugaugasusu | 11613 | uscsaUfcAfgGfaGfgAfaGfcUfuAf |
| | | | | ususu |
| ETD01631 | 11567 | caucAfuccAfgAfgacgaaaasusu | 11614 | ususuUfcGfuCfuCfuGfgAfuGfaUf |
| | | | | gsusu |
| ETD01632 | 11568 | aucauccAfGfaGfacgaaaaasusu | 11615 | ususuUfuCfgUfcUfcUfgGfaUfgAf |
| | | | | ususu |
| ETD01633 | 11569 | ucauccAfGfAfGfAfcgaaaaaasusu | 11616 | ususuUfuUfcGfuCfuCfuGfgAfuGf |
| | | | | asusu |
| ETD01634 | 11570 | ccaguAfucAfuAfacaacacasusu | 11617 | usgsuGfuUfgUfuAfuGfaUfaCfuGf |
| | | | | gsusu |
| ETD01635 | 11571 | cucaAfuGfGfAfGfuguacuacasusu | 11618 | usgsuAfgUfaCfaCfuCfcAfuUfgAf |
| | | | | gsusu |
| ETD01636 | 11572 | augaUfUfugUfcUfgugaaagasusu | 11619 | uscsuUfuCfaCfaGfaCfaAfaUfcAfu |
| | | | | susu |
| ETD01637 | 11573 | acaaaUfCfCfCfuUfugcuaaaasusu | 11620 | ususuUfaGfcAfaAfgGfgAfuUfuGf |
| | | | | ususu |
| ETD01638 | 11574 | aauuaUfCfUfUfgagucuacaasusu | 11621 | ususgUfaGfaCfuCfaAfgAfuAfaUf |
| | | | | ususu |
| ETD01639 | 11575 | acacAfAfAfAfAfuuguucggcasusu | 11622 | usgscCfgAfaCfaAfuUfuUfuGfuGf |
| | | | | ususu |
| ETD01640 | 11576 | cacaaaaaUfUfguucggcuasusu | 11623 | usasgCfcGfaAfcAfaUfuUfuUfgUf |
| | | | | gsusu |
| ETD01641 | 11577 | ugccuuAfAfAfAfuauucauaasusu | 11624 | ususaUfgAfaUfaUfuUfuAfaGfgCf |
| | | | | asusu |
| ETD01642 | 11578 | ugaaAfAfcuGfaAfgguagauasusu | 11625 | usasuCfuAfcCfuUfcAfgUfuUfuCf |
| | | | | asusu |
| ETD01643 | 11579 | gaagGfuAfgAfuGfguguuauasusu | 11626 | usasuAfaCfaCfcAfuCfuAfcCfuUfc |
| | | | | susu |
| ETD01644 | 11580 | guagaUfggUfgUfuauaguuasusu | 11627 | usasaCfuAfuAfaCfaCfcAfuCfuAfc |
| | | | | susu |
| ETD01645 | 11581 | uagauGfGfuGfuuauaguuaasusu | 11628 | ususaAfcUfaUfaAfcAfcCfaUfcUfa |
| | | | | susu |
| ETD01646 | 11582 | agauggUfgUfUfauaguuaaasusu | 11629 | ususuAfaCfuAfuAfaCfaCfcAfuCf |
| | | | | ususu |
| ETD01660 | 11583 | [ETL3]aUfaUfgUfaCfCfaaggaUfgUf | 11630 | 5VPusAfsaCfaUfcCfuUfgguAfcAf |
| | | Ufasusu | | uAfususu |
| ETD01737 | 11584 | [ETL1]sauaagCfUfUfCfcUfccugaug | 11631 | 5VPusCfsaUfcAfgGfaGfgAfaGfc |
| | | asusu | | UfuAfususu |
| ETD01738 | 11585 | [ETL1]saugaUfUfugUfcUfgugaaaga | 11632 | 5VPusCfsuUfuCfaCfaGfaCfaAfaU |
| | | susu | | fcAfususu |
| ETD01739 | 11586 | [ETL1]saauuaUfCfUfUfgagucuacaas | 11633 | 5VPusUfsgUfaGfaCfuCfaAfgAfu |
| | | usu | | AfaUfususu |
| ETD01740 | 11587 | [ETL1]sacacAfAfAfAfAfuuguucggc | 11634 | 5VPusGfscCfgAfaCfaAfuUfuUfu |
| | | asusu | | GfuGfususu |
| ETD01741 | 11588 | [ETL1]scacaaaaaUfUfguucggcuasus | 11635 | 5VPusAfsgCfcGfaAfcAfaUfuUfu |
| | | u | | UfgUfgsusu |
| ETD01742 | 11589 | [ETL1]sugaaAfAfcuGfaAfgguagaua | 11636 | 5VPusAfsuCfuAfcCfuUfcAfgUfu |
| | | susu | | UfuCfasusu |
| ETD01743 | 11590 | [ETL1]sguagaUfggUfgUfuauaguuas | 11637 | 5VPusAfsaCfuAfuAfaCfaCfcAfuC |
| | | usu | | fuAfcsusu |
| ETD01744 | 11591 | [ETL1]sagauggUfgUfUfauaguuaaas | 11638 | 5VPusUfsuAfaCfuAfuAfaCfaCfc |
| | | usu | | AfuCfususu |
| ETD01767 | 11592 | [ETL1]saUfaUfgUfaCfCfaaggaUfgU | 11639 | SVPasAfsaCfaUfcCfuUfgguAfcAf |
| | | fUfasusu | | uAfususu |
| ETD01777 | 11593 | [ETL3]aauuaUfCfUfUfgagucuacaas | 11640 | 5VPusUfsgUfaGfaCfuCfaAfgAfu |
| | | usu | | AfaUfususu |
| ETD01824 | 11594 | [ETL12]aauuaUfCfUfUfgagucuacaa | 11641 | 5VPusUfsgUfaGfaCfuCfaAfgAfu |
| | | susu | | AfaUfususu (same as SEQ ID NO: |
| | | | | 11640) |
| ETD01825 | 11595 | [ETL3]acacAfAfAfAfAfuuguucggca | 11642 | 5VPusGfscCfgAfaCfaAfuUfuUfu |
| | | susu | | GfuGfususu |
| ETD02261 | 11593 | [ETL3]aauuaUfCfUfUfgagucuacaas | 11803 | 5VPusUfsguagAfcuCfaAfgAfuAfa |
| | | usu | | Ufususu |

TABLE 26B
Example siRNA Base Sequences

| | SEQ | Base Sense Strand | | Base Antisense |
|---|---|---|---|---|
| | ID | Sequences | SEQ | Strand Sequences |
| SIRNA | NO | (5′ to 3′) | ID NO | (5′ to 3′) |
| ETD00276 | 11755 | GGCUCUGCAUUUUCAUCGA | 11768 | UCGAUGAAAAUGCAGAGCC |
| ETD00299 | 11756 | CAUCUCUGGAGUGUAUAAA | 11769 | UUUAUACACUCCAGAGAUG |
| ETD00300 | 11757 | AUCUCUGGAGUGUAUAAGA | 11770 | UCUUAUACACUCCAGAGAU |
| ETD00303 | 11758 | CAUCAUCCAGAGACGAAAA | 11771 | UUUUCGUCUCUGGAUGAUG |
| ETD00304 | 11759 | AUCAUCCAGAGACGAAAAA | 11772 | UUUUUCGUCUCUGGAUGAU |
| ETD00305 | 11760 | UCAUCCAGAGACGAAAAAA | 11773 | UUUUUUCGUCUCUGGAUGA |
| ETD00348 | 11761 | CUCAAUGGAGUGUACUACA | 11774 | UGUAGUACACUCCAUUGAG |
| ETD00356 | 11762 | AUAUGUACCAAGGAUGUUA | 11775 | UAACAUCCUUGGUACAUAU |
| ETD00375 | 11763 | AAUUAUCUUGAGUCUACAA | 11776 | UUGUAGACUCAAGAUAAUU |
| ETD00377 | 11764 | ACACAAAAAUUGUUCGGCA | 11777 | UGCCGAACAAUUUUUGUGU |
| ETD00378 | 11765 | CACAAAAAUUGUUCGGCUA | 11778 | UAGCCGAACAAUUUUUGUG |
| ETD00381 | 11766 | GAAGGUAGAUGGUGUUAUA | 11779 | UAUAACACCAUCUACCUUC |
| ETD00382 | 11767 | GUAGAUGGUGUUAUAGUUA | 11780 | UAACUAUAACACCAUCUAC |
| ETD01626 | 11643 | GGCUCUGCAUUUUCAUCGU | 11677 | ACGAUGAAAAUGCAGAGCC |
| ETD01627 | 11644 | UUUCAUCGUGGCCUUUGUC | 11678 | GACAAAGGCCACGAUGAAA |
| ETD01628 | 11645 | CAUCUCUGGAGUGUAUAAG | 11679 | CUUAUACACUCCAGAGAUG |
| ETD01629 | 11646 | AUCUCUGGAGUGUAUAAGC | 11680 | GCUUAUACACUCCAGAGAU |
| ETD01630 | 11647 | AUAAGCUUCCUCCUGAUGA | 11681 | UCAUCAGGAGGAAGCUUAU |
| ETD01631 | 11648 | CAUCAUCCAGAGACGAAAA | 11682 | UUUUCGUCUCUGGAUGAUG |
| ETD01632 | 11649 | AUCAUCCAGAGACGAAAAA | 11683 | UUUUUCGUCUCUGGAUGAU |
| ETD01633 | 11650 | UCAUCCAGAGACGAAAAAG | 11684 | CUUUUUCGUCUCUGGAUGA |
| ETD01634 | 11651 | CCAGUAUCAUAACAACACA | 11685 | UGUGUUGUUAUGAUACUGG |
| ETD01635 | 11652 | CUCAAUGGAGUGUACUACC | 11686 | GGUAGUACACUCCAUUGAG |
| ETD01636 | 11653 | AUGAUUUGUCUGUGAAAGA | 11687 | UCUUUCACAGACAAAUCAU |
| ETD01637 | 11654 | ACAAAUCCCUUUGCUAAAA | 11688 | UUUUAGCAAAGGGAUUUGU |
| ETD01638 | 11655 | AAUUAUCUUGAGUCUACAC | 11689 | GUGUAGACUCAAGAUAAUU |
| ETD01639 | 11656 | ACACAAAAAUUGUUCGGCU | 11690 | AGCCGAACAAUUUUUGUGU |
| ETD01640 | 11657 | CACAAAAAUUGUUCGGCUG | 11691 | CAGCCGAACAAUUUUUGUG |
| ETD01641 | 11658 | UGCCUUAAAAUAUUCAUAG | 11692 | CUAUGAAUAUUUUAAGGCA |
| ETD01642 | 11659 | UGAAAACUGAAGGUAGAUG | 11693 | CAUCUACCUUCAGUUUUCA |
| ETD01643 | 11660 | GAAGGUAGAUGGUGUUAUA | 11694 | UAUAACACCAUCUACCUUC |
| ETD01644 | 11661 | GUAGAUGGUGUUAUAGUUA | 11695 | UAACUAUAACACCAUCUAC |
| ETD01645 | 11662 | UAGAUGGUGUUAUAGUUAA | 11696 | UUAACUAUAACACCAUCUA |
| ETD01646 | 11663 | AGAUGGUGUUAUAGUUAAU | 11697 | AUUAACUAUAACACCAUCU |
| ETD01660 | 11664 | AUAUGUACCAAGGAUGUUA | 11698 | UAACAUCCUUGGUACAUAU |
| ETD01737 | 11665 | AUAAGCUUCCUCCUGAUGA | 11699 | UCAUCAGGAGGAAGCUUAU |
| ETD01738 | 11666 | AUGAUUUGUCUGUGAAAGA | 11700 | UCUUUCACAGACAAAUCAU |
| ETD01739 | 11667 | AAUUAUCUUGAGUCUACAA | 11701 | UUGUAGACUCAAGAUAAUU |
| ETD01740 | 11668 | ACACAAAAAUUGUUCGGCA | 11702 | UGCCGAACAAUUUUUGUGU |
| ETD01741 | 11669 | CACAAAAAUUGUUCGGCUA | 11703 | UAGCCGAACAAUUUUUGUG |
| ETD01742 | 11670 | UGAAAACUGAAGGUAGAUA | 11704 | UAUCUACCUUCAGUUUUCA |
| ETD01743 | 11671 | GUAGAUGGUGUUAUAGUUA | 11705 | UAACUAUAACACCAUCUAC |
| ETD01744 | 11672 | AGAUGGUGUUAUAGUUAAA | 11706 | UUUAACUAUAACACCAUCU |
| ETD01767 | 11673 | AUAUGUACCAAGGAUGUUA | 11707 | UAACAUCCUUGGUACAUAU |
| ETD01777 | 11674 | AAUUAUCUUGAGUCUACAA | 11708 | UUGUAGACUCAAGAUAAUU |
| ETD01824 | 11675 | AAUUAUCUUGAGUCUACAA | 11709 | UUGUAGACUCAAGAUAAUU |
| | | | | (same as SEQ ID |
| | | | | NO: 11708) |
| ETD01825 | 11676 | ACACAAAAAUUGUUCGGCA | 11710 | UGCCGAACAAUUUUUGUGU |
| ETD02261 | 11674 | AAUUAUCUUGAGUCUACAA | 11708 | UUGUAGACUCAAGAUAAUU |

TABLE 26C
Example siRNAs

| siRNA | | |
|---|---|---|
| Name | SS | AS |
| ETD01660 | 11583 | 11630 |
| ETD01777 | 11593 | 11640 |
| ETD01824 | 11594 | 11640 |
| ETD01825 | 11595 | 11642 |

TABLE 26D
Example siRNAs

| SIRNA | SS base | AS base |
|---|---|---|
| Name | sequence | sequence |
| ETD01660 | 11664 or 1424 | 11698 or 3630 |
| ETD01777 | 11674 or 1765 | 11708 or 3971 |
| ETD01824 | 11675 or 1765 | 11708 or 3971 |
| ETD01825 | 11676 or 1796 | 11710 or 4002 |

TABLE 27
Knockdown Activity of ANGPLT7-Specific siRNAs at
1 nM ad 10 nM in Human ARPE-19 Cells

| | Relative ANGPTL7 mRNA Level | |
|---|---|---|
| siRNA | 1 nM siRNA | 10 nM siRNA |
| Untreated Cells | 1.00 | 1.00 |
| Negative Control | 1.05 | 1.48 |
| siRNA | | |
| Positive Control | 0.05 | 0.02 |
| siRNA | | |
| ETD00356 | 0.06 | 0.02 |
| ETD01626 | 1.42 | 1.72 |
| ETD01627 | 1.12 | 1.08 |
| ETD01628 | 1.64 | 1.46 |
| ETD01629 | 1.48 | 1.05 |
| ETD01630 | 0.84 | 0.43 |
| ETD01631 | 1.39 | 0.93 |
| ETD01632 | 1.21 | 0.73 |
| ETD01633 | 2.30 | 1.38 |
| ETD01634 | 0.97 | 0.69 |
| ETD01635 | 2.23 | 1.97 |
| ETD01636 | 0.31 | 0.26 |
| ETD01637 | 1.49 | 0.95 |
| ETD01638 | 0.10 | 0.07 |
| ETD01639 | 0.14 | 0.07 |
| ETD01640 | 0.17 | 0.06 |
| ETD01641 | 1.12 | 0.77 |
| ETD01642 | 0.18 | 0.11 |
| ETD01643 | 2.30 | 2.01 |
| ETD01644 | 0.85 | 0.49 |
| ETD01645 | 1.55 | 0.91 |
| ETD01646 | 0.56 | 0.31 |

### Example 26: Determining the IC50 of ANGPTL7 siRNAs in Human ARPE-19 Cells

[1395] The IC50 values for knockdown of ANGPTL7 mRNA by select ANGPTL7 siRNAs were determined in ARPE-19 cells. The ETD001630, ETD001636, ETD01638, ETD01639, ETD01640, ETD01642, ETD01644 and ETD01646 siRNAs were assayed individually at 30 nM, 10 nM, 3 nM, 1 nM, 0.3 nM, 0.1 nM and 0.03 nM. The ARPE-19 (ATCC® CRL-2302™) cells were seeded in 96-well tissue culture plates at a cell density of 7,500 cells per well in DMEM supplemented with 10% fetal bovine serum and incubated overnight in a water-jacketed, humidified incubator at 37° C. in an atmosphere composed of air plus 5% carbon dioxide. The ANGPTL7 siRNAs were individually transfected into ARPE-19 cells in triplicate wells using 0.3 μL Lipofectamine RNAiMax (Fisher) per well. Silencer Select Negative Control #1 (ThermoFisher, Catalog #4390843) was transfected at 10 nM, 1 nM and 0.1 nM final concentration as a control. After incubation for 48 hours at 37° C., total RNA was harvested from each well and cDNA prepared using TaqMan® Fast Advanced Cells-to-CT™ Kit (ThermoFisher, Catalog #A35374) according to the manufacturer's instructions. The level of ANGPTL7 mRNA from each well was measured in triplicate by real-time qPCR using an Applied Biosystems QuantStudio 6 Pro Real-Time PCR instrument using TaqMan Gene Expression Assay for human ANGPTL7 (ThermoFisher, assay #Hs00221727_m1). The level of PPIA mRNA was measured using TaqMan Gene Expression Assay (ThermoFisher, assay #Hs99999904_m1) and used to determine relative ANGPTL7 mRNA levels in each well using the delta-delta Ct method. All data were normalized to relative ANGPTL7 mRNA levels in untreated ARPE-19 cells. Curve fit was accomplish using the [inhibitor]vs. response (three parameters)

function in GraphPad Prism software. Results are shown in Table 28.

TABLE 28
IC50 Values of ANGPTL7 siRNAs in
Human ARPE-19 Cells

| | | Relative | |
|---|---|---|---|
| | | ANGPTL7 | |
| | | mRNA | |
| siRNA | [siRNA] | Levels | IC50 |
| Untreated Cells | — | 1.000 | ND |
| Negative Control | 10 nM | 0.70 | ND |
| siRNA | 1 nM | 1.03 | |
| | 0.1 | 0.80 | |
| ETD01630 | 30 nM | 0.91 | ND |
| | 10 nM | 0.97 | |
| | 3 nM | 0.88 | |
| | 1 nM | 1.04 | |
| | 0.3 nM | 1.21 | |
| | 0.1 nM | 1.18 | |
| | 0.03 nM | 0.84 | |
| ETD01636 | 30 nM | 0.39 | 1.5 |
| | 10 nM | 0.51 | |
| | 3 nM | 0.65 | |
| | 1 nM | 0.96 | |
| | 0.3 nM | 1.40 | |
| | 0.1 nM | 1.72 | |
| | 0.03 nM | 1.18 | |
| ETD01638 | 30 nM | 0.08 | <0.1 |
| | 10 nM | 0.08 | |
| | 3 nM | 0.06 | |
| | 1 nM | 0.07 | |
| | 0.3 nM | 0.08 | |
| | 0.1 nM | 0.07 | |
| | 0.03 nM | 0.18 | |
| ETD01639 | 30 nM | 0.24 | 0.2 |
| | 10 nM | 0.23 | |
| | 3 nM | 0.24 | |
| | 1 nM | 0.36 | |
| | 0.3 nM | 0.55 | |
| | 0.1 nM | 0.91 | |
| | 0.03 nM | 1.01 | |
| ETD01640 | 30 nM | 1.68 | 4.6 |
| | 10 nM | 1.56 | |
| | 3 nM | 1.84 | |
| | 1 nM | 2.19 | |
| | 0.3 nM | 2.08 | |
| | 0.1 nM | 2.46 | |
| | 0.03 nM | 1.69 | |
| ETD01642 | 30 nM | 1.95 | ND |
| | 10 nM | 2.40 | |
| | 3 nM | 2.19 | |
| | 1 nM | 2.46 | |
| | 0.3 nM | 1.97 | |
| | 0.1 nM | 2.74 | |
| | 0.03 nM | 2.37 | |
| ETD01644 | 30 nM | 1.12 | 3.9 |
| | 10 nM | 1.53 | |
| | 3 nM | 1.67 | |
| | 1 nM | 2.21 | |
| | 0.3 nM | 2.48 | |
| | 0.1 nM | 2.60 | |
| | 0.03 nM | 2.19 | |
| ETD01646 | 30 nM | 0.26 | 0.2 |
| | 10 nM | 0.26 | |
| | 3 nM | 0.22 | |
| | 1 nM | 0.22 | |
| | 0.3 nM | 0.34 | |
| | 0.1 nM | 0.51 | |
| | 0.03 nM | 0.42 | |

### Example 27. Screening Human ANGPTL7 siRNAs in Mice

[1396] A subset of the siRNAs identified from the above in vitro studies were tested for activity in mice expressing human ANGPTL7. The siRNAs in this study were derivatives of the siRNAs ETD00356, ETD01636, ETD01638, ETD01639, ETD01646 that were modified to contain a GalNAc ligand followed by a phosphorothioate linkage at the 5′ end of the sense strand with a vinyl phosphonate at to the 5′ end of the antisense strand. The siRNA derivates are ETD01767, ETD01738, ETD01739, ETD01740, ETD01744, respectively.

[1397] On Day −14, six to eight week old female mice (C57Bl/6) were administered a recombinant adeno-associated virus 8 (AAV8) vector (1.9×10E11 genome copies) by retroorbital injection. The recombinant AAV8 contained the open reading frame and 5′UTR and 3′UTR of the human ANGPTL7 sequence (NM_021146.4) under the control of the human thyroxine binding globulin promoter in an AAV2 backbone packaged in AAV8 capsid (AAV8-TBG-h-ANGPTL7 (FL)). On Day 0, groups of four mice were given a subcutaneous injection of a single 60 ug dose of ETD01767, ETD01738, ETD01739, ETD01740, ETD01744 or a PBS control.

[1398] Serum ANGPTL7 levels were measured in a 384-well plate using a custom AlphaLISA kit (PerkinElmer) containing biotinylated anti-human ANGPTL7 antibody, streptavidin Donor beads and anti-human ANGPTL7 Acceptor Beads. Signal was measured using an EnVision instrument (PerkinElmer). Serum ANGPTL7 protein levels were measured on Day 0, 4 and 11 and normalized to each individual Day 0 level. The results are shown in Table 29. Mice receiving PBS showed an increase in serum ANGPLT7 levels over the course of the study whereas mice receiving any of the siRNAs showed reduced levels of serum ANGPTL7 protein. Reductions in the mice receiving siRNAs ranged from 12% in mice treated with ETD01767 to 95% in mice treated with ETD01739 on Day 11 relative to Day 0.

[1399] Mice were sacrificed on Day 11 and a liver sample from each was collected and placed in RNAlater (ThermoFisher Cat #AM7020). Total liver RNA was prepared by homogenizing the liver tissue in homogenization buffer (Maxwell RSC simplyRNA Tissue Kit) using a Percellys 24 tissue homogenizer (Bertin Instruments) set at 5000 rpm for two 10 second cycles. Total RNA from the lysate was purified on a Maxwell RSC 48 platform (Promega Corporation) according to the manufacturer's recommendations. Preparation of cDNA was performed using Quanta qScript cDNA SuperMix (VWR, Cat #95048-500) according to the manufacturer's instructions. The levels of liver ANGPTL7 mRNA were assessed by RT-qPCR using TaqMan assays for human ANGPTL7 (ThermoFisher, assay #Hs00221727_m1) and the mouse housekeeping gene PPIA (ThermoFisher, assay #Mm02342430_g1) and PerfeCTa® qPCR FastMix®, Low ROX™ (VWR, Cat #101419-222). Data were normalized to the level in animals receiving PBS. Results are shown in Table 30. Mice receiving any of the siRNAs showed a decrease in human ANGPLT7 mRNA relative to mice receiving PBS on Day 11.

TABLE 29
Relative Mean Serum Human ANGPTL7 Levels
in AAV8-TBG-h-ANGPTL7 (FL) Mice

| | | | | Mean serum hANGPTL7 protein | | |
|---|---|---|---|---|---|---|
| | | | Dose | (Relative to Day 0) | | |
| Group | n | Treatment | (ug) | Day 0 | Day 4 | Day 11 |
| 1 | 4 | PBS | | 1.00 | 1.31 | 1.51 |
| 2 | 4 | ETD01767 | 60 | 1.00 | 0.79 | 0.88 |
| 3 | 4 | ETD01738 | 60 | 1.00 | 0.25 | 0.36 |
| 4 | 4 | ETD01739 | 60 | 1.00 | 0.11 | 0.05 |
| 5 | 4 | ETD01740 | 60 | 1.00 | 0.35 | 0.24 |
| 6 | 4 | ETD01744 | 60 | 1.00 | 0.50 | 0.56 |

TABLE 30
Relative Human ANGPTL7 mRNA Levels in
Livers of AAV8-TBG-h-ANGPTL7 (FL) Mice

| | | | | Mean |
|---|---|---|---|---|
| | | | | hANGPTL7 |
| | | | | mRNA |
| | | | Dose | (Relative to |
| Group | n | Treatment | (ug) | Group 1, Day 11) |
| 1 | 4 | PBS | | 1.00 |
| 2 | 4 | ETD01767 | 60 | 0.47 |
| 3 | 4 | ETD01738 | 60 | 0.29 |
| 4 | 4 | ETD01739 | 60 | 0.18 |
| 5 | 4 | ETD01740 | 60 | 0.08 |
| 6 | 4 | ETD01744 | 60 | 0.17 |

### Example 28: GalNAc Ligands for Hepatocyte Targeting of Oligonucleotides

[1400] Without limiting the disclosure to these individual methods, there are at least two general methods for attachment of multivalent N-acetylgalactosamine (GalNAc) ligands to oligonucleotides: solid or solution-phase conjugations. GalNAc ligands may be attached to solid phase resin for 3′ conjugation or at the 5′ terminus using GalNAc phosphoramidite reagents. GalNAc phosphoramidites may be coupled on solid phase as for other nucleosides in the oligonucleotide sequence at any position in the sequence. Reagents for GalNAc conjugation to oligonucleotides are shown in Table 31 and Table 32.

TABLE 31
GalNAc Conjugation Reagents

| Type of | |
|---|---|
| conjugation | Structure |
| Solid phase 3′ attachment where squiggly line is rest of oligonucleotide chain and right-most OH is where attachment' to solid phase is. | [chemical structure] This GalNAc ligand may be referred to as “GalNAc23” or “GalNAc#23.” |
| Solid phase 5′ attachment phosphoramidite | [chemical structure] |
| Solid phase 5′ attachment Phosphoramidite | [chemical structure] |
| Solution phase Carboxylic acid for amide coupling anywhere on oligonucleotide | [chemical structure] Where Ac is an acetyl group or other hydroxyl protecting group that can be removed under basic, acid or reducing conditions. |

[1401] In solution phase conjugation, the oligonucleotide sequence—including a reactive conjugation site—is formed on the resin. The oligonucleotide is then removed from the resin and GalNAc is conjugated to the reactive site.

[1402] The carboxy GalNAc derivatives may be coupled to amino-modified oligonucleotides. The peptide coupling conditions are known to the skilled in the art using a carbodiimide coupling agent like DCC (N,N′-Dicyclohexylcarbodiimide), EDC (N-(3-dimethylaminopropyl)-N′-ethylcarbodiimide) or EDC·HCl (N-(3-dimethylaminopropyl)-N′-ethylcarbodiimide hydrochloride and an additive like HOBt (1-hydroxybenztriazole), HOSu (N-hydroxysuccinimide), TBTU (N,N,N′,N′-Tetramethyl-O-(benzotriazol-1-yl)uronium tetrafluoroborate, HBTU (2-(1H-benzotriazol-1-yl)-1,1,3,3-tetramethyluronium hexafluorophosphate) or HOAt (1-Hydroxy-7-azabenzotriazole and common combinations thereof such as TBTU/HOBt or HBTU/HOAt to form activated amine-reactive esters.

[1403] Amine groups may be incorporated into oligonucleotides using a number of known, commercially available reagents at the 5′ terminus, 3′ terminus or anywhere in between.

[1404] Non-limiting examples of reagents for oligonucleotide synthesis to incorporate an amino group include:
[1405] 5′ attachment:
   [1406] 6-(4-Monomethoxytritylamino)hexyl-(2-cyanoethyl)-(N,N-diisopropyl)-phosphoramidite CAS Number: 114616-27-2
   [1407] 5′-Amino-Modifier TEG CE-Phosphoramidite
   [1408] 10-(O-trifluoroacetamido-N-ethyl)-triethyleneglycol-1-[(2-cyanoethyl)-(N,N-diisopropyl)]-phosphoramidite
[1409] 3′ attachment:
   [1410] 3′-Amino-Modifier Serinol CPG
   [1411] 3-Dimethoxytrityloxy-2-(3-(fluorenylmethoxycarbonylamino)propanamido)propyl-1-O-succinyl-long chain alkylamino-CPG (where CPG stands for controlled-pore glass and is the solid support)
   [1412] Amino-Modifier Serinol Phosphoramidite
   [1413] 3-Dimethoxytrityloxy-2-(3-(fluorenylmethoxycarbonylamino)propanamido)propyl-1-O-(2-cyanoethyl)-(N,N-diisopropyl)-phosphoramidite
[1414] Internal (base modified):
   [1415] Amino-Modifier C6 dT
   [1416] 5′-Dimethoxytrityl-5-[N-(trifluoroacetylaminohexyl)-3-acrylimido]-2′-deoxyUridine,3′-[(2-cyanoethyl)-(N,N-diisopropyl)]-phosphoramidite. CAS Number: 178925-21-8

[1417] Solution phase conjugations may occur after oligonucleotide synthesis via reactions between non-nucleosidic nucleophilic functional groups that are attached to the oligonucleotide and electrophilic GalNAc reagents. Examples of nucleophilic groups include amines and thiols, and examples of electrophilic reagents include activated esters (e.g. N-hydroxysuccinimide, pentafluorophenyl) and maleimides.

TABLE 32
GalNAc Conjugation Reagent

| Type | |
|---|---|
| of | |
| conjug- | |
| ation | Structure |
| Solid phase 5′ attach- ment phos- phora- midite | [chemical structure] |

[1418] For the phosphoramidite in Table 32, m or n may be any value from 1 to 10. For example, m may be 4, and n may be 2. The following is a non-limiting example of a scheme for synthesizing the phosphoramidite in Table 32.

[chemical structure]

[chemical structure]

[chemical structure]

[chemical structure]

[chemical structure]

[chemical structure]

### Example 29: siRNA-Mediated Modulation of ANGPTL7 and Effects on Intraocular Pressure in Non-Human Primates

[1419] In this experiment, non-human primates are used to evaluate the effect of siRNA inhibition of ANGPTL7 in the eye after intravitreal (IVT) injection. Cynomolgus monkeys are divided into 4 groups (n=4). The right eye (OD) of each monkey will be injected IVT with physiological saline, the left eye (OS) of each monkey will be injected IVT with siRNA targeting ANGPTL7. Group 1 monkeys will receive ETD01660 (SEQ ID NO: 11583 and 11630), Group 2 monkeys will receive ETD01824 (SEQ ID NO:11594 and 11640), Group 3 monkeys will receive ETD01825 (SEQ ID NO: 11595 and 11642) and Group 4 monkeys will receive ETD01777 (SEQ ID NO: 11593 and 11640). The dose level of each of the siRNAs will be between 0.2 mg/eye and 2 mg/eye.

[1420] The siRNAs will contain hydrophobic moiety, such as stearyl (ETD01660, ETD01777 and ETD01825), phenyl n-dodecyl (ETD01824) or other hydrophobic moiety. A ligand that binds to receptors on the cell surface, such as RGD to integrins, may also be attached to the siRNA. Hydrophobic groups may also be combined with cell-targeting ligands to increase cellular uptake.

[1421] The in-life portion of the study is 35 days. siRNA or vehicle treatment occurs on Day 0. IVT injection will occur according to the following protocol. 1) After ocular instillation of a tropicamide/phenylephrine hydrochloride (Mydrin-P Ophthalmic Solution, Santen Pharmaceutical, Co., Ltd.), animals are anesthetized by an intramuscular injection (0.2 mL/kg, 10 mg/kg) of a mixture of ketamine hydrochloride (Arevipharma GmbH, Radebuel, 50 mg/mL) or ketamine (Ketalar for Intramuscular Injection 500 mg, Daiichi Sankyo Propharma Co., Ltd., 50 mg/mL) and xylazine (Selactar 2% Injection, 20 mg/mL, Bayer Yakuhin, Ltd.) in a ratio of 7:1 (v/v). The area surrounding the eyes is disinfected with cotton wool pellets permeated with Isodine Solution 10% (Meiji Seika Pharma Co. Ltd. or Mundipharma K.K.). After drying, the upper and lower eyelids are disinfected with cotton swabs permeated with PA-Iodo Ophthalmic and Eye Washing Solution (Nitten Pharmaceutical Co., Ltd.) diluted 4-fold with physiological saline (Otsuka Pharmaceutical Factory, Inc.). 2) Steps 2 and 3 are performed using the control article (right eye) and then repeated using the siRNA test articles (left eye). Oxybuprocaine hydrochloride (Benoxil Ophthalmic Solution 0.4%, (Santen Pharmaceutical Co., Ltd.) is instilled. The eye is opened with a sterilized blepharostat, and the exterior part of the eye is disinfected (washed) with 4-fold diluted PA-Iodo Ophthalmic and Eye Washing Solution and then flushed with physiological saline. 3) Animals are kept in a supine position, and the siRNA test article or control article will be injected into the vitreous humor from the lower portion (6 o'clock position) of the conjunctiva at approximately 2.0 to 3.0 mm posterior to the limbus with a 30-gauge needle attached to a disposable syringe in the order of right eye to left eye. The injection needle is positioned to face the posterior axis of the globe, and the contents are delivered into the mid-vitreous by slowly depressing the syringe plunger. The needle affixed to the injection syringe is retracted to a distance of 2.0-3.0 mm and held in place for at least 2 minutes to lessen reflux of the injected material. 4) After injection to both eyes, the optic media of both eyes are observed using a slit lamp (SL-15 or SL-17, Kowa Co., Ltd.) to confirm dosing. Levofloxaci hydrate (Cravit Ophthalmic Solution 0.5%) is instilled immediately after observation of the optic media. 5) Animals are maintained in a right lateral position until they have recovered from anesthesia.

[1422] Intraocular pressure (IOP) is measured in on Days −6, −4, 2, 7, 14, 21, 28, 35. After restraining the animals, the IOP (mmHg) of each eye is measured 3 times with a TonoVet tonometer (TV01, Tiolat Oy). The median value is be taken as the IOP, and the maximum and minimum values will be disregarded. A surface anesthetic for ophthalmology will not be used in order to avoid corneal irritation from repeated instillations of such a surface anesthetic.

[1423] Once prior to dosing (Day −7), on Days 2, 7, 21 and 35, gross slit lamp biomicroscopy is performed. Gross observations and pupillary light reflex and iris examinations are performed using a portable slit lamp (SL-15 or SL-17). After the induction of mydriasis by instillation of a tropicamide/phenylephrine hydrochloride (Mydrin-P Ophthalmic Solution), the animals are anesthetized by an intramuscular injection (0.2 mL/kg, 10 mg/kg) of ketamine hydrochloride (50 mg/mL) or ketamine (Ketalar for Intramuscular Injection 500 mg, 50 mg/mL). For fluorescein staining of the cornea, the corneal epithelia of both eyes are stained using fluorescein sodium ophthalmic strips (Fluores Ocular Examination Test Paper 0.7 mg, Ayumi Pharmaceutical Corporation). Examinations are conducted in accordance with the criteria for evaluation using a modified McDonald-Shadduck method.

[1424] Once prior to dosing (Day −7), on Days 2, 7 and 35, color fundus imaging is performed. Examinations are performed under mydriasis and anesthesia induced as described above. The ocular fundus is examined using an indirect ophthalmoscope (IO-α Small Pupil, Neitz Instruments Co., Ltd.). The fundi of all animals are photographed using an ocular fundus camera (Genesis-Df or VX-10α, Kowa Co., Ltd.).

[1425] Animals are euthanized on Day 35. The animals are anesthetized by intramuscular injections of ketamine hydrochloride (50 mg/mL, 0.3 mL/kg) or ketamine (Ketalar for Intramuscular Injection 500 mg, 50 mg/mL, 0.3 mL/kg) and medetomidine (Domitor; 1 mg/mL, 0.08 mL/kg) and euthanized by exsanguination. External appearance and internal organs and tissues are examined macroscopically.

[1426] Aqueous humor is collected from both eyes. After the eyeball is removed, a disposable needle attached to a syringe is inserted into the eye to collect aqueous humor from the limbus. The aqueous humor is immediately cooled on ice and then stored in a deep freezer until analysis.

[1427] Vitreous humor is collected from both eyes. After the eyeball is divided (1st cut, described below), any vitreous humor that leaks is collected. The vitreous humor is immediately cooled on ice and then stored in a deep freezer until analysis.

[1428] The ocular tissues from both eyes are dissected. The eyeball is divided (1st cut, horizontal section, along the longitudinal axis of the whole eye), the posterior eyeball is used for immunohistochemistry (IHC) and in situ hybridization (ISH), and the anterior eyeball is used for RNA and protein analyses.

[1429] The samples for IHC and ISH are fixed in 10% neutral buffered formalin and transferred to PBS approximately 24 hours later. After transfer to PBS, samples for IHC and ISH are stored in a refrigerator until further processing.

[1430] After the 1st cut, the following 4 samples are collected from the ventral side of eyeball (2nd cut): (1) cornea; (2) the trabecular meshwork, ciliary body, canal of Schlemm, scleral spur, and iris; (3) sclera; and (4) retina, including the RPE and choroid. The above 4 samples are further divided into 2 sections (3rd cut). The sectioned samples (after the 3rd cut) will be weighed using an electronic balance (HR-200, FX-3000N, or GF-3000). One half is placed in RNAlater (for RNA), and the other half will be flash frozen (for protein analysis) as follows: After weighing, the dissected samples (for RNA) are placed in RNAlater RNA Stabilization Reagent (Thermo Fisher Scientific) at a volume at least 10-fold the amount of the tissue sample and stored in a refrigerator overnight. The samples are stored in a deep freezer until analysis. After weighing, the dissected samples for protein are frozen in liquid nitrogen and stored in a deep freezer until analysis.

[1431] Total RNA is prepared by homogenizing the ocular tissue of interest in homogenization buffer (Maxwell RSC simplyRNA Tissue Kit) using a Percellys 24 tissue homogenizer (Bertin Instruments) set at 5000 rpm for two 10 second cycles. Total RNA from the lysate is purified on a Maxwell RSC 48 platform (Promega Corporation) according to the manufacturer's recommendations. Preparation of cDNA was performed using Quanta qScript cDNA SuperMix (VWR, Cat #95048-500) according to the manufacturer's instructions. The levels of ocular ANGPTL7 mRNA are assessed by RT-qPCR using TaqMan assays for cynomolgus ANGPTL7 (ThermoFisher, assay #Mf02878789_m1) and the housekeeping gene GAPDH (ThermoFisher, assay #Mf04392546_g1) and PerfeCTa® qPCR FastMix®, Low ROX™ (VWR, Cat #101419-222). Data are normalized to the relative ANGPTL7 mRNA level in the ocular tissue from animals receiving physiologic saline.

[1432] Ocular tissue for protein quantitation are prepared by homogenizing the ocular tissue of interest in homogenization buffer (AlphaLISA Lysis Buffer, PerkinElmer, Cat #AL003C) containing protease inhibitors (Thermo Scientific Halt Protease and Phosphatase Inhibitor Cocktail, Fisher Cat #PI78442) using a Percellys 24 tissue homogenizer (Bertin Instruments) set at 5000 rpm for 3 20 second cycles. After determination of total protein (Pierce™ BCA Protein Assay Kit Cat #23225), ANGPTL7 protein levels in the ocular tissue of interest are measured in a 384-well plate using a custom AlphaLISA kit (PerkinElmer) containing biotinylated anti-human ANGPTL7 antibody, streptavidin Donor beads and anti-human ANGPTL7 Acceptor Beads. Signal is measured using an EnVision instrument (PerkinElmer). Data are made relative to total protein and then normalized to the ANGPTL7 protein level in the ocular tissue from animals receiving physiologic saline.

### Example 30: Synthesis of ETL Phosphoramidites

[chemical structure]

### Example: Synthesis of ETL20 Phosphoramidite

[chemical structure]

### Synthesis of N-(4-hydroxyphenethyl)palmitamide (5)

[1433] 12.82 grams of 1 (palmitic acid) were weighed out and dissolved in 450 mL of CH₂Cl₂. 16.3 mL of di-isopropyl ethyl amine (DIEA) was added. Afterwards 12.88 mL of 2 (perfluorophenyl 2,2,2-trifluoroaceate, “PFP”) was added dropwise, and the reaction was stirred for 10 minutes after addition was completed. 8.26 grams of 4 (4-(2-aminoethyl)phenol) was added via an addition funnel, and the addition funnel was rinsed with 50 mL CH₂Cl₂. The reaction was placed under Argon and stirred overnight. After stirring overnight 5 formed a precipitate. The precipitate was collected via filtration and washed with 75 mL MTBE, previously chilled to −20° C. The white to off-white solid was dried overnight under high vacuum. This product was used in the next step without further purification.

[chemical structure]

[1434] Synthesis of ETL20 phosphoramidite (6): 100 mL anhydrous ethyl acetate was added to N-(4-hydroxyphenethyl)palmitamide 5 (5.2 grams), followed by 250 mg 3-Angstrom molecular sieves. The mixture was stirred for 1 hr. The mixture was heated at 50° C. to obtain a clear solution. 7.3 mL of DIEA was added, and the mixture was placed into an ice bath, and the solution became cloudy. 3-((chloro(diisopropylamino)phosphaneyl)oxy)propanenitrile (3.5 mL) was slowly added to the cloudy solution. After addition was completed, the reaction mixture was removed from the ice bath and stirred at room temperature overnight under Ar. The reaction mixture was then diluted with ethyl acetate (200 mL), washed with saturated NaHCO₃ solution (2×50 mL) followed by brine (50 mL). The solution was then dried over Na₂SO₄, filtered and concentrated under reduced pressure. The residue obtained was purified by silica gel column chromatography and eluted with 5-30% ethyl acetate in hexanes containing 2% triethylamine.

[1435] ETL18 (C₁₄) and ETL19 (C₁₂) phosphoramidites were synthesized using the procedure to generate ETL20 phosphoramidite with hydroxylbenzylamine and lauryl (C₁₂) or myristic (C₁₄) acids.

### Example 31: Intravitreal Injection of siRNA Duplexes

[1436] For intravitreal injection in mice (4-7 week-old ICR's, Envigo), a 33-gauge needle with a glass microsyringe (10-μL volume; Hamilton Company) was used. The eye was proposed, and the needle was inserted through the equatorial sclera and inserted into the vitreous chamber at an angle of approximately 45 degrees, taking care to avoid touching the posterior part of the lens or the retina. 2.5 or 1 μg of siRNA duplex in 1 μL phosphate-buffered saline vehicle was injected into the vitreous. The siRNA duplexes injected are depicted in Table 1.

TABLE 33
siRNA duplexes

| | | SEQ | | SEQ | |
|---|---|---|---|---|---|
| Entity | Duplexes | ID | Sense | ID | Antisense |
| # | Target | NO | Strand | NO | Strand |
| ETD01928 | mANGPTL7 | 11786 | [BLT20] | 11787 | csAfsuG |
| | | | CfaAfcC | | faUfgUf |
| | | | faGfAfU | | cAfaucU |
| | | | fuGfaCf | | fgGfuUf |
| | | | aUfcAfu | | gsusu |
| | | | Gfsusu | | |
| ETD01929 | mANGPTL7 | 11786 | [ELT18] | 11787 | csAfsuG |
| | | | CfaAfcC | | faUfgUf |
| | | | faGfAfU | | cAfaucU |
| | | | fuGfaCf | | fgGfuUf |
| | | | aUfcAfu | | gsusu |
| | | | Gfsusu | | |
| ETD01930 | mANGPTL7 | 11786 | [ELT19] | 11787 | csAfsuG |
| | | | CfaAfcC | | faUfgUf |
| | | | faGfAfU | | cAfaucU |
| | | | fuGfaCf | | fgGfuUf |
| | | | aUfcAfu | | gsusu |
| | | | Gfsusu | | |

[1437] Mice were euthanized on day 14 post-injection. Both eyes from each animal were harvested and dissected along the equator, and the anterior and posterior hemispheres were placed in RNAlater. Total RNA was extracted from homogenized tissue and reverse transcribed to cDNA using a First-Strand III cDNA Synthesis kit. Normalized cDNA quantification was carried out by real-time TaqMan PCR using fluorescently labeled TaqMan probes/primers sets of selected genes (ANGPTL7, MYOC, COL1A1, COL5A1, VCAN, FN1, and PPIA). Reactions were carried out in 20 μL aliquots using TaqMan Universal PCR Master Mix No AmpErase UNG ran on an ABI Prism 7500 Fast Real-Time PCR System Sequence Detection System and analyzed by the 7500 System software. Relative Quantification (RQ) values between treated and untreated samples are calculated by the formula 2−ΔΔCT, where CT is the cycle at threshold (automatic measurement), ΔCT is CT of the assayed gene minus CT of the endogenous control (PPIA), and ΔΔCT is the ΔCT of the normalized assayed gene in the treated sample minus the ΔCT of the same gene in the untreated one (calibrator).

[1438] Among other things, the ETD1928-1930 series shows the usefulness of different hydrophobic groups with 12-16 carbons attached to tyramine. The hydrophobic groups were conjugated without phosphorothioates at the 5′ end of the sense strand.

TABLE 34
mRNA expression levels

| | |
|---|---|
| | Average |
| | mRNA |
| | relative to |
| | no treatment |
| | control |
| siRNA | animals |

2.5 μg dose

| | |
|---|---|
| ETD01928 | 0.20 |
| ETD01929 | 0.09 |
| ETD01930 | 0.05 |

1 μg dose

| | |
|---|---|
| ETD01928 | 0.71 |
| ETD01929 | 0.81 |
| ETD01930 | 0.76 |

### Example 31: Additional Example siRNA Base Sequences

[1439] Table 38 provides some example siRNA base sequences.

TABLE 38
Example siRNA Base Sequences

| | Base Sense | | Base Antisense |
|---|---|---|---|
| SEQ | Strand | SEQ | Strand |
| ID | Sequences | ID | Sequences |
| NO: | (5′ to 3′) | NO: | (5′ to 3′) |
| 11805 | AAUUAUCUUGA | 11820 | UUGUAGACUCA |
| | GUCUACAAUU | | AGAUAAUUUU |
| 11806 | AUAUGUACCAA | 11821 | UAACAUCCUUG |
| | GGAUGUUAUU | | GUACAUAUUU |
| 11807 | AAUUAUCUUGA | 11822 | UUGUAGACUCA |
| | GUCUACAAUU | | AGAUAAUUUU |
| 11808 | AAUUAUCUUGA | 11823 | UUGUAGACUCA |
| | GUCUACAAUU | | AGAUAAUUUU |
| 11809 | ACACAAAAAUU | 11824 | UGCCGAACAAU |
| | GUUCGGCAUU | | UUUUGUGUUU |
| 11810 | AAUUAUCUUGA | 11825 | UUGUAGACUCA |
| | GUCUACAA | | AGAUAAUU |
| 11811 | AUAUGUACCAA | 11826 | UAACAUCCUUG |
| | GGAUGUUA | | GUACAUAU |
| 11812 | AAUUAUCUUGA | 11827 | UUGUAGACUCA |
| | GUCUACAA | | AGAUAAUU |
| 11813 | AAUUAUCUUGA | 11828 | UUGUAGACUCA |
| | GUCUACAA | | AGAUAAUU |
| 11814 | ACACAAAAAUU | 11829 | UGCCGAACAAU |
| | GUUCGGCA | | UUUUGUGU |
| 11815 | AUUAUCUUGAG | 11830 | UGUAGACUCAA |
| | UCUACA | | GAUAAU |
| 11816 | UAUGUACCAAG | 11831 | AACAUCCUUGG |
| | GAUGUU | | UACAUA |
| 11817 | AUUAUCUUGAG | 11832 | UGUAGACUCAA |
| | UCUACA | | GAUAAU |
| 11818 | AUUAUCUUGAG | 11833 | UGUAGACUCAA |
| | UCUACA | | GAUAAU |
| 11819 | CACAAAAAUUG | 11834 | GCCGAACAAUU |
| | UUCGGC | | UUUGUG |

### Sequence Information

[1440] Some embodiments include one or more nucleic acid sequences from the non-limiting examples in the following table:

TABLE 37
Description of Sequences

| SEQ ID NO: | Description |
|---|---|
| 1-4412 | ANGPTL7 siRNA oligonucleotide sequences |
| 4413-11084 | ANGPTL7 antisense oligonucleotide sequences |
| 11085 | Full-length ANGPTL7 human mRNA (GenBank Acc.# NM_021146.4) |
| 11086 | Full-length ANGPTL7 human pre-mRNA (NC_000001.11 (11189289 . . . 11195981) |
| 11087 | Antisense oligonucleotide targeting ANGPTL7 (e.g. human, NHP, mouse, rat, dog) |
| 11088 | Non-targeting control antisense oligonucleotide |
| 11089 | Sense strand oligonucleotide targeting ANGPTL7 (e.g. human, NHP, mouse, rat, dog) |
| 11090 | Antisense strand oligonucleotide targeting ANGPTL7 (e.g. human, NHP, mouse, rat, dog) |
| 11091 | Sense strand non-targeting (control) oligonucleotide |
| 11092 | Antisense strand non-targeting (control) oligonucleotide |
| 11093-11332 | Modified human ANGPTL7 siRNA sequences |
| 11333-11376 | Modified human ANGPTL7 siRNA sequences that are cross-reactive with mouse |
| 11377 | ETD00752 sense strand |
| 11378 | ETD00153 sense strand |
| 11379 | ETD00153 antisense strand |
| 11380 | ASO modification pattern |
| 11381-11385 | Modification pattern 1S-5S |
| 11386-11389 | Modification pattern 1AS-4AS |
| 11390-11393 | Peptide moieties |
| 11394-11398 | Modification pattern 6S-10S |
| 11399-11401 | Modification pattern 6AS-8AS |
| 11402-11449 | Modified human ANGPTL7 siRNA sequences |
| 11450-11499 | ANGPTL7 siRNA oligonucleotide sequences |
| 11500-11507 | Modified human ANGPTL7 siRNA sequences |
| 11508-11511 | Modification patterns 11S-14S |
| 11512-11519 | ANGPTL7 siRNA oligonucleotide sequences |
| 11520 | ETD00910 sense strand |
| 11521 | ETD00914 sense strand |
| 11522 | ETD01046 sense strand |
| 11523 | ETD01053 sense strand |
| 11524 | ETD00910 antisense strand |
| 11525 | ETD00914 antisense strand |
| 11526 | ETD01046 antisense strand |
| 11527 | ETD01053 antisense strand |
| 11528 | Control antisense strand |
| 11529-11538 | EDT1066-EDT1070 unmodified sequences |
| 11539 | EDT1067 modified version |
| 11540 | Control antisense strand |
| 11541 | Modification Pattern 15S |
| 11542 | Modification Pattern 16S |
| 11543 | Modification Pattern 9AS |
| 11544 | Modification Pattern 10AS |
| 11545 | ETD01172 sense strand |
| 11546 | ETD01173 sense strand |
| 11547 | ETD01174 antisense strand |
| 11548 | ETD01175 antisense strand |
| 11549-11595 | Modified sense strands of ANGPTL7 siRNAs |
| 11596-11642 | Modified antisense strands of ANGPTL7 siRNAs |
| 11643-11676 | Unmodified sense strands of ANGPTL7 siRNAs sequence |
| 11677-11710 | Unmodified antisense strands of ANGPTL7 siRNAs |
| 11711-11738 | Modification patterns 17S-44S |
| 11739 | Modification pattern 11AS |
| 11740-11754 | mANGPTL7 siRNAs in Examples 23 and 24 |
| 11755-11767 | Unmodified sense strands of ANGPTL7 siRNAs sequence |
| 11768-11780 | Unmodified antisense strands of ANGPTL7 siRNAs |
| 11781-11785 | Modification patterns 45S-49S |
| 11786 | Modified sense strand example |
| 11787 | Modified antisense strand example |
| 11788 | Modification pattern 50S |
| 11789 | Modification pattern 12AS |
| 11803 | ETD02261 antisense strand |

We claim:

1. A composition comprising a small interfering RNA (siRNA) that targets Angiopoietin-like 7 (ANGPTL7) and when administered to a cell decreases expression of ANGPTL7, wherein the siRNA comprises a sense strand and an antisense strand; and
wherein the antisense strand comprises modification pattern 12AS: 5′-nsNfsnnnnNfnnNfnNfnNfnNfnNfnsnsn-3′, or wherein the sense strand comprises a modification pattern selected from the group consisting of: modification pattern 175: 5′-nnnnnnNfnNfnnnnnnnnnnsnsn-3′ (SEQ ID NO: 11711), modification pattern 185: 5′-nnnnnnnNfNfNfNfnnnnnnnnsnsn-3′ (SEQ ID NO: 11712), modification pattern 19S: 5′-nnnnNfnnnNfnNfnnnnnnnnsnsn-3′ (SEQ ID NO: 11713), modification pattern 20S: 5′-nnnnnnnNfNfnNfnnnnnnnnsnsn-3′ (SEQ ID NO: 11714), modification pattern 21S: 5′-nnnnnnNfNfNfNfNfnnnnnnnnsnsn-3′ (SEQ ID NO: 11715), modification pattern 22S: 5′-nnnnNfnNfNfNfNfnnnnnnnnnsnsn-3′ (SEQ ID NO: 11716), modification pattern 23S: 5′-nnnnnNfNfNfNfnNfnnnnnnnnsnsn-3′ (SEQ ID NO: 11717), modification pattern 24S: 5′-nnnnnNfNfNfNfnnnnnnnnnnsnsn-3′ (SEQ ID NO: 11718), modification pattern 25S: 5′-nnnnNfNfNfNfNfnnnnnnnnnnsnsn-3′ (SEQ ID NO: 11719), modification pattern 26S: 5′-nnnnnnnnNfNfnnnnnnnnnsnsn-3′ (SEQ ID NO: 11720), modification pattern 27S: 5′-nnnnnnNfNfNfNfnnnnnnnnnsnsn-3′ (SEQ ID NO: 11721), modification pattern 28S: 5′-nnnnNfNfnnNfnNfnnnnnnnnsnsn-3′ (SEQ ID NO: 11722), modification pattern 29S: 5′-nnnnNfnNfnNfnNfnnnnnnnnsnsn-3′ (SEQ ID NO: 11723), modification pattern 30S: 5′-nnnnnNfnnNfnNfnnnnnnnnsnsn-3′ (SEQ ID NO: 11724), modification pattern 31S: 5′-nnnnnNfNfnNfnnnnnnnnnnsnsn-3′ (SEQ ID NO: 11725), modification pattern 32S: 5′-nnnnnnNfnNfNfnnnnnnnnnsnsn-3′ (SEQ ID NO: 11726), modification pattern 33S: 5′-nNfnNfnNfnNfNfnnnnnNfnNfNfnsnsn-3′ (SEQ ID NO: 11727), modification pattern 34S: 5′-snnnnnNfNfNfNfnNfnnnnnnnnsnsn-3′ (SEQ ID NO: 11728), modification pattern 35S: 5′-snnnnnNfNfNfNfnnnnnnnnnnsnsn-3′ (SEQ ID NO: 11729), modification pattern 36S: 5′-snnnnNfNfNfNfNfnnnnnnnnnnnsnsn-3′ (SEQ ID NO: 11730), modification pattern 37S: 5′-snnnnnnnnNfNfnnnnnnnnnsnsn-3′ (SEQ ID NO: 11731), modification pattern 38S: 5′-snnnnNfNfnnNfnNfnnnnnnnnsnsn-3′ (SEQ ID NO: 11732), modification pattern 39S: 5′-snnnnnNfnnNfnNfnnnnnnnnsnsn-3′ (SEQ ID NO: 11733), modification pattern 40S: 5′-snnnnnnNfnNfNfnnnnnnnnnsnsn-3′ (SEQ ID NO: 11734), modification pattern 41S: 5′-snNfnNfnNfnNfNfnnnnNfnNfNfnsnsn-3′ (SEQ ID NO: 11735), modification pattern 42S: 5′-NfsnNfnNfnNfNfNfnNfnNfnNfnNfnNfsnsn-3′ (SEQ ID NO: 11736), modification pattern 43S: 5′-NfsnNfnNfnNfnNfnNfnNfnNfnNfnNfsnsn-3′ (SEQ ID NO: 11737), modification pattern 44S: 5′-NfnNfnNfnNfnNfnNfnNfnNfnNfnNfsnsn-3′ (SEQ ID NO: 11738), modification pattern 45S: 5′-nnnnnNfnNfNfnnnnnnnnnnsnsn-3′ (SEQ ID NO: 11781), modification pattern 46S: 5′-nnnnNfnnNfNfnnnnnnnnnnsnsn-3′ (SEQ ID NO: 11782), modification pattern 47S: 5′-nnnnNfnNfnNfnnnnnnnnnnsnsn-3′ (SEQ ID NO: 11783), modification pattern 48S: 5′-nnnnNfNfnnNfnnnnnnnnnnsnsn-3′ (SEQ ID NO: 11784), modification pattern 49S: 5′-nnnnNfNfnNfNfnnnnnnnnnnsnsn-3′ (SEQ ID NO: 11785), and modification pattern 50S: 5′-NfnNfnNfnNfNfNfnNfnNfnNfnNfnNfsnsn-3′ (SEQ ID NO: 11788), wherein “Nf” is a 2′-fluoro-modified nucleoside, “n” is a 2′-O-methyl modified nucleoside, and “s” is a phosphorothioate linkage.

2. The composition of claim 1, wherein the sense strand comprises a 5′ hydrophobic moiety.

3. The composition of claim 2, wherein the 5′ hydrophobic moiety comprises a phenyl or cyclohexyl linker connected to a 5′ end of the sense strand and connected to a lipid or hydrocarbon.

4. A composition comprising a small interfering RNA (siRNA) that targets Angiopoietin-like 7 (ANGPTL7) and when administered to a cell decreases expression of ANGPTL7, wherein the siRNA comprises an antisense strand and a sense strand comprising a 5′ hydrophobic moiety comprising a phenyl or cyclohexyl linker connected to a 5′ end of the sense strand and connected to a lipid or hydrocarbon.

5. The composition of claim 3, wherein the lipid or hydrocarbon, and the end of the sense are connected to the phenyl or cyclohexyl linker in the 1,4; 1,3; or 1,2 substitution pattern.

6. The composition of claim 3, wherein the 5′ hydrophobic moiety comprises any one of the following structures: [chemical structure]
wherein the dotted line indicates a covalent connection to the end of the 5′ end of the sense strand, n is 1-3, and R is an alkyl group containing 4-18 carbons.

7. The composition of claim 3, wherein the 5′ hydrophobic moiety comprises a hydrophobic moiety in Table 1.

8. The composition of claim 3, wherein the 5′ hydrophobic moiety comprises phenyl para C12.

9. A composition comprising a small interfering RNA (siRNA) that targets Angiopoietin-like 7 (ANGPTL7) and when administered to a cell decreases expression of ANGPTL7, wherein the siRNA comprises an antisense strand, a sense strand, and a hydrophobic moiety comprising stearyl conjugated to a 5′ end of the sense strand.

10. The composition of claim 1, wherein the antisense strand comprises a 5′ vinyl phosphonate.

11. The composition of claim 1, wherein the sense strand comprises any one of modification patterns 24S, 25S, 31S, 33S, or 45S-50S.

12. The composition of claim 1, wherein the sense strand comprises modification pattern 24S.

13. The composition of claim 1, wherein the sense strand comprises modification pattern 25S.

14. The composition of claim 1, wherein the sense strand comprises modification pattern 31S.

15. The composition of claim 1, wherein the sense strand comprises modification pattern 33S.

16. The composition of claim 1, wherein the sense strand comprises modification pattern 455.

17. The composition of claim 1, wherein the sense strand comprises modification pattern 46S.

18. The composition of claim 1, wherein the sense strand comprises modification pattern 47S.

19. The composition of claim 1, wherein the sense strand comprises modification pattern 48S.

20. The composition of claim 1, wherein the sense strand comprises modification pattern 49S.

21. The composition of claim 1, wherein the sense strand comprises modification pattern 505.

22. The composition of claim 1, wherein the antisense strand comprises modification pattern 1AS: 5′-nsNfsnNfnNfnNfnNfnnnNfnNfnNfnsnsn-3′ (SEQ ID NO: 11386).

23. The composition of claim 1, wherein the antisense strand comprises modification pattern 6AS: 5′-nsNfsnNfnNfnNfnNfnNfnNfnNfnNfnsnsn-3′ (SEQ ID NO: 11399).

24. The composition of claim 1, wherein the antisense strand comprises modification pattern 11AS: 5′-nsnsnNfnNfnNfnNfnNfnNfnNfnNfnsnsn-3′ (SEQ ID NO: 11739.

25. The composition of claim 1, wherein the sense strand comprises the nucleoside sequence of any one of SEQ ID NOs: 11643-11676 or 11755-11767, or a sequence thereof having 1 or 2 nucleoside substitutions, additions, or deletions relative to any of SEQ ID NOs: 11643-11676 or 11755-11767.

26. The composition of claim 1, wherein the sense strand comprises the nucleoside sequence of any one of SEQ ID NOs: 11643-11676 or 11755-11767.

27. The composition of claim 1, wherein the sense strand comprises the nucleoside sequence of any one of SEQ ID NOs: 11664, 11674 or 11676, or a sequence thereof having 1 or 2 nucleoside substitutions, additions, or deletions relative to any of SEQ ID NOs: 11664, 11674 or 11676.

28. The composition of claim 1, wherein the sense strand comprises the nucleoside sequence of any one of SEQ ID NOs: 11664, 11674 or 11676.

29. The composition of claim 1, wherein the sense strand comprises the nucleoside sequence of SEQ ID NO: 11664, or a sequence thereof having 1 or 2 nucleoside substitutions, additions, or deletions relative to SEQ ID NO: 11664.

30. The composition of claim 1, wherein the sense strand comprises the nucleoside sequence of SEQ ID NO: 11664.

31. The composition of claim 1, wherein the sense strand comprises the nucleoside sequence of SEQ ID NO: 11674, or a sequence thereof having 1 or 2 nucleoside substitutions, additions, or deletions relative to SEQ ID NO: 11674.

32. The composition of claim 1, wherein the sense strand comprises the nucleoside sequence of SEQ ID NO: 11674.

33. The composition of claim 1, wherein the sense strand comprises the nucleoside sequence of SEQ ID NO: 11676, or a sequence thereof having 1 or 2 nucleoside substitutions, additions, or deletions relative to SEQ ID NO: 11676.

34. The composition of claim 1, wherein the sense strand comprises the nucleoside sequence of SEQ ID NO: 11676.

35. The composition of claim 1, wherein the antisense strand comprises the nucleoside sequence of any one of SEQ ID NOs: 11677-11710 or 11768-11780, or a sequence thereof having 1 or 2 nucleoside substitutions, additions, or deletions relative to any of SEQ ID NOs: 11677-11710 or 11768-11780.

36. The composition of claim 1, wherein the antisense strand comprises the nucleoside sequence of any one of SEQ ID NOs: 11677-11710 or 11768-11780.

37. The composition of claim 1, wherein the antisense strand comprises the nucleoside sequence of any one of SEQ ID NOs: 11698, 11708 or 11710, or a sequence thereof having 1 or 2 nucleoside substitutions, additions, or deletions relative to any of SEQ ID NOs: 11698, 11708 or 11710.

38. The composition of claim 1, wherein the antisense strand comprises the nucleoside sequence of any one of SEQ ID NOs: 11698, 11708 or 11710.

39. The composition of claim 1, wherein the antisense strand comprises the nucleoside sequence of SEQ ID NO: 11698, or a sequence thereof having 1 or 2 nucleoside substitutions, additions, or deletions relative to SEQ ID NO: 11698.

40. The composition of claim 1, wherein the antisense strand comprises the nucleoside sequence of SEQ ID NO: 11698.

41. The composition of claim 1, wherein the antisense strand comprises the nucleoside sequence of SEQ ID NO: 11708, or a sequence thereof having 1 or 2 nucleoside substitutions, additions, or deletions relative to SEQ ID NO: 11708.

42. The composition of claim 1, wherein the antisense strand comprises the nucleoside sequence of SEQ ID NO: 11708.

43. The composition of claim 1, wherein the antisense strand comprises the nucleoside sequence of SEQ ID NO: 11710, or a sequence thereof having 1 or 2 nucleoside substitutions, additions, or deletions relative to SEQ ID NO: 11710.

44. The composition of claim 1, wherein the antisense strand comprises the nucleoside sequence of SEQ ID NO: 11710.

45. A composition comprising a small interfering RNA (siRNA) that targets Angiopoietin-like 7 (ANGPTL7) and when administered to a cell decreases expression of ANGPTL7, wherein the siRNA comprises a sense strand and an antisense strand; and
wherein (i) or (ii):
(i) wherein the sense strand comprises 5′-[ETL3]aUfaUfgUfaCfCfaaggaUfgUfUfasusu-3′ (SEQ ID NO: 11583), 5′-[ETL3]aauuaUfCfUfUfgagucuacaasusu-3′ (SEQ ID NO: 11593), 5′-[ETL12]aauuaUfCfUfUfgagucuacaasusu-3′ (SEQ ID NO: 11594), or 5′-[ETL3]acacAfAfAfAfAfuuguucggcasusu-3′ (SEQ ID NO: 11595), or a sequence thereof having 1 or 2 nucleoside substitutions, additions, or deletions relative to any of SEQ ID NOs: 11583 or 11593-11595, or
(ii) or wherein the antisense strand comprises the nucleotide sequence of any one of 5′-VPusAfsaCfaUfcCfuUfgguAfcAfiAfususu-3′ (SEQ ID NO: 11630), 5′-VPusUfsgUfaGfaCfuCfaAfgAfuAfaUfususu-3′ (SEQ ID NO: 11640), 5′-VPusGfscCfgAfaCfaAfuUfuUfuGfuGfususu-3′ (SEQ ID NO: 11642), or 5′-VPusUfsguagAfcuCfaAfgAfuAfaUfususu-3′ (SEQ ID NO: 11803), or a sequence thereof having 1 or 2 nucleoside substitutions, additions, or deletions relative to any of SEQ ID NOs: 11630 or 11640-11642;
wherein “Af,” “Cf,” “Gf,” and “Uf” are 2′-fluoro-modified nucleosides, “a,” “c,” “g,” and “u” are 2′-O-methyl modified nucleosides, “s” is a phosphorothioate linkage, “VP” is vinyl phosphonate, “[ETL3]” is stearyl, and “[ETL12]” is phenyl para C12.

46. The composition of claim 45, wherein the sense strand comprises the nucleotide sequence of any one of SEQ ID NOs: 11583 or 11593-11595.

47. The composition of claim 45, wherein the antisense strand comprises the nucleotide sequence of any one of SEQ ID NOs: 11630 or 11640-11642.

48. A pharmaceutical composition comprising the composition of any one of the aforementioned claims and a pharmaceutically acceptable carrier.

49. A method of decreasing expression of Angiopoietin-like 7 (ANGPTL7), comprising administering the composition of claim 48 to a cell, thereby decreasing expression of ANGPTL7 in the cell.

50. The method of claim 49, wherein administering the pharmaceutical composition to the cell comprises administering the composition or pharmaceutical composition to a subject comprising the cell.

51. A method of treating an ocular disorder, comprising administering to a subject in need thereof a therapeutically effective amount of the pharmaceutical composition of claim 47, thereby treating the ocular disorder in the subject.

52. The method of claim 51, wherein the ocular disorder comprises a glaucoma.

53. The method of claim 51, wherein the composition decreases intraocular pressure in an eye of the subject relative to a baseline intraocular pressure measurement obtained from the subject prior to administering the composition to the subject.

54. The method of claim 53, wherein the composition decreases the intraocular pressure by at least 10% relative to the baseline intraocular pressure measurement.

The application's sequence listing, which the Patent Office published only in electronic form, follows.

SEQUENCE LISTING (11834 sequences)

SEQ ID NO: 1 - RNA, 19 nt, synthetic construct
  misc_feature 1..19: note = Description of Artificial Sequence: Synthetic oligonucleotide
  source 1..19: mol_type = other RNA
gggcttggaaggaaagcta

SEQ ID NO: 2 - RNA, 19 nt, synthetic construct
  misc_feature 1..19: note = Description of Artificial Sequence: Synthetic oligonucleotide
  source 1..19: mol_type = other RNA
ggcttggaaggaaagctat

SEQ ID NO: 3 - RNA, 19 nt, synthetic construct
  misc_feature 1..19: note = Description of Artificial Sequence: Synthetic oligonucleotide
  source 1..19: mol_type = other RNA
gcttggaaggaaagctata

SEQ ID NO: 4 - RNA, 19 nt, synthetic construct
  misc_feature 1..19: note = Description of Artificial Sequence: Synthetic oligonucleotide
  source 1..19: mol_type = other RNA
cttggaaggaaagctatag

SEQ ID NO: 5 - RNA, 19 nt, synthetic construct
  misc_feature 1..19: note = Description of Artificial Sequence: Synthetic oligonucleotide
  source 1..19: mol_type = other RNA
ttggaaggaaagctatagg

SEQ ID NO: 6 - RNA, 19 nt, synthetic construct
  misc_feature 1..19: note = Description of Artificial Sequence: Synthetic oligonucleotide
  source 1..19: mol_type = other RNA
tggaaggaaagctataggc

SEQ ID NO: 7 - RNA, 19 nt, synthetic construct
  misc_feature 1..19: note = Description of Artificial Sequence: Synthetic oligonucleotide
  source 1..19: mol_type = other RNA
ggaaggaaagctataggct

SEQ ID NO: 8 - RNA, 19 nt, synthetic construct
  misc_feature 1..19: note = Description of Artificial Sequence: Synthetic oligonucleotide
  source 1..19: mol_type = other RNA
gaaggaaagctataggcta

SEQ ID NO: 9 - RNA, 19 nt, synthetic construct
  misc_feature 1..19: note = Description of Artificial Sequence: Synthetic oligonucleotide
  source 1..19: mol_type = other RNA
aaggaaagctataggctac

SEQ ID NO: 10 - RNA, 19 nt, synthetic construct
  misc_feature 1..19: note = Description of Artificial Sequence: Synthetic oligonucleotide
  source 1..19: mol_type = other RNA
aggaaagctataggctacc

SEQ ID NO: 11 - RNA, 19 nt, synthetic construct
  misc_feature 1..19: note = Description of Artificial Sequence: Synthetic oligonucleotide
  source 1..19: mol_type = other RNA
ggaaagctataggctaccc

SEQ ID NO: 12 - RNA, 19 nt, synthetic construct
  misc_feature 1..19: note = Description of Artificial Sequence: Synthetic oligonucleotide
  source 1..19: mol_type = other RNA
gaaagctataggctaccca

SEQ ID NO: 13 - RNA, 19 nt, synthetic construct
  misc_feature 1..19: note = Description of Artificial Sequence: Synthetic oligonucleotide
  source 1..19: mol_type = other RNA
aaagctataggctacccat

SEQ ID NO: 14 - RNA, 19 nt, synthetic construct
  misc_feature 1..19: note = Description of Artificial Sequence: Synthetic oligonucleotide
  source 1..19: mol_type = other RNA
aagctataggctacccatt

SEQ ID NO: 15 - RNA, 19 nt, synthetic construct
  misc_feature 1..19: note = Description of Artificial Sequence: Synthetic oligonucleotide
  source 1..19: mol_type = other RNA
agctataggctacccattc

SEQ ID NO: 16 - RNA, 19 nt, synthetic construct
  misc_feature 1..19: note = Description of Artificial Sequence: Synthetic oligonucleotide
  source 1..19: mol_type = other RNA
gctataggctacccattca

SEQ ID NO: 17 - RNA, 19 nt, synthetic construct
  misc_feature 1..19: note = Description of Artificial Sequence: Synthetic oligonucleotide
  source 1..19: mol_type = other RNA
ctataggctacccattcag

SEQ ID NO: 18 - RNA, 19 nt, synthetic construct
  misc_feature 1..19: note = Description of Artificial Sequence: Synthetic oligonucleotide
  source 1..19: mol_type = other RNA
tataggctacccattcagc

SEQ ID NO: 19 - RNA, 19 nt, synthetic construct
  misc_feature 1..19: note = Description of Artificial Sequence: Synthetic oligonucleotide
  source 1..19: mol_type = other RNA
ataggctacccattcagct

SEQ ID NO: 20 - RNA, 19 nt, synthetic construct
  misc_feature 1..19: note = Description of Artificial Sequence: Synthetic oligonucleotide
  source 1..19: mol_type = other RNA
taggctacccattcagctc

SEQ ID NO: 21 - RNA, 19 nt, synthetic construct
  misc_feature 1..19: note = Description of Artificial Sequence: Synthetic oligonucleotide
  source 1..19: mol_type = other RNA
aggctacccattcagctcc

SEQ ID NO: 22 - RNA, 19 nt, synthetic construct
  misc_feature 1..19: note = Description of Artificial Sequence: Synthetic oligonucleotide
  source 1..19: mol_type = other RNA
ggctacccattcagctccc

SEQ ID NO: 23 - RNA, 19 nt, synthetic construct
  misc_feature 1..19: note = Description of Artificial Sequence: Synthetic oligonucleotide
  source 1..19: mol_type = other RNA
gctacccattcagctcccc

SEQ ID NO: 24 - RNA, 19 nt, synthetic construct
  misc_feature 1..19: note = Description of Artificial Sequence: Synthetic oligonucleotide
  source 1..19: mol_type = other RNA
ctacccattcagctcccct

SEQ ID NO: 25 - RNA, 19 nt, synthetic construct
  misc_feature 1..19: note = Description of Artificial Sequence: Synthetic oligonucleotide
  source 1..19: mol_type = other RNA
tacccattcagctcccctg

SEQ ID NO: 26 - RNA, 19 nt, synthetic construct
  misc_feature 1..19: note = Description of Artificial Sequence: Synthetic oligonucleotide
  source 1..19: mol_type = other RNA
acccattcagctcccctgt

SEQ ID NO: 27 - RNA, 19 nt, synthetic construct
  misc_feature 1..19: note = Description of Artificial Sequence: Synthetic oligonucleotide
  source 1..19: mol_type = other RNA
cccattcagctcccctgtc

SEQ ID NO: 28 - RNA, 19 nt, synthetic construct
  misc_feature 1..19: note = Description of Artificial Sequence: Synthetic oligonucleotide
  source 1..19: mol_type = other RNA
ccattcagctcccctgtca

SEQ ID NO: 29 - RNA, 19 nt, synthetic construct
  misc_feature 1..19: note = Description of Artificial Sequence: Synthetic oligonucleotide
  source 1..19: mol_type = other RNA
cattcagctcccctgtcag

SEQ ID NO: 30 - RNA, 19 nt, synthetic construct
  misc_feature 1..19: note = Description of Artificial Sequence: Synthetic oligonucleotide
  source 1..19: mol_type = other RNA
attcagctcccctgtcaga

SEQ ID NO: 31 - RNA, 19 nt, synthetic construct
  misc_feature 1..19: note = Description of Artificial Sequence: Synthetic oligonucleotide
  source 1..19: mol_type = other RNA
ttcagctcccctgtcagag

SEQ ID NO: 32 - RNA, 19 nt, synthetic construct
  misc_feature 1..19: note = Description of Artificial Sequence: Synthetic oligonucleotide
  source 1..19: mol_type = other RNA
tcagctcccctgtcagaga

SEQ ID NO: 33 - RNA, 19 nt, synthetic construct
  misc_feature 1..19: note = Description of Artificial Sequence: Synthetic oligonucleotide
  source 1..19: mol_type = other RNA
cagctcccctgtcagagac

SEQ ID NO: 34 - RNA, 19 nt, synthetic construct
  misc_feature 1..19: note = Description of Artificial Sequence: Synthetic oligonucleotide
  source 1..19: mol_type = other RNA
agctcccctgtcagagact

SEQ ID NO: 35 - RNA, 19 nt, synthetic construct
  misc_feature 1..19: note = Description of Artificial Sequence: Synthetic oligonucleotide
  source 1..19: mol_type = other RNA
gctcccctgtcagagactc

SEQ ID NO: 36 - RNA, 19 nt, synthetic construct
  misc_feature 1..19: note = Description of Artificial Sequence: Synthetic oligonucleotide
  source 1..19: mol_type = other RNA
ctcccctgtcagagactca

SEQ ID NO: 37 - RNA, 19 nt, synthetic construct
  misc_feature 1..19: note = Description of Artificial Sequence: Synthetic oligonucleotide
  source 1..19: mol_type = other RNA
tcccctgtcagagactcaa

SEQ ID NO: 38 - RNA, 19 nt, synthetic construct
  misc_feature 1..19: note = Description of Artificial Sequence: Synthetic oligonucleotide
  source 1..19: mol_type = other RNA
cccctgtcagagactcaag

SEQ ID NO: 39 - RNA, 19 nt, synthetic construct
  misc_feature 1..19: note = Description of Artificial Sequence: Synthetic oligonucleotide
  source 1..19: mol_type = other RNA
ccctgtcagagactcaagc

SEQ ID NO: 40 - RNA, 19 nt, synthetic construct
  misc_feature 1..19: note = Description of Artificial Sequence: Synthetic oligonucleotide
  source 1..19: mol_type = other RNA
cctgtcagagactcaagct

SEQ ID NO: 41 - RNA, 19 nt, synthetic construct
  misc_feature 1..19: note = Description of Artificial Sequence: Synthetic oligonucleotide
  source 1..19: mol_type = other RNA
ctgtcagagactcaagctt

SEQ ID NO: 42 - RNA, 19 nt, synthetic construct
  misc_feature 1..19: note = Description of Artificial Sequence: Synthetic oligonucleotide
  source 1..19: mol_type = other RNA
tgtcagagactcaagcttt

SEQ ID NO: 43 - RNA, 19 nt, synthetic construct
  misc_feature 1..19: note = Description of Artificial Sequence: Synthetic oligonucleotide
  source 1..19: mol_type = other RNA
gtcagagactcaagctttg

SEQ ID NO: 44 - RNA, 19 nt, synthetic construct
  misc_feature 1..19: note = Description of Artificial Sequence: Synthetic oligonucleotide
  source 1..19: mol_type = other RNA
tcagagactcaagctttga

SEQ ID NO: 45 - RNA, 19 nt, synthetic construct
  misc_feature 1..19: note = Description of Artificial Sequence: Synthetic oligonucleotide
  source 1..19: mol_type = other RNA
cagagactcaagctttgag

SEQ ID NO: 46 - RNA, 19 nt, synthetic construct
  misc_feature 1..19: note = Description of Artificial Sequence: Synthetic oligonucleotide
  source 1..19: mol_type = other RNA
agagactcaagctttgaga

SEQ ID NO: 47 - RNA, 19 nt, synthetic construct
  misc_feature 1..19: note = Description of Artificial Sequence: Synthetic oligonucleotide
  source 1..19: mol_type = other RNA
gagactcaagctttgagaa

SEQ ID NO: 48 - RNA, 19 nt, synthetic construct
  misc_feature 1..19: note = Description of Artificial Sequence: Synthetic oligonucleotide
  source 1..19: mol_type = other RNA
agactcaagctttgagaaa

SEQ ID NO: 49 - RNA, 19 nt, synthetic construct
  misc_feature 1..19: note = Description of Artificial Sequence: Synthetic oligonucleotide
  source 1..19: mol_type = other RNA
gactcaagctttgagaaag

SEQ ID NO: 50 - RNA, 19 nt, synthetic construct
  misc_feature 1..19: note = Description of Artificial Sequence: Synthetic oligonucleotide
  source 1..19: mol_type = other RNA
actcaagctttgagaaagg

SEQ ID NO: 51 - RNA, 19 nt, synthetic construct
  misc_feature 1..19: note = Description of Artificial Sequence: Synthetic oligonucleotide
  source 1..19: mol_type = other RNA
ctcaagctttgagaaaggc

SEQ ID NO: 52 - RNA, 19 nt, synthetic construct
  misc_feature 1..19: note = Description of Artificial Sequence: Synthetic oligonucleotide
  source 1..19: mol_type = other RNA
tcaagctttgagaaaggct

SEQ ID NO: 53 - RNA, 19 nt, synthetic construct
  misc_feature 1..19: note = Description of Artificial Sequence: Synthetic oligonucleotide
  source 1..19: mol_type = other RNA
caagctttgagaaaggcta

SEQ ID NO: 54 - RNA, 19 nt, synthetic construct
  misc_feature 1..19: note = Description of Artificial Sequence: Synthetic oligonucleotide
  source 1..19: mol_type = other RNA
aagctttgagaaaggctag

SEQ ID NO: 55 - RNA, 19 nt, synthetic construct
  misc_feature 1..19: note = Description of Artificial Sequence: Synthetic oligonucleotide
  source 1..19: mol_type = other RNA
agctttgagaaaggctagc

SEQ ID NO: 56 - RNA, 19 nt, synthetic construct
  misc_feature 1..19: note = Description of Artificial Sequence: Synthetic oligonucleotide
  source 1..19: mol_type = other RNA
gctttgagaaaggctagca

SEQ ID NO: 57 - RNA, 19 nt, synthetic construct
  misc_feature 1..19: note = Description of Artificial Sequence: Synthetic oligonucleotide
  source 1..19: mol_type = other RNA
ctttgagaaaggctagcaa

SEQ ID NO: 58 - RNA, 19 nt, synthetic construct
  misc_feature 1..19: note = Description of Artificial Sequence: Synthetic oligonucleotide
  source 1..19: mol_type = other RNA
tttgagaaaggctagcaaa

SEQ ID NO: 59 - RNA, 19 nt, synthetic construct
  misc_feature 1..19: note = Description of Artificial Sequence: Synthetic oligonucleotide
  source 1..19: mol_type = other RNA
ttgagaaaggctagcaaag

SEQ ID NO: 60 - RNA, 19 nt, synthetic construct
  misc_feature 1..19: note = Description of Artificial Sequence: Synthetic oligonucleotide
  source 1..19: mol_type = other RNA
tgagaaaggctagcaaaga

SEQ ID NO: 61 - RNA, 19 nt, synthetic construct
  misc_feature 1..19: note = Description of Artificial Sequence: Synthetic oligonucleotide
  source 1..19: mol_type = other RNA
gagaaaggctagcaaagag

SEQ ID NO: 62 - RNA, 19 nt, synthetic construct
  misc_feature 1..19: note = Description of Artificial Sequence: Synthetic oligonucleotide
  source 1..19: mol_type = other RNA
agaaaggctagcaaagagc

SEQ ID NO: 63 - RNA, 19 nt, synthetic construct
  misc_feature 1..19: note = Description of Artificial Sequence: Synthetic oligonucleotide
  source 1..19: mol_type = other RNA
gaaaggctagcaaagagca

SEQ ID NO: 64 - RNA, 19 nt, synthetic construct
  misc_feature 1..19: note = Description of Artificial Sequence: Synthetic oligonucleotide
  source 1..19: mol_type = other RNA
aaaggctagcaaagagcaa

SEQ ID NO: 65 - RNA, 19 nt, synthetic construct
  misc_feature 1..19: note = Description of Artificial Sequence: Synthetic oligonucleotide
  source 1..19: mol_type = other RNA
aaggctagcaaagagcaag

SEQ ID NO: 66 - RNA, 19 nt, synthetic construct
  misc_feature 1..19: note = Description of Artificial Sequence: Synthetic oligonucleotide
  source 1..19: mol_type = other RNA
aggctagcaaagagcaagg

SEQ ID NO: 67 - RNA, 19 nt, synthetic construct
  misc_feature 1..19: note = Description of Artificial Sequence: Synthetic oligonucleotide
  source 1..19: mol_type = other RNA
ggctagcaaagagcaagga

SEQ ID NO: 68 - RNA, 19 nt, synthetic construct
  misc_feature 1..19: note = Description of Artificial Sequence: Synthetic oligonucleotide
  source 1..19: mol_type = other RNA
gctagcaaagagcaaggaa

SEQ ID NO: 69 - RNA, 19 nt, synthetic construct
  misc_feature 1..19: note = Description of Artificial Sequence: Synthetic oligonucleotide
  source 1..19: mol_type = other RNA
ctagcaaagagcaaggaaa

SEQ ID NO: 70 - RNA, 19 nt, synthetic construct
  misc_feature 1..19: note = Description of Artificial Sequence: Synthetic oligonucleotide
  source 1..19: mol_type = other RNA
tagcaaagagcaaggaaag

SEQ ID NO: 71 - RNA, 19 nt, synthetic construct
  misc_feature 1..19: note = Description of Artificial Sequence: Synthetic oligonucleotide
  source 1..19: mol_type = other RNA
agcaaagagcaaggaaaga

SEQ ID NO: 72 - RNA, 19 nt, synthetic construct
  misc_feature 1..19: note = Description of Artificial Sequence: Synthetic oligonucleotide
  source 1..19: mol_type = other RNA
gcaaagagcaaggaaagag

SEQ ID NO: 73 - RNA, 19 nt, synthetic construct
  misc_feature 1..19: note = Description of Artificial Sequence: Synthetic oligonucleotide
  source 1..19: mol_type = other RNA
caaagagcaaggaaagaga

SEQ ID NO: 74 - RNA, 19 nt, synthetic construct
  misc_feature 1..19: note = Description of Artificial Sequence: Synthetic oligonucleotide
  source 1..19: mol_type = other RNA
aaagagcaaggaaagagag

SEQ ID NO: 75 - RNA, 19 nt, synthetic construct
  misc_feature 1..19: note = Description of Artificial Sequence: Synthetic oligonucleotide
  source 1..19: mol_type = other RNA
aagagcaaggaaagagaga

SEQ ID NO: 76 - RNA, 19 nt, synthetic construct
  misc_feature 1..19: note = Description of Artificial Sequence: Synthetic oligonucleotide
  source 1..19: mol_type = other RNA
agagcaaggaaagagagaa

SEQ ID NO: 77 - RNA, 19 nt, synthetic construct
  misc_feature 1..19: note = Description of Artificial Sequence: Synthetic oligonucleotide
  source 1..19: mol_type = other RNA
gagcaaggaaagagagaaa

SEQ ID NO: 78 - RNA, 19 nt, synthetic construct
  misc_feature 1..19: note = Description of Artificial Sequence: Synthetic oligonucleotide
  source 1..19: mol_type = other RNA
agcaaggaaagagagaaaa

SEQ ID NO: 79 - RNA, 19 nt, synthetic construct
  misc_feature 1..19: note = Description of Artificial Sequence: Synthetic oligonucleotide
  source 1..19: mol_type = other RNA
gcaaggaaagagagaaaac

SEQ ID NO: 80 - RNA, 19 nt, synthetic construct
  misc_feature 1..19: note = Description of Artificial Sequence: Synthetic oligonucleotide
  source 1..19: mol_type = other RNA
caaggaaagagagaaaaca

SEQ ID NO: 81 - RNA, 19 nt, synthetic construct
  misc_feature 1..19: note = Description of Artificial Sequence: Synthetic oligonucleotide
  source 1..19: mol_type = other RNA
aaggaaagagagaaaacaa

SEQ ID NO: 82 - RNA, 19 nt, synthetic construct
  misc_feature 1..19: note = Description of Artificial Sequence: Synthetic oligonucleotide
  source 1..19: mol_type = other RNA
aggaaagagagaaaacaac

SEQ ID NO: 83 - RNA, 19 nt, synthetic construct
  misc_feature 1..19: note = Description of Artificial Sequence: Synthetic oligonucleotide
  source 1..19: mol_type = other RNA
ggaaagagagaaaacaaca

SEQ ID NO: 84 - RNA, 19 nt, synthetic construct
  misc_feature 1..19: note = Description of Artificial Sequence: Synthetic oligonucleotide
  source 1..19: mol_type = other RNA
gaaagagagaaaacaacaa

SEQ ID NO: 85 - RNA, 19 nt, synthetic construct
  misc_feature 1..19: note = Description of Artificial Sequence: Synthetic oligonucleotide
  source 1..19: mol_type = other RNA
aaagagagaaaacaacaaa

SEQ ID NO: 86 - RNA, 19 nt, synthetic construct
  misc_feature 1..19: note = Description of Artificial Sequence: Synthetic oligonucleotide
  source 1..19: mol_type = other RNA
aagagagaaaacaacaaag

SEQ ID NO: 87 - RNA, 19 nt, synthetic construct
  misc_feature 1..19: note = Description of Artificial Sequence: Synthetic oligonucleotide
  source 1..19: mol_type = other RNA
agagagaaaacaacaaagt

SEQ ID NO: 88 - RNA, 19 nt, synthetic construct
  misc_feature 1..19: note = Description of Artificial Sequence: Synthetic oligonucleotide
  source 1..19: mol_type = other RNA
gagagaaaacaacaaagtg

SEQ ID NO: 89 - RNA, 19 nt, synthetic construct
  misc_feature 1..19: note = Description of Artificial Sequence: Synthetic oligonucleotide
  source 1..19: mol_type = other RNA
agagaaaacaacaaagtgg

SEQ ID NO: 90 - RNA, 19 nt, synthetic construct
  misc_feature 1..19: note = Description of Artificial Sequence: Synthetic oligonucleotide
  source 1..19: mol_type = other RNA
gagaaaacaacaaagtggc

SEQ ID NO: 91 - RNA, 19 nt, synthetic construct
  misc_feature 1..19: note = Description of Artificial Sequence: Synthetic oligonucleotide
  source 1..19: mol_type = other RNA
agaaaacaacaaagtggcg

SEQ ID NO: 92 - RNA, 19 nt, synthetic construct
  misc_feature 1..19: note = Description of Artificial Sequence: Synthetic oligonucleotide
  source 1..19: mol_type = other RNA
gaaaacaacaaagtggcga

SEQ ID NO: 93 - RNA, 19 nt, synthetic construct
  misc_feature 1..19: note = Description of Artificial Sequence: Synthetic oligonucleotide
  source 1..19: mol_type = other RNA
aaaacaacaaagtggcgag

SEQ ID NO: 94 - RNA, 19 nt, synthetic construct
  misc_feature 1..19: note = Description of Artificial Sequence: Synthetic oligonucleotide
  source 1..19: mol_type = other RNA
aaacaacaaagtggcgagg

SEQ ID NO: 95 - RNA, 19 nt, synthetic construct
  misc_feature 1..19: note = Description of Artificial Sequence: Synthetic oligonucleotide
  source 1..19: mol_type = other RNA
aacaacaaagtggcgaggc

SEQ ID NO: 96 - RNA, 19 nt, synthetic construct
  misc_feature 1..19: note = Description of Artificial Sequence: Synthetic oligonucleotide
  source 1..19: mol_type = other RNA
acaacaaagtggcgaggcc

SEQ ID NO: 97 - RNA, 19 nt, synthetic construct
  misc_feature 1..19: note = Description of Artificial Sequence: Synthetic oligonucleotide
  source 1..19: mol_type = other RNA
caacaaagtggcgaggccc

SEQ ID NO: 98 - RNA, 19 nt, synthetic construct
  misc_feature 1..19: note = Description of Artificial Sequence: Synthetic oligonucleotide
  source 1..19: mol_type = other RNA
aacaaagtggcgaggccct

SEQ ID NO: 99 - RNA, 19 nt, synthetic construct
  misc_feature 1..19: note = Description of Artificial Sequence: Synthetic oligonucleotide
  source 1..19: mol_type = other RNA
acaaagtggcgaggccctc

SEQ ID NO: 100 - RNA, 19 nt, synthetic construct
  misc_feature 1..19: note = Description of Artificial Sequence: Synthetic oligonucleotide
  source 1..19: mol_type = other RNA
caaagtggcgaggccctca

SEQ ID NO: 101 - RNA, 19 nt, synthetic construct
  misc_feature 1..19: note = Description of Artificial Sequence: Synthetic oligonucleotide
  source 1..19: mol_type = other RNA
aaagtggcgaggccctcag

SEQ ID NO: 102 - RNA, 19 nt, synthetic construct
  misc_feature 1..19: note = Description of Artificial Sequence: Synthetic oligonucleotide
  source 1..19: mol_type = other RNA
aagtggcgaggccctcaga

SEQ ID NO: 103 - RNA, 19 nt, synthetic construct
  misc_feature 1..19: note = Description of Artificial Sequence: Synthetic oligonucleotide
  source 1..19: mol_type = other RNA
agtggcgaggccctcagag

SEQ ID NO: 104 - RNA, 19 nt, synthetic construct
  misc_feature 1..19: note = Description of Artificial Sequence: Synthetic oligonucleotide
  source 1..19: mol_type = other RNA
gtggcgaggccctcagagt

SEQ ID NO: 105 - RNA, 19 nt, synthetic construct
  misc_feature 1..19: note = Description of Artificial Sequence: Synthetic oligonucleotide
  source 1..19: mol_type = other RNA
tggcgaggccctcagagtg

SEQ ID NO: 106 - RNA, 19 nt, synthetic construct
  misc_feature 1..19: note = Description of Artificial Sequence: Synthetic oligonucleotide
  source 1..19: mol_type = other RNA
ggcgaggccctcagagtga

SEQ ID NO: 107 - RNA, 19 nt, synthetic construct
  misc_feature 1..19: note = Description of Artificial Sequence: Synthetic oligonucleotide
  source 1..19: mol_type = other RNA
gcgaggccctcagagtgaa

SEQ ID NO: 108 - RNA, 19 nt, synthetic construct
  misc_feature 1..19: note = Description of Artificial Sequence: Synthetic oligonucleotide
  source 1..19: mol_type = other RNA
cgaggccctcagagtgaaa

SEQ ID NO: 109 - RNA, 19 nt, synthetic construct
  misc_feature 1..19: note = Description of Artificial Sequence: Synthetic oligonucleotide
  source 1..19: mol_type = other RNA
gaggccctcagagtgaaag

SEQ ID NO: 110 - RNA, 19 nt, synthetic construct
  misc_feature 1..19: note = Description of Artificial Sequence: Synthetic oligonucleotide
  source 1..19: mol_type = other RNA
aggccctcagagtgaaagc

SEQ ID NO: 111 - RNA, 19 nt, synthetic construct
  misc_feature 1..19: note = Description of Artificial Sequence: Synthetic oligonucleotide
  source 1..19: mol_type = other RNA
ggccctcagagtgaaagcg

SEQ ID NO: 112 - RNA, 19 nt, synthetic construct
  misc_feature 1..19: note = Description of Artificial Sequence: Synthetic oligonucleotide
  source 1..19: mol_type = other RNA
gccctcagagtgaaagcgt

SEQ ID NO: 113 - RNA, 19 nt, synthetic construct
  misc_feature 1..19: note = Description of Artificial Sequence: Synthetic oligonucleotide
  source 1..19: mol_type = other RNA
ccctcagagtgaaagcgta

SEQ ID NO: 114 - RNA, 19 nt, synthetic construct
  misc_feature 1..19: note = Description of Artificial Sequence: Synthetic oligonucleotide
  source 1..19: mol_type = other RNA
cctcagagtgaaagcgtaa

SEQ ID NO: 115 - RNA, 19 nt, synthetic construct
  misc_feature 1..19: note = Description of Artificial Sequence: Synthetic oligonucleotide
  source 1..19: mol_type = other RNA
ctcagagtgaaagcgtaag

SEQ ID NO: 116 - RNA, 19 nt, synthetic construct
  misc_feature 1..19: note = Description of Artificial Sequence: Synthetic oligonucleotide
  source 1..19: mol_type = other RNA
tcagagtgaaagcgtaagg

SEQ ID NO: 117 - RNA, 19 nt, synthetic construct
  misc_feature 1..19: note = Description of Artificial Sequence: Synthetic oligonucleotide
  source 1..19: mol_type = other RNA
cagagtgaaagcgtaaggt

SEQ ID NO: 118 - RNA, 19 nt, synthetic construct
  misc_feature 1..19: note = Description of Artificial Sequence: Synthetic oligonucleotide
  source 1..19: mol_type = other RNA
agagtgaaagcgtaaggtt

SEQ ID NO: 119 - RNA, 19 nt, synthetic construct
  misc_feature 1..19: note = Description of Artificial Sequence: Synthetic oligonucleotide
  source 1..19: mol_type = other RNA
gagtgaaagcgtaaggttc

SEQ ID NO: 120 - RNA, 19 nt, synthetic construct
  misc_feature 1..19: note = Description of Artificial Sequence: Synthetic oligonucleotide
  source 1..19: mol_type = other RNA
agtgaaagcgtaaggttca

SEQ ID NO: 121 - RNA, 19 nt, synthetic construct
  misc_feature 1..19: note = Description of Artificial Sequence: Synthetic oligonucleotide
  source 1..19: mol_type = other RNA
gtgaaagcgtaaggttcag

SEQ ID NO: 122 - RNA, 19 nt, synthetic construct
  misc_feature 1..19: note = Description of Artificial Sequence: Synthetic oligonucleotide
  source 1..19: mol_type = other RNA
tgaaagcgtaaggttcagt

SEQ ID NO: 123 - RNA, 19 nt, synthetic construct
  misc_feature 1..19: note = Description of Artificial Sequence: Synthetic oligonucleotide
  source 1..19: mol_type = other RNA
gaaagcgtaaggttcagtc

SEQ ID NO: 124 - RNA, 19 nt, synthetic construct
  misc_feature 1..19: note = Description of Artificial Sequence: Synthetic oligonucleotide
  source 1..19: mol_type = other RNA
aaagcgtaaggttcagtca

SEQ ID NO: 125 - RNA, 19 nt, synthetic construct
  misc_feature 1..19: note = Description of Artificial Sequence: Synthetic oligonucleotide
  source 1..19: mol_type = other RNA
aagcgtaaggttcagtcag

SEQ ID NO: 126 - RNA, 19 nt, synthetic construct
  misc_feature 1..19: note = Description of Artificial Sequence: Synthetic oligonucleotide
  source 1..19: mol_type = other RNA
agcgtaaggttcagtcagc

SEQ ID NO: 127 - RNA, 19 nt, synthetic construct
  misc_feature 1..19: note = Description of Artificial Sequence: Synthetic oligonucleotide
  source 1..19: mol_type = other RNA
gcgtaaggttcagtcagcc

SEQ ID NO: 128 - RNA, 19 nt, synthetic construct
  misc_feature 1..19: note = Description of Artificial Sequence: Synthetic oligonucleotide
  source 1..19: mol_type = other RNA
cgtaaggttcagtcagcct

SEQ ID NO: 129 - RNA, 19 nt, synthetic construct
  misc_feature 1..19: note = Description of Artificial Sequence: Synthetic oligonucleotide
  source 1..19: mol_type = other RNA
gtaaggttcagtcagcctg

SEQ ID NO: 130 - RNA, 19 nt, synthetic construct
  misc_feature 1..19: note = Description of Artificial Sequence: Synthetic oligonucleotide
  source 1..19: mol_type = other RNA
taaggttcagtcagcctgc

SEQ ID NO: 131 - RNA, 19 nt, synthetic construct
  misc_feature 1..19: note = Description of Artificial Sequence: Synthetic oligonucleotide
  source 1..19: mol_type = other RNA
aaggttcagtcagcctgct

SEQ ID NO: 132 - RNA, 19 nt, synthetic construct
  misc_feature 1..19: note = Description of Artificial Sequence: Synthetic oligonucleotide
  source 1..19: mol_type = other RNA
aggttcagtcagcctgctg

SEQ ID NO: 133 - RNA, 19 nt, synthetic construct
  misc_feature 1..19: note = Description of Artificial Sequence: Synthetic oligonucleotide
  source 1..19: mol_type = other RNA
ggttcagtcagcctgctgc

SEQ ID NO: 134 - RNA, 19 nt, synthetic construct
  misc_feature 1..19: note = Description of Artificial Sequence: Synthetic oligonucleotide
  source 1..19: mol_type = other RNA
gttcagtcagcctgctgca

SEQ ID NO: 135 - RNA, 19 nt, synthetic construct
  misc_feature 1..19: note = Description of Artificial Sequence: Synthetic oligonucleotide
  source 1..19: mol_type = other RNA
ttcagtcagcctgctgcag

SEQ ID NO: 136 - RNA, 19 nt, synthetic construct
  misc_feature 1..19: note = Description of Artificial Sequence: Synthetic oligonucleotide
  source 1..19: mol_type = other RNA
tcagtcagcctgctgcagc

SEQ ID NO: 137 - RNA, 19 nt, synthetic construct
  misc_feature 1..19: note = Description of Artificial Sequence: Synthetic oligonucleotide
  source 1..19: mol_type = other RNA
cagtcagcctgctgcagct

SEQ ID NO: 138 - RNA, 19 nt, synthetic construct
  misc_feature 1..19: note = Description of Artificial Sequence: Synthetic oligonucleotide
  source 1..19: mol_type = other RNA
agtcagcctgctgcagctt

SEQ ID NO: 139 - RNA, 19 nt, synthetic construct
  misc_feature 1..19: note = Description of Artificial Sequence: Synthetic oligonucleotide
  source 1..19: mol_type = other RNA
gtcagcctgctgcagcttt

SEQ ID NO: 140 - RNA, 19 nt, synthetic construct
  misc_feature 1..19: note = Description of Artificial Sequence: Synthetic oligonucleotide
  source 1..19: mol_type = other RNA
tcagcctgctgcagctttg

SEQ ID NO: 141 - RNA, 19 nt, synthetic construct
  misc_feature 1..19: note = Description of Artificial Sequence: Synthetic oligonucleotide
  source 1..19: mol_type = other RNA
cagcctgctgcagctttgc

SEQ ID NO: 142 - RNA, 19 nt, synthetic construct
  misc_feature 1..19: note = Description of Artificial Sequence: Synthetic oligonucleotide
  source 1..19: mol_type = other RNA
agcctgctgcagctttgca

SEQ ID NO: 143 - RNA, 19 nt, synthetic construct
  misc_feature 1..19: note = Description of Artificial Sequence: Synthetic oligonucleotide
  source 1..19: mol_type = other RNA
gcctgctgcagctttgcag

SEQ ID NO: 144 - RNA, 19 nt, synthetic construct
  misc_feature 1..19: note = Description of Artificial Sequence: Synthetic oligonucleotide
  source 1..19: mol_type = other RNA
cctgctgcagctttgcaga

SEQ ID NO: 145 - RNA, 19 nt, synthetic construct
  misc_feature 1..19: note = Description of Artificial Sequence: Synthetic oligonucleotide
  source 1..19: mol_type = other RNA
ctgctgcagctttgcagac

SEQ ID NO: 146 - RNA, 19 nt, synthetic construct
  misc_feature 1..19: note = Description of Artificial Sequence: Synthetic oligonucleotide
  source 1..19: mol_type = other RNA
tgctgcagctttgcagacc

SEQ ID NO: 147 - RNA, 19 nt, synthetic construct
  misc_feature 1..19: note = Description of Artificial Sequence: Synthetic oligonucleotide
  source 1..19: mol_type = other RNA
gctgcagctttgcagacct

SEQ ID NO: 148 - RNA, 19 nt, synthetic construct
  misc_feature 1..19: note = Description of Artificial Sequence: Synthetic oligonucleotide
  source 1..19: mol_type = other RNA
ctgcagctttgcagacctc

SEQ ID NO: 149 - RNA, 19 nt, synthetic construct
  misc_feature 1..19: note = Description of Artificial Sequence: Synthetic oligonucleotide
  source 1..19: mol_type = other RNA
tgcagctttgcagacctca

SEQ ID NO: 150 - RNA, 19 nt, synthetic construct
  misc_feature 1..19: note = Description of Artificial Sequence: Synthetic oligonucleotide
  source 1..19: mol_type = other RNA
gcagctttgcagacctcag

SEQ ID NO: 151 - RNA, 19 nt, synthetic construct
  misc_feature 1..19: note = Description of Artificial Sequence: Synthetic oligonucleotide
  source 1..19: mol_type = other RNA
cagctttgcagacctcagc

SEQ ID NO: 152 - RNA, 19 nt, synthetic construct
  misc_feature 1..19: note = Description of Artificial Sequence: Synthetic oligonucleotide
  source 1..19: mol_type = other RNA
agctttgcagacctcagct

SEQ ID NO: 153 - RNA, 19 nt, synthetic construct
  misc_feature 1..19: note = Description of Artificial Sequence: Synthetic oligonucleotide
  source 1..19: mol_type = other RNA
gctttgcagacctcagctg

SEQ ID NO: 154 - RNA, 19 nt, synthetic construct
  misc_feature 1..19: note = Description of Artificial Sequence: Synthetic oligonucleotide
  source 1..19: mol_type = other RNA
ctttgcagacctcagctgg

SEQ ID NO: 155 - RNA, 19 nt, synthetic construct
  misc_feature 1..19: note = Description of Artificial Sequence: Synthetic oligonucleotide
  source 1..19: mol_type = other RNA
tttgcagacctcagctggg

SEQ ID NO: 156 - RNA, 19 nt, synthetic construct
  misc_feature 1..19: note = Description of Artificial Sequence: Synthetic oligonucleotide
  source 1..19: mol_type = other RNA
ttgcagacctcagctgggc

SEQ ID NO: 157 - RNA, 19 nt, synthetic construct
  misc_feature 1..19: note = Description of Artificial Sequence: Synthetic oligonucleotide
  source 1..19: mol_type = other RNA
tgcagacctcagctgggca

SEQ ID NO: 158 - RNA, 19 nt, synthetic construct
  misc_feature 1..19: note = Description of Artificial Sequence: Synthetic oligonucleotide
  source 1..19: mol_type = other RNA
gcagacctcagctgggcat

SEQ ID NO: 159 - RNA, 19 nt, synthetic construct
  misc_feature 1..19: note = Description of Artificial Sequence: Synthetic oligonucleotide
  source 1..19: mol_type = other RNA
cagacctcagctgggcatc

SEQ ID NO: 160 - RNA, 19 nt, synthetic construct
  misc_feature 1..19: note = Description of Artificial Sequence: Synthetic oligonucleotide
  source 1..19: mol_type = other RNA
agacctcagctgggcatct

SEQ ID NO: 161 - RNA, 19 nt, synthetic construct
  misc_feature 1..19: note = Description of Artificial Sequence: Synthetic oligonucleotide
  source 1..19: mol_type = other RNA
gacctcagctgggcatctc

SEQ ID NO: 162 - RNA, 19 nt, synthetic construct
  misc_feature 1..19: note = Description of Artificial Sequence: Synthetic oligonucleotide
  source 1..19: mol_type = other RNA
acctcagctgggcatctcc

SEQ ID NO: 163 - RNA, 19 nt, synthetic construct
  misc_feature 1..19: note = Description of Artificial Sequence: Synthetic oligonucleotide
  source 1..19: mol_type = other RNA
cctcagctgggcatctcca

SEQ ID NO: 164 - RNA, 19 nt, synthetic construct
  misc_feature 1..19: note = Description of Artificial Sequence: Synthetic oligonucleotide
  source 1..19: mol_type = other RNA
ctcagctgggcatctccag

SEQ ID NO: 165 - RNA, 19 nt, synthetic construct
  misc_feature 1..19: note = Description of Artificial Sequence: Synthetic oligonucleotide
  source 1..19: mol_type = other RNA
tcagctgggcatctccaga

SEQ ID NO: 166 - RNA, 19 nt, synthetic construct
  misc_feature 1..19: note = Description of Artificial Sequence: Synthetic oligonucleotide
  source 1..19: mol_type = other RNA
cagctgggcatctccagac

SEQ ID NO: 167 - RNA, 19 nt, synthetic construct
  misc_feature 1..19: note = Description of Artificial Sequence: Synthetic oligonucleotide
  source 1..19: mol_type = other RNA
agctgggcatctccagact

SEQ ID NO: 168 - RNA, 19 nt, synthetic construct
  misc_feature 1..19: note = Description of Artificial Sequence: Synthetic oligonucleotide
  source 1..19: mol_type = other RNA
gctgggcatctccagactc

SEQ ID NO: 169 - RNA, 19 nt, synthetic construct
  misc_feature 1..19: note = Description of Artificial Sequence: Synthetic oligonucleotide
  source 1..19: mol_type = other RNA
ctgggcatctccagactcc

SEQ ID NO: 170 - RNA, 19 nt, synthetic construct
  misc_feature 1..19: note = Description of Artificial Sequence: Synthetic oligonucleotide
  source 1..19: mol_type = other RNA
tgggcatctccagactccc

SEQ ID NO: 171 - RNA, 19 nt, synthetic construct
  misc_feature 1..19: note = Description of Artificial Sequence: Synthetic oligonucleotide
  source 1..19: mol_type = other RNA
gggcatctccagactcccc

SEQ ID NO: 172 - RNA, 19 nt, synthetic construct
  misc_feature 1..19: note = Description of Artificial Sequence: Synthetic oligonucleotide
  source 1..19: mol_type = other RNA
ggcatctccagactcccct

SEQ ID NO: 173 - RNA, 19 nt, synthetic construct
  misc_feature 1..19: note = Description of Artificial Sequence: Synthetic oligonucleotide
  source 1..19: mol_type = other RNA
gcatctccagactcccctg

SEQ ID NO: 174 - RNA, 19 nt, synthetic construct
  misc_feature 1..19: note = Description of Artificial Sequence: Synthetic oligonucleotide
  source 1..19: mol_type = other RNA
catctccagactcccctga

SEQ ID NO: 175 - RNA, 19 nt, synthetic construct
  misc_feature 1..19: note = Description of Artificial Sequence: Synthetic oligonucleotide
  source 1..19: mol_type = other RNA
atctccagactcccctgaa

SEQ ID NO: 176 - RNA, 19 nt, synthetic construct
  misc_feature 1..19: note = Description of Artificial Sequence: Synthetic oligonucleotide
  source 1..19: mol_type = other RNA
tctccagactcccctgaag

SEQ ID NO: 177 - RNA, 19 nt, synthetic construct
  misc_feature 1..19: note = Description of Artificial Sequence: Synthetic oligonucleotide
  source 1..19: mol_type = other RNA
ctccagactcccctgaagg

SEQ ID NO: 178 - RNA, 19 nt, synthetic construct
  misc_feature 1..19: note = Description of Artificial Sequence: Synthetic oligonucleotide
  source 1..19: mol_type = other RNA
tccagactcccctgaagga

SEQ ID NO: 179 - RNA, 19 nt, synthetic construct
  misc_feature 1..19: note = Description of Artificial Sequence: Synthetic oligonucleotide
  source 1..19: mol_type = other RNA
ccagactcccctgaaggaa

SEQ ID NO: 180 - RNA, 19 nt, synthetic construct
  misc_feature 1..19: note = Description of Artificial Sequence: Synthetic oligonucleotide
  source 1..19: mol_type = other RNA
cagactcccctgaaggaag

SEQ ID NO: 181 - RNA, 19 nt, synthetic construct
  misc_feature 1..19: note = Description of Artificial Sequence: Synthetic oligonucleotide
  source 1..19: mol_type = other RNA
agactcccctgaaggaaga

SEQ ID NO: 182 - RNA, 19 nt, synthetic construct
  misc_feature 1..19: note = Description of Artificial Sequence: Synthetic oligonucleotide
  source 1..19: mol_type = other RNA
gactcccctgaaggaagag

SEQ ID NO: 183 - RNA, 19 nt, synthetic construct
  misc_feature 1..19: note = Description of Artificial Sequence: Synthetic oligonucleotide
  source 1..19: mol_type = other RNA
actcccctgaaggaagagc

SEQ ID NO: 184 - RNA, 19 nt, synthetic construct
  misc_feature 1..19: note = Description of Artificial Sequence: Synthetic oligonucleotide
  source 1..19: mol_type = other RNA
ctcccctgaaggaagagcc

SEQ ID NO: 185 - RNA, 19 nt, synthetic construct
  misc_feature 1..19: note = Description of Artificial Sequence: Synthetic oligonucleotide
  source 1..19: mol_type = other RNA
tcccctgaaggaagagcct

SEQ ID NO: 186 - RNA, 19 nt, synthetic construct
  misc_feature 1..19: note = Description of Artificial Sequence: Synthetic oligonucleotide
  source 1..19: mol_type = other RNA
cccctgaaggaagagcctt

SEQ ID NO: 187 - RNA, 19 nt, synthetic construct
  misc_feature 1..19: note = Description of Artificial Sequence: Synthetic oligonucleotide
  source 1..19: mol_type = other RNA
ccctgaaggaagagccttc

SEQ ID NO: 188 - RNA, 19 nt, synthetic construct
  misc_feature 1..19: note = Description of Artificial Sequence: Synthetic oligonucleotide
  source 1..19: mol_type = other RNA
cctgaaggaagagccttcc

SEQ ID NO: 189 - RNA, 19 nt, synthetic construct
  misc_feature 1..19: note = Description of Artificial Sequence: Synthetic oligonucleotide
  source 1..19: mol_type = other RNA
ctgaaggaagagccttcct

SEQ ID NO: 190 - RNA, 19 nt, synthetic construct
  misc_feature 1..19: note = Description of Artificial Sequence: Synthetic oligonucleotide
  source 1..19: mol_type = other RNA
tgaaggaagagccttcctc

SEQ ID NO: 191 - RNA, 19 nt, synthetic construct
  misc_feature 1..19: note = Description of Artificial Sequence: Synthetic oligonucleotide
  source 1..19: mol_type = other RNA
gaaggaagagccttcctca

SEQ ID NO: 192 - RNA, 19 nt, synthetic construct
  misc_feature 1..19: note = Description of Artificial Sequence: Synthetic oligonucleotide
  source 1..19: mol_type = other RNA
aaggaagagccttcctcac

SEQ ID NO: 193 - RNA, 19 nt, synthetic construct
  misc_feature 1..19: note = Description of Artificial Sequence: Synthetic oligonucleotide
  source 1..19: mol_type = other RNA
aggaagagccttcctcacc

SEQ ID NO: 194 - RNA, 19 nt, synthetic construct
  misc_feature 1..19: note = Description of Artificial Sequence: Synthetic oligonucleotide
  source 1..19: mol_type = other RNA
ggaagagccttcctcaccc

SEQ ID NO: 195 - RNA, 19 nt, synthetic construct
  misc_feature 1..19: note = Description of Artificial Sequence: Synthetic oligonucleotide
  source 1..19: mol_type = other RNA
gaagagccttcctcaccca

SEQ ID NO: 196 - RNA, 19 nt, synthetic construct
  misc_feature 1..19: note = Description of Artificial Sequence: Synthetic oligonucleotide
  source 1..19: mol_type = other RNA
aagagccttcctcacccaa

SEQ ID NO: 197 - RNA, 19 nt, synthetic construct
  misc_feature 1..19: note = Description of Artificial Sequence: Synthetic oligonucleotide
  source 1..19: mol_type = other RNA
agagccttcctcacccaaa

SEQ ID NO: 198 - RNA, 19 nt, synthetic construct
  misc_feature 1..19: note = Description of Artificial Sequence: Synthetic oligonucleotide
  source 1..19: mol_type = other RNA
gagccttcctcacccaaac

SEQ ID NO: 199 - RNA, 19 nt, synthetic construct
  misc_feature 1..19: note = Description of Artificial Sequence: Synthetic oligonucleotide
  source 1..19: mol_type = other RNA
agccttcctcacccaaacc

SEQ ID NO: 200 - RNA, 19 nt, synthetic construct
  misc_feature 1..19: note = Description of Artificial Sequence: Synthetic oligonucleotide
  source 1..19: mol_type = other RNA
gccttcctcacccaaaccc

SEQ ID NO: 201 - RNA, 19 nt, synthetic construct
  misc_feature 1..19: note = Description of Artificial Sequence: Synthetic oligonucleotide
  source 1..19: mol_type = other RNA
ccttcctcacccaaaccca

SEQ ID NO: 202 - RNA, 19 nt, synthetic construct
  misc_feature 1..19: note = Description of Artificial Sequence: Synthetic oligonucleotide
  source 1..19: mol_type = other RNA
cttcctcacccaaacccac

SEQ ID NO: 203 - RNA, 19 nt, synthetic construct
  misc_feature 1..19: note = Description of Artificial Sequence: Synthetic oligonucleotide
  source 1..19: mol_type = other RNA
ttcctcacccaaacccaca

SEQ ID NO: 204 - RNA, 19 nt, synthetic construct
  misc_feature 1..19: note = Description of Artificial Sequence: Synthetic oligonucleotide
  source 1..19: mol_type = other RNA
tcctcacccaaacccacaa

SEQ ID NO: 205 - RNA, 19 nt, synthetic construct
  misc_feature 1..19: note = Description of Artificial Sequence: Synthetic oligonucleotide
  source 1..19: mol_type = other RNA
cctcacccaaacccacaaa

SEQ ID NO: 206 - RNA, 19 nt, synthetic construct
  misc_feature 1..19: note = Description of Artificial Sequence: Synthetic oligonucleotide
  source 1..19: mol_type = other RNA
ctcacccaaacccacaaaa

SEQ ID NO: 207 - RNA, 19 nt, synthetic construct
  misc_feature 1..19: note = Description of Artificial Sequence: Synthetic oligonucleotide
  source 1..19: mol_type = other RNA
tcacccaaacccacaaaag

SEQ ID NO: 208 - RNA, 19 nt, synthetic construct
  misc_feature 1..19: note = Description of Artificial Sequence: Synthetic oligonucleotide
  source 1..19: mol_type = other RNA
cacccaaacccacaaaaga

SEQ ID NO: 209 - RNA, 19 nt, synthetic construct
  misc_feature 1..19: note = Description of Artificial Sequence: Synthetic oligonucleotide
  source 1..19: mol_type = other RNA
acccaaacccacaaaagat

SEQ ID NO: 210 - RNA, 19 nt, synthetic construct
  misc_feature 1..19: note = Description of Artificial Sequence: Synthetic oligonucleotide
  source 1..19: mol_type = other RNA
cccaaacccacaaaagatg

SEQ ID NO: 211 - RNA, 19 nt, synthetic construct
  misc_feature 1..19: note = Description of Artificial Sequence: Synthetic oligonucleotide
  source 1..19: mol_type = other RNA
ccaaacccacaaaagatgc

SEQ ID NO: 212 - RNA, 19 nt, synthetic construct
  misc_feature 1..19: note = Description of Artificial Sequence: Synthetic oligonucleotide
  source 1..19: mol_type = other RNA
caaacccacaaaagatgct

SEQ ID NO: 213 - RNA, 19 nt, synthetic construct
  misc_feature 1..19: note = Description of Artificial Sequence: Synthetic oligonucleotide
  source 1..19: mol_type = other RNA
aaacccacaaaagatgctg

SEQ ID NO: 214 - RNA, 19 nt, synthetic construct
  misc_feature 1..19: note = Description of Artificial Sequence: Synthetic oligonucleotide
  source 1..19: mol_type = other RNA
aacccacaaaagatgctga

SEQ ID NO: 215 - RNA, 19 nt, synthetic construct
  misc_feature 1..19: note = Description of Artificial Sequence: Synthetic oligonucleotide
  source 1..19: mol_type = other RNA
acccacaaaagatgctgaa

SEQ ID NO: 216 - RNA, 19 nt, synthetic construct
  misc_feature 1..19: note = Description of Artificial Sequence: Synthetic oligonucleotide
  source 1..19: mol_type = other RNA
cccacaaaagatgctgaaa

SEQ ID NO: 217 - RNA, 19 nt, synthetic construct
  misc_feature 1..19: note = Description of Artificial Sequence: Synthetic oligonucleotide
  source 1..19: mol_type = other RNA
ccacaaaagatgctgaaaa

SEQ ID NO: 218 - RNA, 19 nt, synthetic construct
  misc_feature 1..19: note = Description of Artificial Sequence: Synthetic oligonucleotide
  source 1..19: mol_type = other RNA
cacaaaagatgctgaaaaa

SEQ ID NO: 219 - RNA, 19 nt, synthetic construct
  misc_feature 1..19: note = Description of Artificial Sequence: Synthetic oligonucleotide
  source 1..19: mol_type = other RNA
acaaaagatgctgaaaaag

SEQ ID NO: 220 - RNA, 19 nt, synthetic construct
  misc_feature 1..19: note = Description of Artificial Sequence: Synthetic oligonucleotide
  source 1..19: mol_type = other RNA
caaaagatgctgaaaaagc

SEQ ID NO: 221 - RNA, 19 nt, synthetic construct
  misc_feature 1..19: note = Description of Artificial Sequence: Synthetic oligonucleotide
  source 1..19: mol_type = other RNA
aaaagatgctgaaaaagcc

SEQ ID NO: 222 - RNA, 19 nt, synthetic construct
  misc_feature 1..19: note = Description of Artificial Sequence: Synthetic oligonucleotide
  source 1..19: mol_type = other RNA
aaagatgctgaaaaagcct

SEQ ID NO: 223 - RNA, 19 nt, synthetic construct
  misc_feature 1..19: note = Description of Artificial Sequence: Synthetic oligonucleotide
  source 1..19: mol_type = other RNA
aagatgctgaaaaagcctc

SEQ ID NO: 224 - RNA, 19 nt, synthetic construct
  misc_feature 1..19: note = Description of Artificial Sequence: Synthetic oligonucleotide
  source 1..19: mol_type = other RNA
agatgctgaaaaagcctct

SEQ ID NO: 225 - RNA, 19 nt, synthetic construct
  misc_feature 1..19: note = Description of Artificial Sequence: Synthetic oligonucleotide
  source 1..19: mol_type = other RNA
gatgctgaaaaagcctctc

SEQ ID NO: 226 - RNA, 19 nt, synthetic construct
  misc_feature 1..19: note = Description of Artificial Sequence: Synthetic oligonucleotide
  source 1..19: mol_type = other RNA
atgctgaaaaagcctctct

SEQ ID NO: 227 - RNA, 19 nt, synthetic construct
  misc_feature 1..19: note = Description of Artificial Sequence: Synthetic oligonucleotide
  source 1..19: mol_type = other RNA
tgctgaaaaagcctctctc

SEQ ID NO: 228 - RNA, 19 nt, synthetic construct
  misc_feature 1..19: note = Description of Artificial Sequence: Synthetic oligonucleotide
  source 1..19: mol_type = other RNA
gctgaaaaagcctctctca

SEQ ID NO: 229 - RNA, 19 nt, synthetic construct
  misc_feature 1..19: note = Description of Artificial Sequence: Synthetic oligonucleotide
  source 1..19: mol_type = other RNA
ctgaaaaagcctctctcag

SEQ ID NO: 230 - RNA, 19 nt, synthetic construct
  misc_feature 1..19: note = Description of Artificial Sequence: Synthetic oligonucleotide
  source 1..19: mol_type = other RNA
tgaaaaagcctctctcagc

SEQ ID NO: 231 - RNA, 19 nt, synthetic construct
  misc_feature 1..19: note = Description of Artificial Sequence: Synthetic oligonucleotide
  source 1..19: mol_type = other RNA
gaaaaagcctctctcagct

SEQ ID NO: 232 - RNA, 19 nt, synthetic construct
  misc_feature 1..19: note = Description of Artificial Sequence: Synthetic oligonucleotide
  source 1..19: mol_type = other RNA
aaaaagcctctctcagctg

SEQ ID NO: 233 - RNA, 19 nt, synthetic construct
  misc_feature 1..19: note = Description of Artificial Sequence: Synthetic oligonucleotide
  source 1..19: mol_type = other RNA
aaaagcctctctcagctgt

SEQ ID NO: 234 - RNA, 19 nt, synthetic construct
  misc_feature 1..19: note = Description of Artificial Sequence: Synthetic oligonucleotide
  source 1..19: mol_type = other RNA
aaagcctctctcagctgtg

SEQ ID NO: 235 - RNA, 19 nt, synthetic construct
  misc_feature 1..19: note = Description of Artificial Sequence: Synthetic oligonucleotide
  source 1..19: mol_type = other RNA
aagcctctctcagctgtga

SEQ ID NO: 236 - RNA, 19 nt, synthetic construct
  misc_feature 1..19: note = Description of Artificial Sequence: Synthetic oligonucleotide
  source 1..19: mol_type = other RNA
agcctctctcagctgtgac

SEQ ID NO: 237 - RNA, 19 nt, synthetic construct
  misc_feature 1..19: note = Description of Artificial Sequence: Synthetic oligonucleotide
  source 1..19: mol_type = other RNA
gcctctctcagctgtgacc

SEQ ID NO: 238 - RNA, 19 nt, synthetic construct
  misc_feature 1..19: note = Description of Artificial Sequence: Synthetic oligonucleotide
  source 1..19: mol_type = other RNA
cctctctcagctgtgacct

SEQ ID NO: 239 - RNA, 19 nt, synthetic construct
  misc_feature 1..19: note = Description of Artificial Sequence: Synthetic oligonucleotide
  source 1..19: mol_type = other RNA
ctctctcagctgtgacctg

SEQ ID NO: 240 - RNA, 19 nt, synthetic construct
  misc_feature 1..19: note = Description of Artificial Sequence: Synthetic oligonucleotide
  source 1..19: mol_type = other RNA
tctctcagctgtgacctgg

SEQ ID NO: 241 - RNA, 19 nt, synthetic construct
  misc_feature 1..19: note = Description of Artificial Sequence: Synthetic oligonucleotide
  source 1..19: mol_type = other RNA
ctctcagctgtgacctggc

SEQ ID NO: 242 - RNA, 19 nt, synthetic construct
  misc_feature 1..19: note = Description of Artificial Sequence: Synthetic oligonucleotide
  source 1..19: mol_type = other RNA
tctcagctgtgacctggct

SEQ ID NO: 243 - RNA, 19 nt, synthetic construct
  misc_feature 1..19: note = Description of Artificial Sequence: Synthetic oligonucleotide
  source 1..19: mol_type = other RNA
ctcagctgtgacctggctc

SEQ ID NO: 244 - RNA, 19 nt, synthetic construct
  misc_feature 1..19: note = Description of Artificial Sequence: Synthetic oligonucleotide
  source 1..19: mol_type = other RNA
tcagctgtgacctggctct

SEQ ID NO: 245 - RNA, 19 nt, synthetic construct
  misc_feature 1..19: note = Description of Artificial Sequence: Synthetic oligonucleotide
  source 1..19: mol_type = other RNA
cagctgtgacctggctctg

SEQ ID NO: 246 - RNA, 19 nt, synthetic construct
  misc_feature 1..19: note = Description of Artificial Sequence: Synthetic oligonucleotide
  source 1..19: mol_type = other RNA
agctgtgacctggctctgc

SEQ ID NO: 247 - RNA, 19 nt, synthetic construct
  misc_feature 1..19: note = Description of Artificial Sequence: Synthetic oligonucleotide
  source 1..19: mol_type = other RNA
gctgtgacctggctctgca

SEQ ID NO: 248 - RNA, 19 nt, synthetic construct
  misc_feature 1..19: note = Description of Artificial Sequence: Synthetic oligonucleotide
  source 1..19: mol_type = other RNA
ctgtgacctggctctgcat

SEQ ID NO: 249 - RNA, 19 nt, synthetic construct
  misc_feature 1..19: note = Description of Artificial Sequence: Synthetic oligonucleotide
  source 1..19: mol_type = other RNA
tgtgacctggctctgcatt

SEQ ID NO: 250 - RNA, 19 nt, synthetic construct
  misc_feature 1..19: note = Description of Artificial Sequence: Synthetic oligonucleotide
  source 1..19: mol_type = other RNA
gtgacctggctctgcattt

SEQ ID NO: 251 - RNA, 19 nt, synthetic construct
  misc_feature 1..19: note = Description of Artificial Sequence: Synthetic oligonucleotide
  source 1..19: mol_type = other RNA
tgacctggctctgcatttt

SEQ ID NO: 252 - RNA, 19 nt, synthetic construct
  misc_feature 1..19: note = Description of Artificial Sequence: Synthetic oligonucleotide
  source 1..19: mol_type = other RNA
gacctggctctgcattttc

SEQ ID NO: 253 - RNA, 19 nt, synthetic construct
  misc_feature 1..19: note = Description of Artificial Sequence: Synthetic oligonucleotide
  source 1..19: mol_type = other RNA
acctggctctgcattttca

SEQ ID NO: 254 - RNA, 19 nt, synthetic construct
  misc_feature 1..19: note = Description of Artificial Sequence: Synthetic oligonucleotide
  source 1..19: mol_type = other RNA
cctggctctgcattttcat

SEQ ID NO: 255 - RNA, 19 nt, synthetic construct
  misc_feature 1..19: note = Description of Artificial Sequence: Synthetic oligonucleotide
  source 1..19: mol_type = other RNA
ctggctctgcattttcatc

SEQ ID NO: 256 - RNA, 19 nt, synthetic construct
  misc_feature 1..19: note = Description of Artificial Sequence: Synthetic oligonucleotide
  source 1..19: mol_type = other RNA
tggctctgcattttcatcg

SEQ ID NO: 257 - RNA, 19 nt, synthetic construct
  misc_feature 1..19: note = Description of Artificial Sequence: Synthetic oligonucleotide
  source 1..19: mol_type = other RNA
ggctctgcattttcatcgt

SEQ ID NO: 258 - RNA, 19 nt, synthetic construct
  misc_feature 1..19: note = Description of Artificial Sequence: Synthetic oligonucleotide
  source 1..19: mol_type = other RNA
gctctgcattttcatcgtg

SEQ ID NO: 259 - RNA, 19 nt, synthetic construct
  misc_feature 1..19: note = Description of Artificial Sequence: Synthetic oligonucleotide
  source 1..19: mol_type = other RNA
ctctgcattttcatcgtgg

SEQ ID NO: 260 - RNA, 19 nt, synthetic construct
  misc_feature 1..19: note = Description of Artificial Sequence: Synthetic oligonucleotide
  source 1..19: mol_type = other RNA
tctgcattttcatcgtggc

SEQ ID NO: 261 - RNA, 19 nt, synthetic construct
  misc_feature 1..19: note = Description of Artificial Sequence: Synthetic oligonucleotide
  source 1..19: mol_type = other RNA
ctgcattttcatcgtggcc

SEQ ID NO: 262 - RNA, 19 nt, synthetic construct
  misc_feature 1..19: note = Description of Artificial Sequence: Synthetic oligonucleotide
  source 1..19: mol_type = other RNA
tgcattttcatcgtggcct

SEQ ID NO: 263 - RNA, 19 nt, synthetic construct
  misc_feature 1..19: note = Description of Artificial Sequence: Synthetic oligonucleotide
  source 1..19: mol_type = other RNA
gcattttcatcgtggcctt

SEQ ID NO: 264 - RNA, 19 nt, synthetic construct
  misc_feature 1..19: note = Description of Artificial Sequence: Synthetic oligonucleotide
  source 1..19: mol_type = other RNA
cattttcatcgtggccttt

SEQ ID NO: 265 - RNA, 19 nt, synthetic construct
  misc_feature 1..19: note = Description of Artificial Sequence: Synthetic oligonucleotide
  source 1..19: mol_type = other RNA
attttcatcgtggcctttg

SEQ ID NO: 266 - RNA, 19 nt, synthetic construct
  misc_feature 1..19: note = Description of Artificial Sequence: Synthetic oligonucleotide
  source 1..19: mol_type = other RNA
ttttcatcgtggcctttgt

SEQ ID NO: 267 - RNA, 19 nt, synthetic construct
  misc_feature 1..19: note = Description of Artificial Sequence: Synthetic oligonucleotide
  source 1..19: mol_type = other RNA
tttcatcgtggcctttgtc

SEQ ID NO: 268 - RNA, 19 nt, synthetic construct
  misc_feature 1..19: note = Description of Artificial Sequence: Synthetic oligonucleotide
  source 1..19: mol_type = other RNA
ttcatcgtggcctttgtca

SEQ ID NO: 269 - RNA, 19 nt, synthetic construct
  misc_feature 1..19: note = Description of Artificial Sequence: Synthetic oligonucleotide
  source 1..19: mol_type = other RNA
tcatcgtggcctttgtcag

SEQ ID NO: 270 - RNA, 19 nt, synthetic construct
  misc_feature 1..19: note = Description of Artificial Sequence: Synthetic oligonucleotide
  source 1..19: mol_type = other RNA
catcgtggcctttgtcagc

SEQ ID NO: 271 - RNA, 19 nt, synthetic construct
  misc_feature 1..19: note = Description of Artificial Sequence: Synthetic oligonucleotide
  source 1..19: mol_type = other RNA
atcgtggcctttgtcagcc

SEQ ID NO: 272 - RNA, 19 nt, synthetic construct
  misc_feature 1..19: note = Description of Artificial Sequence: Synthetic oligonucleotide
  source 1..19: mol_type = other RNA
tcgtggcctttgtcagcca

SEQ ID NO: 273 - RNA, 19 nt, synthetic construct
  misc_feature 1..19: note = Description of Artificial Sequence: Synthetic oligonucleotide
  source 1..19: mol_type = other RNA
cgtggcctttgtcagccac

SEQ ID NO: 274 - RNA, 19 nt, synthetic construct
  misc_feature 1..19: note = Description of Artificial Sequence: Synthetic oligonucleotide
  source 1..19: mol_type = other RNA
gtggcctttgtcagccacc

SEQ ID NO: 275 - RNA, 19 nt, synthetic construct
  misc_feature 1..19: note = Description of Artificial Sequence: Synthetic oligonucleotide
  source 1..19: mol_type = other RNA
tggcctttgtcagccaccc

SEQ ID NO: 276 - RNA, 19 nt, synthetic construct
  misc_feature 1..19: note = Description of Artificial Sequence: Synthetic oligonucleotide
  source 1..19: mol_type = other RNA
ggcctttgtcagccaccca

SEQ ID NO: 277 - RNA, 19 nt, synthetic construct
  misc_feature 1..19: note = Description of Artificial Sequence: Synthetic oligonucleotide
  source 1..19: mol_type = other RNA
gcctttgtcagccacccag

SEQ ID NO: 278 - RNA, 19 nt, synthetic construct
  misc_feature 1..19: note = Description of Artificial Sequence: Synthetic oligonucleotide
  source 1..19: mol_type = other RNA
cctttgtcagccacccagc

SEQ ID NO: 279 - RNA, 19 nt, synthetic construct
  misc_feature 1..19: note = Description of Artificial Sequence: Synthetic oligonucleotide
  source 1..19: mol_type = other RNA
ctttgtcagccacccagcg

SEQ ID NO: 280 - RNA, 19 nt, synthetic construct
  misc_feature 1..19: note = Description of Artificial Sequence: Synthetic oligonucleotide
  source 1..19: mol_type = other RNA
tttgtcagccacccagcgt

SEQ ID NO: 281 - RNA, 19 nt, synthetic construct
  misc_feature 1..19: note = Description of Artificial Sequence: Synthetic oligonucleotide
  source 1..19: mol_type = other RNA
ttgtcagccacccagcgtg

SEQ ID NO: 282 - RNA, 19 nt, synthetic construct
  misc_feature 1..19: note = Description of Artificial Sequence: Synthetic oligonucleotide
  source 1..19: mol_type = other RNA
tgtcagccacccagcgtgg

SEQ ID NO: 283 - RNA, 19 nt, synthetic construct
  misc_feature 1..19: note = Description of Artificial Sequence: Synthetic oligonucleotide
  source 1..19: mol_type = other RNA
gtcagccacccagcgtggc

SEQ ID NO: 284 - RNA, 19 nt, synthetic construct
  misc_feature 1..19: note = Description of Artificial Sequence: Synthetic oligonucleotide
  source 1..19: mol_type = other RNA
tcagccacccagcgtggct

SEQ ID NO: 285 - RNA, 19 nt, synthetic construct
  misc_feature 1..19: note = Description of Artificial Sequence: Synthetic oligonucleotide
  source 1..19: mol_type = other RNA
cagccacccagcgtggctg

SEQ ID NO: 286 - RNA, 19 nt, synthetic construct
  misc_feature 1..19: note = Description of Artificial Sequence: Synthetic oligonucleotide
  source 1..19: mol_type = other RNA
agccacccagcgtggctgc

SEQ ID NO: 287 - RNA, 19 nt, synthetic construct
  misc_feature 1..19: note = Description of Artificial Sequence: Synthetic oligonucleotide
  source 1..19: mol_type = other RNA
gccacccagcgtggctgca

SEQ ID NO: 288 - RNA, 19 nt, synthetic construct
  misc_feature 1..19: note = Description of Artificial Sequence: Synthetic oligonucleotide
  source 1..19: mol_type = other RNA
ccacccagcgtggctgcag

SEQ ID NO: 289 - RNA, 19 nt, synthetic construct
  misc_feature 1..19: note = Description of Artificial Sequence: Synthetic oligonucleotide
  source 1..19: mol_type = other RNA
cacccagcgtggctgcaga

SEQ ID NO: 290 - RNA, 19 nt, synthetic construct
  misc_feature 1..19: note = Description of Artificial Sequence: Synthetic oligonucleotide
  source 1..19: mol_type = other RNA
acccagcgtggctgcagaa

SEQ ID NO: 291 - RNA, 19 nt, synthetic construct
  misc_feature 1..19: note = Description of Artificial Sequence: Synthetic oligonucleotide
  source 1..19: mol_type = other RNA
cccagcgtggctgcagaag

SEQ ID NO: 292 - RNA, 19 nt, synthetic construct
  misc_feature 1..19: note = Description of Artificial Sequence: Synthetic oligonucleotide
  source 1..19: mol_type = other RNA
ccagcgtggctgcagaagc

SEQ ID NO: 293 - RNA, 19 nt, synthetic construct
  misc_feature 1..19: note = Description of Artificial Sequence: Synthetic oligonucleotide
  source 1..19: mol_type = other RNA
cagcgtggctgcagaagct

SEQ ID NO: 294 - RNA, 19 nt, synthetic construct
  misc_feature 1..19: note = Description of Artificial Sequence: Synthetic oligonucleotide
  source 1..19: mol_type = other RNA
agcgtggctgcagaagctc

SEQ ID NO: 295 - RNA, 19 nt, synthetic construct
  misc_feature 1..19: note = Description of Artificial Sequence: Synthetic oligonucleotide
  source 1..19: mol_type = other RNA
gcgtggctgcagaagctct

SEQ ID NO: 296 - RNA, 19 nt, synthetic construct
  misc_feature 1..19: note = Description of Artificial Sequence: Synthetic oligonucleotide
  source 1..19: mol_type = other RNA
cgtggctgcagaagctctc

SEQ ID NO: 297 - RNA, 19 nt, synthetic construct
  misc_feature 1..19: note = Description of Artificial Sequence: Synthetic oligonucleotide
  source 1..19: mol_type = other RNA
gtggctgcagaagctctct

SEQ ID NO: 298 - RNA, 19 nt, synthetic construct
  misc_feature 1..19: note = Description of Artificial Sequence: Synthetic oligonucleotide
  source 1..19: mol_type = other RNA
tggctgcagaagctctcta

SEQ ID NO: 299 - RNA, 19 nt, synthetic construct
  misc_feature 1..19: note = Description of Artificial Sequence: Synthetic oligonucleotide
  source 1..19: mol_type = other RNA
ggctgcagaagctctctaa

SEQ ID NO: 300 - RNA, 19 nt, synthetic construct
  misc_feature 1..19: note = Description of Artificial Sequence: Synthetic oligonucleotide
  source 1..19: mol_type = other RNA
gctgcagaagctctctaag

SEQ ID NO: 301 - RNA, 19 nt, synthetic construct
  misc_feature 1..19: note = Description of Artificial Sequence: Synthetic oligonucleotide
  source 1..19: mol_type = other RNA
ctgcagaagctctctaagc

SEQ ID NO: 302 - RNA, 19 nt, synthetic construct
  misc_feature 1..19: note = Description of Artificial Sequence: Synthetic oligonucleotide
  source 1..19: mol_type = other RNA
tgcagaagctctctaagca

SEQ ID NO: 303 - RNA, 19 nt, synthetic construct
  misc_feature 1..19: note = Description of Artificial Sequence: Synthetic oligonucleotide
  source 1..19: mol_type = other RNA
gcagaagctctctaagcac

SEQ ID NO: 304 - RNA, 19 nt, synthetic construct
  misc_feature 1..19: note = Description of Artificial Sequence: Synthetic oligonucleotide
  source 1..19: mol_type = other RNA
cagaagctctctaagcaca

SEQ ID NO: 305 - RNA, 19 nt, synthetic construct
  misc_feature 1..19: note = Description of Artificial Sequence: Synthetic oligonucleotide
  source 1..19: mol_type = other RNA
agaagctctctaagcacaa

SEQ ID NO: 306 - RNA, 19 nt, synthetic construct
  misc_feature 1..19: note = Description of Artificial Sequence: Synthetic oligonucleotide
  source 1..19: mol_type = other RNA
gaagctctctaagcacaag

SEQ ID NO: 307 - RNA, 19 nt, synthetic construct
  misc_feature 1..19: note = Description of Artificial Sequence: Synthetic oligonucleotide
  source 1..19: mol_type = other RNA
aagctctctaagcacaaga

SEQ ID NO: 308 - RNA, 19 nt, synthetic construct
  misc_feature 1..19: note = Description of Artificial Sequence: Synthetic oligonucleotide
  source 1..19: mol_type = other RNA
agctctctaagcacaagac

SEQ ID NO: 309 - RNA, 19 nt, synthetic construct
  misc_feature 1..19: note = Description of Artificial Sequence: Synthetic oligonucleotide
  source 1..19: mol_type = other RNA
gctctctaagcacaagaca

SEQ ID NO: 310 - RNA, 19 nt, synthetic construct
  misc_feature 1..19: note = Description of Artificial Sequence: Synthetic oligonucleotide
  source 1..19: mol_type = other RNA
ctctctaagcacaagacac

SEQ ID NO: 311 - RNA, 19 nt, synthetic construct
  misc_feature 1..19: note = Description of Artificial Sequence: Synthetic oligonucleotide
  source 1..19: mol_type = other RNA
tctctaagcacaagacacc

SEQ ID NO: 312 - RNA, 19 nt, synthetic construct
  misc_feature 1..19: note = Description of Artificial Sequence: Synthetic oligonucleotide
  source 1..19: mol_type = other RNA
ctctaagcacaagacacca

SEQ ID NO: 313 - RNA, 19 nt, synthetic construct
  misc_feature 1..19: note = Description of Artificial Sequence: Synthetic oligonucleotide
  source 1..19: mol_type = other RNA
tctaagcacaagacaccag

SEQ ID NO: 314 - RNA, 19 nt, synthetic construct
  misc_feature 1..19: note = Description of Artificial Sequence: Synthetic oligonucleotide
  source 1..19: mol_type = other RNA
ctaagcacaagacaccagc

SEQ ID NO: 315 - RNA, 19 nt, synthetic construct
  misc_feature 1..19: note = Description of Artificial Sequence: Synthetic oligonucleotide
  source 1..19: mol_type = other RNA
taagcacaagacaccagca

SEQ ID NO: 316 - RNA, 19 nt, synthetic construct
  misc_feature 1..19: note = Description of Artificial Sequence: Synthetic oligonucleotide
  source 1..19: mol_type = other RNA
aagcacaagacaccagcac

SEQ ID NO: 317 - RNA, 19 nt, synthetic construct
  misc_feature 1..19: note = Description of Artificial Sequence: Synthetic oligonucleotide
  source 1..19: mol_type = other RNA
agcacaagacaccagcaca

SEQ ID NO: 318 - RNA, 19 nt, synthetic construct
  misc_feature 1..19: note = Description of Artificial Sequence: Synthetic oligonucleotide
  source 1..19: mol_type = other RNA
gcacaagacaccagcacag

SEQ ID NO: 319 - RNA, 19 nt, synthetic construct
  misc_feature 1..19: note = Description of Artificial Sequence: Synthetic oligonucleotide
  source 1..19: mol_type = other RNA
cacaagacaccagcacagc

SEQ ID NO: 320 - RNA, 19 nt, synthetic construct
  misc_feature 1..19: note = Description of Artificial Sequence: Synthetic oligonucleotide
  source 1..19: mol_type = other RNA
acaagacaccagcacagcc

SEQ ID NO: 321 - RNA, 19 nt, synthetic construct
  misc_feature 1..19: note = Description of Artificial Sequence: Synthetic oligonucleotide
  source 1..19: mol_type = other RNA
caagacaccagcacagcca

SEQ ID NO: 322 - RNA, 19 nt, synthetic construct
  misc_feature 1..19: note = Description of Artificial Sequence: Synthetic oligonucleotide
  source 1..19: mol_type = other RNA
aagacaccagcacagccac

SEQ ID NO: 323 - RNA, 19 nt, synthetic construct
  misc_feature 1..19: note = Description of Artificial Sequence: Synthetic oligonucleotide
  source 1..19: mol_type = other RNA
agacaccagcacagccaca

SEQ ID NO: 324 - RNA, 19 nt, synthetic construct
  misc_feature 1..19: note = Description of Artificial Sequence: Synthetic oligonucleotide
  source 1..19: mol_type = other RNA
gacaccagcacagccacag

SEQ ID NO: 325 - RNA, 19 nt, synthetic construct
  misc_feature 1..19: note = Description of Artificial Sequence: Synthetic oligonucleotide
  source 1..19: mol_type = other RNA
acaccagcacagccacagc

SEQ ID NO: 326 - RNA, 19 nt, synthetic construct
  misc_feature 1..19: note = Description of Artificial Sequence: Synthetic oligonucleotide
  source 1..19: mol_type = other RNA
caccagcacagccacagct

SEQ ID NO: 327 - RNA, 19 nt, synthetic construct
  misc_feature 1..19: note = Description of Artificial Sequence: Synthetic oligonucleotide
  source 1..19: mol_type = other RNA
accagcacagccacagctc

SEQ ID NO: 328 - RNA, 19 nt, synthetic construct
  misc_feature 1..19: note = Description of Artificial Sequence: Synthetic oligonucleotide
  source 1..19: mol_type = other RNA
ccagcacagccacagctca

SEQ ID NO: 329 - RNA, 19 nt, synthetic construct
  misc_feature 1..19: note = Description of Artificial Sequence: Synthetic oligonucleotide
  source 1..19: mol_type = other RNA
cagcacagccacagctcaa

SEQ ID NO: 330 - RNA, 19 nt, synthetic construct
  misc_feature 1..19: note = Description of Artificial Sequence: Synthetic oligonucleotide
  source 1..19: mol_type = other RNA
agcacagccacagctcaaa

SEQ ID NO: 331 - RNA, 19 nt, synthetic construct
  misc_feature 1..19: note = Description of Artificial Sequence: Synthetic oligonucleotide
  source 1..19: mol_type = other RNA
gcacagccacagctcaaag

SEQ ID NO: 332 - RNA, 19 nt, synthetic construct
  misc_feature 1..19: note = Description of Artificial Sequence: Synthetic oligonucleotide
  source 1..19: mol_type = other RNA
cacagccacagctcaaagc

SEQ ID NO: 333 - RNA, 19 nt, synthetic construct
  misc_feature 1..19: note = Description of Artificial Sequence: Synthetic oligonucleotide
  source 1..19: mol_type = other RNA
acagccacagctcaaagcg

SEQ ID NO: 334 - RNA, 19 nt, synthetic construct
  misc_feature 1..19: note = Description of Artificial Sequence: Synthetic oligonucleotide
  source 1..19: mol_type = other RNA
cagccacagctcaaagcgg

SEQ ID NO: 335 - RNA, 19 nt, synthetic construct
  misc_feature 1..19: note = Description of Artificial Sequence: Synthetic oligonucleotide
  source 1..19: mol_type = other RNA
agccacagctcaaagcggc

SEQ ID NO: 336 - RNA, 19 nt, synthetic construct
  misc_feature 1..19: note = Description of Artificial Sequence: Synthetic oligonucleotide
  source 1..19: mol_type = other RNA
gccacagctcaaagcggcc

SEQ ID NO: 337 - RNA, 19 nt, synthetic construct
  misc_feature 1..19: note = Description of Artificial Sequence: Synthetic oligonucleotide
  source 1..19: mol_type = other RNA
ccacagctcaaagcggcca

SEQ ID NO: 338 - RNA, 19 nt, synthetic construct
  misc_feature 1..19: note = Description of Artificial Sequence: Synthetic oligonucleotide
  source 1..19: mol_type = other RNA
cacagctcaaagcggccaa

SEQ ID NO: 339 - RNA, 19 nt, synthetic construct
  misc_feature 1..19: note = Description of Artificial Sequence: Synthetic oligonucleotide
  source 1..19: mol_type = other RNA
acagctcaaagcggccaac

SEQ ID NO: 340 - RNA, 19 nt, synthetic construct
  misc_feature 1..19: note = Description of Artificial Sequence: Synthetic oligonucleotide
  source 1..19: mol_type = other RNA
cagctcaaagcggccaact

SEQ ID NO: 341 - RNA, 19 nt, synthetic construct
  misc_feature 1..19: note = Description of Artificial Sequence: Synthetic oligonucleotide
  source 1..19: mol_type = other RNA
agctcaaagcggccaactg

SEQ ID NO: 342 - RNA, 19 nt, synthetic construct
  misc_feature 1..19: note = Description of Artificial Sequence: Synthetic oligonucleotide
  source 1..19: mol_type = other RNA
gctcaaagcggccaactgc

SEQ ID NO: 343 - RNA, 19 nt, synthetic construct
  misc_feature 1..19: note = Description of Artificial Sequence: Synthetic oligonucleotide
  source 1..19: mol_type = other RNA
ctcaaagcggccaactgct

SEQ ID NO: 344 - RNA, 19 nt, synthetic construct
  misc_feature 1..19: note = Description of Artificial Sequence: Synthetic oligonucleotide
  source 1..19: mol_type = other RNA
tcaaagcggccaactgctg

SEQ ID NO: 345 - RNA, 19 nt, synthetic construct
  misc_feature 1..19: note = Description of Artificial Sequence: Synthetic oligonucleotide
  source 1..19: mol_type = other RNA
caaagcggccaactgctgt

SEQ ID NO: 346 - RNA, 19 nt, synthetic construct
  misc_feature 1..19: note = Description of Artificial Sequence: Synthetic oligonucleotide
  source 1..19: mol_type = other RNA
aaagcggccaactgctgtg

SEQ ID NO: 347 - RNA, 19 nt, synthetic construct
  misc_feature 1..19: note = Description of Artificial Sequence: Synthetic oligonucleotide
  source 1..19: mol_type = other RNA
aagcggccaactgctgtga

SEQ ID NO: 348 - RNA, 19 nt, synthetic construct
  misc_feature 1..19: note = Description of Artificial Sequence: Synthetic oligonucleotide
  source 1..19: mol_type = other RNA
agcggccaactgctgtgag

SEQ ID NO: 349 - RNA, 19 nt, synthetic construct
  misc_feature 1..19: note = Description of Artificial Sequence: Synthetic oligonucleotide
  source 1..19: mol_type = other RNA
gcggccaactgctgtgagg

SEQ ID NO: 350 - RNA, 19 nt, synthetic construct
  misc_feature 1..19: note = Description of Artificial Sequence: Synthetic oligonucleotide
  source 1..19: mol_type = other RNA
cggccaactgctgtgagga

SEQ ID NO: 351 - RNA, 19 nt, synthetic construct
  misc_feature 1..19: note = Description of Artificial Sequence: Synthetic oligonucleotide
  source 1..19: mol_type = other RNA
ggccaactgctgtgaggag

SEQ ID NO: 352 - RNA, 19 nt, synthetic construct
  misc_feature 1..19: note = Description of Artificial Sequence: Synthetic oligonucleotide
  source 1..19: mol_type = other RNA
gccaactgctgtgaggagg

SEQ ID NO: 353 - RNA, 19 nt, synthetic construct
  misc_feature 1..19: note = Description of Artificial Sequence: Synthetic oligonucleotide
  source 1..19: mol_type = other RNA
ccaactgctgtgaggaggt

SEQ ID NO: 354 - RNA, 19 nt, synthetic construct
  misc_feature 1..19: note = Description of Artificial Sequence: Synthetic oligonucleotide
  source 1..19: mol_type = other RNA
caactgctgtgaggaggtg

SEQ ID NO: 355 - RNA, 19 nt, synthetic construct
  misc_feature 1..19: note = Description of Artificial Sequence: Synthetic oligonucleotide
  source 1..19: mol_type = other RNA
aactgctgtgaggaggtga

SEQ ID NO: 356 - RNA, 19 nt, synthetic construct
  misc_feature 1..19: note = Description of Artificial Sequence: Synthetic oligonucleotide
  source 1..19: mol_type = other RNA
actgctgtgaggaggtgaa

SEQ ID NO: 357 - RNA, 19 nt, synthetic construct
  misc_feature 1..19: note = Description of Artificial Sequence: Synthetic oligonucleotide
  source 1..19: mol_type = other RNA
ctgctgtgaggaggtgaag

SEQ ID NO: 358 - RNA, 19 nt, synthetic construct
  misc_feature 1..19: note = Description of Artificial Sequence: Synthetic oligonucleotide
  source 1..19: mol_type = other RNA
tgctgtgaggaggtgaagg

SEQ ID NO: 359 - RNA, 19 nt, synthetic construct
  misc_feature 1..19: note = Description of Artificial Sequence: Synthetic oligonucleotide
  source 1..19: mol_type = other RNA
gctgtgaggaggtgaagga

SEQ ID NO: 360 - RNA, 19 nt, synthetic construct
  misc_feature 1..19: note = Description of Artificial Sequence: Synthetic oligonucleotide
  source 1..19: mol_type = other RNA
ctgtgaggaggtgaaggag

SEQ ID NO: 361 - RNA, 19 nt, synthetic construct
  misc_feature 1..19: note = Description of Artificial Sequence: Synthetic oligonucleotide
  source 1..19: mol_type = other RNA
tgtgaggaggtgaaggagc

SEQ ID NO: 362 - RNA, 19 nt, synthetic construct
  misc_feature 1..19: note = Description of Artificial Sequence: Synthetic oligonucleotide
  source 1..19: mol_type = other RNA
gtgaggaggtgaaggagct

SEQ ID NO: 363 - RNA, 19 nt, synthetic construct
  misc_feature 1..19: note = Description of Artificial Sequence: Synthetic oligonucleotide
  source 1..19: mol_type = other RNA
tgaggaggtgaaggagctc

SEQ ID NO: 364 - RNA, 19 nt, synthetic construct
  misc_feature 1..19: note = Description of Artificial Sequence: Synthetic oligonucleotide
  source 1..19: mol_type = other RNA
gaggaggtgaaggagctca

SEQ ID NO: 365 - RNA, 19 nt, synthetic construct
  misc_feature 1..19: note = Description of Artificial Sequence: Synthetic oligonucleotide
  source 1..19: mol_type = other RNA
aggaggtgaaggagctcaa

SEQ ID NO: 366 - RNA, 19 nt, synthetic construct
  misc_feature 1..19: note = Description of Artificial Sequence: Synthetic oligonucleotide
  source 1..19: mol_type = other RNA
ggaggtgaaggagctcaag

SEQ ID NO: 367 - RNA, 19 nt, synthetic construct
  misc_feature 1..19: note = Description of Artificial Sequence: Synthetic oligonucleotide
  source 1..19: mol_type = other RNA
gaggtgaaggagctcaagg

SEQ ID NO: 368 - RNA, 19 nt, synthetic construct
  misc_feature 1..19: note = Description of Artificial Sequence: Synthetic oligonucleotide
  source 1..19: mol_type = other RNA
aggtgaaggagctcaaggc

SEQ ID NO: 369 - RNA, 19 nt, synthetic construct
  misc_feature 1..19: note = Description of Artificial Sequence: Synthetic oligonucleotide
  source 1..19: mol_type = other RNA
ggtgaaggagctcaaggcc

SEQ ID NO: 370 - RNA, 19 nt, synthetic construct
  misc_feature 1..19: note = Description of Artificial Sequence: Synthetic oligonucleotide
  source 1..19: mol_type = other RNA
gtgaaggagctcaaggccc

SEQ ID NO: 371 - RNA, 19 nt, synthetic construct
  misc_feature 1..19: note = Description of Artificial Sequence: Synthetic oligonucleotide
  source 1..19: mol_type = other RNA
tgaaggagctcaaggccca

SEQ ID NO: 372 - RNA, 19 nt, synthetic construct
  misc_feature 1..19: note = Description of Artificial Sequence: Synthetic oligonucleotide
  source 1..19: mol_type = other RNA
gaaggagctcaaggcccaa

SEQ ID NO: 373 - RNA, 19 nt, synthetic construct
  misc_feature 1..19: note = Description of Artificial Sequence: Synthetic oligonucleotide
  source 1..19: mol_type = other RNA
aaggagctcaaggcccaag

SEQ ID NO: 374 - RNA, 19 nt, synthetic construct
  misc_feature 1..19: note = Description of Artificial Sequence: Synthetic oligonucleotide
  source 1..19: mol_type = other RNA
aggagctcaaggcccaagt

SEQ ID NO: 375 - RNA, 19 nt, synthetic construct
  misc_feature 1..19: note = Description of Artificial Sequence: Synthetic oligonucleotide
  source 1..19: mol_type = other RNA
ggagctcaaggcccaagtt

SEQ ID NO: 376 - RNA, 19 nt, synthetic construct
  misc_feature 1..19: note = Description of Artificial Sequence: Synthetic oligonucleotide
  source 1..19: mol_type = other RNA
gagctcaaggcccaagttg

SEQ ID NO: 377 - RNA, 19 nt, synthetic construct
  misc_feature 1..19: note = Description of Artificial Sequence: Synthetic oligonucleotide
  source 1..19: mol_type = other RNA
agctcaaggcccaagttgc

SEQ ID NO: 378 - RNA, 19 nt, synthetic construct
  misc_feature 1..19: note = Description of Artificial Sequence: Synthetic oligonucleotide
  source 1..19: mol_type = other RNA
gctcaaggcccaagttgcc

SEQ ID NO: 379 - RNA, 19 nt, synthetic construct
  misc_feature 1..19: note = Description of Artificial Sequence: Synthetic oligonucleotide
  source 1..19: mol_type = other RNA
ctcaaggcccaagttgcca

SEQ ID NO: 380 - RNA, 19 nt, synthetic construct
  misc_feature 1..19: note = Description of Artificial Sequence: Synthetic oligonucleotide
  source 1..19: mol_type = other RNA
tcaaggcccaagttgccaa

SEQ ID NO: 381 - RNA, 19 nt, synthetic construct
  misc_feature 1..19: note = Description of Artificial Sequence: Synthetic oligonucleotide
  source 1..19: mol_type = other RNA
caaggcccaagttgccaac

SEQ ID NO: 382 - RNA, 19 nt, synthetic construct
  misc_feature 1..19: note = Description of Artificial Sequence: Synthetic oligonucleotide
  source 1..19: mol_type = other RNA
aaggcccaagttgccaacc

SEQ ID NO: 383 - RNA, 19 nt, synthetic construct
  misc_feature 1..19: note = Description of Artificial Sequence: Synthetic oligonucleotide
  source 1..19: mol_type = other RNA
aggcccaagttgccaacct

SEQ ID NO: 384 - RNA, 19 nt, synthetic construct
  misc_feature 1..19: note = Description of Artificial Sequence: Synthetic oligonucleotide
  source 1..19: mol_type = other RNA
ggcccaagttgccaacctt

SEQ ID NO: 385 - RNA, 19 nt, synthetic construct
  misc_feature 1..19: note = Description of Artificial Sequence: Synthetic oligonucleotide
  source 1..19: mol_type = other RNA
gcccaagttgccaacctta

SEQ ID NO: 386 - RNA, 19 nt, synthetic construct
  misc_feature 1..19: note = Description of Artificial Sequence: Synthetic oligonucleotide
  source 1..19: mol_type = other RNA
cccaagttgccaaccttag

SEQ ID NO: 387 - RNA, 19 nt, synthetic construct
  misc_feature 1..19: note = Description of Artificial Sequence: Synthetic oligonucleotide
  source 1..19: mol_type = other RNA
ccaagttgccaaccttagc

SEQ ID NO: 388 - RNA, 19 nt, synthetic construct
  misc_feature 1..19: note = Description of Artificial Sequence: Synthetic oligonucleotide
  source 1..19: mol_type = other RNA
caagttgccaaccttagca

SEQ ID NO: 389 - RNA, 19 nt, synthetic construct
  misc_feature 1..19: note = Description of Artificial Sequence: Synthetic oligonucleotide
  source 1..19: mol_type = other RNA
aagttgccaaccttagcag

SEQ ID NO: 390 - RNA, 19 nt, synthetic construct
  misc_feature 1..19: note = Description of Artificial Sequence: Synthetic oligonucleotide
  source 1..19: mol_type = other RNA
agttgccaaccttagcagc

SEQ ID NO: 391 - RNA, 19 nt, synthetic construct
  misc_feature 1..19: note = Description of Artificial Sequence: Synthetic oligonucleotide
  source 1..19: mol_type = other RNA
gttgccaaccttagcagcc

SEQ ID NO: 392 - RNA, 19 nt, synthetic construct
  misc_feature 1..19: note = Description of Artificial Sequence: Synthetic oligonucleotide
  source 1..19: mol_type = other RNA
ttgccaaccttagcagcct

SEQ ID NO: 393 - RNA, 19 nt, synthetic construct
  misc_feature 1..19: note = Description of Artificial Sequence: Synthetic oligonucleotide
  source 1..19: mol_type = other RNA
tgccaaccttagcagcctg

SEQ ID NO: 394 - RNA, 19 nt, synthetic construct
  misc_feature 1..19: note = Description of Artificial Sequence: Synthetic oligonucleotide
  source 1..19: mol_type = other RNA
gccaaccttagcagcctgc

SEQ ID NO: 395 - RNA, 19 nt, synthetic construct
  misc_feature 1..19: note = Description of Artificial Sequence: Synthetic oligonucleotide
  source 1..19: mol_type = other RNA
ccaaccttagcagcctgct

SEQ ID NO: 396 - RNA, 19 nt, synthetic construct
  misc_feature 1..19: note = Description of Artificial Sequence: Synthetic oligonucleotide
  source 1..19: mol_type = other RNA
caaccttagcagcctgctg

SEQ ID NO: 397 - RNA, 19 nt, synthetic construct
  misc_feature 1..19: note = Description of Artificial Sequence: Synthetic oligonucleotide
  source 1..19: mol_type = other RNA
aaccttagcagcctgctga

SEQ ID NO: 398 - RNA, 19 nt, synthetic construct
  misc_feature 1..19: note = Description of Artificial Sequence: Synthetic oligonucleotide
  source 1..19: mol_type = other RNA
accttagcagcctgctgag

SEQ ID NO: 399 - RNA, 19 nt, synthetic construct
  misc_feature 1..19: note = Description of Artificial Sequence: Synthetic oligonucleotide
  source 1..19: mol_type = other RNA
ccttagcagcctgctgagt

SEQ ID NO: 400 - RNA, 19 nt, synthetic construct
  misc_feature 1..19: note = Description of Artificial Sequence: Synthetic oligonucleotide
  source 1..19: mol_type = other RNA
cttagcagcctgctgagtg

SEQ ID NO: 401 - RNA, 19 nt, synthetic construct
  misc_feature 1..19: note = Description of Artificial Sequence: Synthetic oligonucleotide
  source 1..19: mol_type = other RNA
ttagcagcctgctgagtga

SEQ ID NO: 402 - RNA, 19 nt, synthetic construct
  misc_feature 1..19: note = Description of Artificial Sequence: Synthetic oligonucleotide
  source 1..19: mol_type = other RNA
tagcagcctgctgagtgaa

SEQ ID NO: 403 - RNA, 19 nt, synthetic construct
  misc_feature 1..19: note = Description of Artificial Sequence: Synthetic oligonucleotide
  source 1..19: mol_type = other RNA
agcagcctgctgagtgaac

SEQ ID NO: 404 - RNA, 19 nt, synthetic construct
  misc_feature 1..19: note = Description of Artificial Sequence: Synthetic oligonucleotide
  source 1..19: mol_type = other RNA
gcagcctgctgagtgaact

SEQ ID NO: 405 - RNA, 19 nt, synthetic construct
  misc_feature 1..19: note = Description of Artificial Sequence: Synthetic oligonucleotide
  source 1..19: mol_type = other RNA
cagcctgctgagtgaactg

SEQ ID NO: 406 - RNA, 19 nt, synthetic construct
  misc_feature 1..19: note = Description of Artificial Sequence: Synthetic oligonucleotide
  source 1..19: mol_type = other RNA
agcctgctgagtgaactga

SEQ ID NO: 407 - RNA, 19 nt, synthetic construct
  misc_feature 1..19: note = Description of Artificial Sequence: Synthetic oligonucleotide
  source 1..19: mol_type = other RNA
gcctgctgagtgaactgaa

SEQ ID NO: 408 - RNA, 19 nt, synthetic construct
  misc_feature 1..19: note = Description of Artificial Sequence: Synthetic oligonucleotide
  source 1..19: mol_type = other RNA
cctgctgagtgaactgaac

SEQ ID NO: 409 - RNA, 19 nt, synthetic construct
  misc_feature 1..19: note = Description of Artificial Sequence: Synthetic oligonucleotide
  source 1..19: mol_type = other RNA
ctgctgagtgaactgaaca

SEQ ID NO: 410 - RNA, 19 nt, synthetic construct
  misc_feature 1..19: note = Description of Artificial Sequence: Synthetic oligonucleotide
  source 1..19: mol_type = other RNA
tgctgagtgaactgaacaa

SEQ ID NO: 411 - RNA, 19 nt, synthetic construct
  misc_feature 1..19: note = Description of Artificial Sequence: Synthetic oligonucleotide
  source 1..19: mol_type = other RNA
gctgagtgaactgaacaag

SEQ ID NO: 412 - RNA, 19 nt, synthetic construct
  misc_feature 1..19: note = Description of Artificial Sequence: Synthetic oligonucleotide
  source 1..19: mol_type = other RNA
ctgagtgaactgaacaaga

SEQ ID NO: 413 - RNA, 19 nt, synthetic construct
  misc_feature 1..19: note = Description of Artificial Sequence: Synthetic oligonucleotide
  source 1..19: mol_type = other RNA
tgagtgaactgaacaagaa

SEQ ID NO: 414 - RNA, 19 nt, synthetic construct
  misc_feature 1..19: note = Description of Artificial Sequence: Synthetic oligonucleotide
  source 1..19: mol_type = other RNA
gagtgaactgaacaagaag

SEQ ID NO: 415 - RNA, 19 nt, synthetic construct
  misc_feature 1..19: note = Description of Artificial Sequence: Synthetic oligonucleotide
  source 1..19: mol_type = other RNA
agtgaactgaacaagaagc

SEQ ID NO: 416 - RNA, 19 nt, synthetic construct
  misc_feature 1..19: note = Description of Artificial Sequence: Synthetic oligonucleotide
  source 1..19: mol_type = other RNA
gtgaactgaacaagaagca

SEQ ID NO: 417 - RNA, 19 nt, synthetic construct
  misc_feature 1..19: note = Description of Artificial Sequence: Synthetic oligonucleotide
  source 1..19: mol_type = other RNA
tgaactgaacaagaagcag

SEQ ID NO: 418 - RNA, 19 nt, synthetic construct
  misc_feature 1..19: note = Description of Artificial Sequence: Synthetic oligonucleotide
  source 1..19: mol_type = other RNA
gaactgaacaagaagcagg

SEQ ID NO: 419 - RNA, 19 nt, synthetic construct
  misc_feature 1..19: note = Description of Artificial Sequence: Synthetic oligonucleotide
  source 1..19: mol_type = other RNA
aactgaacaagaagcagga

SEQ ID NO: 420 - RNA, 19 nt, synthetic construct
  misc_feature 1..19: note = Description of Artificial Sequence: Synthetic oligonucleotide
  source 1..19: mol_type = other RNA
actgaacaagaagcaggag

SEQ ID NO: 421 - RNA, 19 nt, synthetic construct
  misc_feature 1..19: note = Description of Artificial Sequence: Synthetic oligonucleotide
  source 1..19: mol_type = other RNA
ctgaacaagaagcaggaga

SEQ ID NO: 422 - RNA, 19 nt, synthetic construct
  misc_feature 1..19: note = Description of Artificial Sequence: Synthetic oligonucleotide
  source 1..19: mol_type = other RNA
tgaacaagaagcaggagag

SEQ ID NO: 423 - RNA, 19 nt, synthetic construct
  misc_feature 1..19: note = Description of Artificial Sequence: Synthetic oligonucleotide
  source 1..19: mol_type = other RNA
gaacaagaagcaggagagg

SEQ ID NO: 424 - RNA, 19 nt, synthetic construct
  misc_feature 1..19: note = Description of Artificial Sequence: Synthetic oligonucleotide
  source 1..19: mol_type = other RNA
aacaagaagcaggagaggg

SEQ ID NO: 425 - RNA, 19 nt, synthetic construct
  misc_feature 1..19: note = Description of Artificial Sequence: Synthetic oligonucleotide
  source 1..19: mol_type = other RNA
acaagaagcaggagaggga

SEQ ID NO: 426 - RNA, 19 nt, synthetic construct
  misc_feature 1..19: note = Description of Artificial Sequence: Synthetic oligonucleotide
  source 1..19: mol_type = other RNA
caagaagcaggagagggac

SEQ ID NO: 427 - RNA, 19 nt, synthetic construct
  misc_feature 1..19: note = Description of Artificial Sequence: Synthetic oligonucleotide
  source 1..19: mol_type = other RNA
aagaagcaggagagggact

SEQ ID NO: 428 - RNA, 19 nt, synthetic construct
  misc_feature 1..19: note = Description of Artificial Sequence: Synthetic oligonucleotide
  source 1..19: mol_type = other RNA
agaagcaggagagggactg

SEQ ID NO: 429 - RNA, 19 nt, synthetic construct
  misc_feature 1..19: note = Description of Artificial Sequence: Synthetic oligonucleotide
  source 1..19: mol_type = other RNA
gaagcaggagagggactgg

SEQ ID NO: 430 - RNA, 19 nt, synthetic construct
  misc_feature 1..19: note = Description of Artificial Sequence: Synthetic oligonucleotide
  source 1..19: mol_type = other RNA
aagcaggagagggactggg

SEQ ID NO: 431 - RNA, 19 nt, synthetic construct
  misc_feature 1..19: note = Description of Artificial Sequence: Synthetic oligonucleotide
  source 1..19: mol_type = other RNA
agcaggagagggactgggt

SEQ ID NO: 432 - RNA, 19 nt, synthetic construct
  misc_feature 1..19: note = Description of Artificial Sequence: Synthetic oligonucleotide
  source 1..19: mol_type = other RNA
gcaggagagggactgggtc

SEQ ID NO: 433 - RNA, 19 nt, synthetic construct
  misc_feature 1..19: note = Description of Artificial Sequence: Synthetic oligonucleotide
  source 1..19: mol_type = other RNA
caggagagggactgggtca

SEQ ID NO: 434 - RNA, 19 nt, synthetic construct
  misc_feature 1..19: note = Description of Artificial Sequence: Synthetic oligonucleotide
  source 1..19: mol_type = other RNA
aggagagggactgggtcag

SEQ ID NO: 435 - RNA, 19 nt, synthetic construct
  misc_feature 1..19: note = Description of Artificial Sequence: Synthetic oligonucleotide
  source 1..19: mol_type = other RNA
ggagagggactgggtcagc

SEQ ID NO: 436 - RNA, 19 nt, synthetic construct
  misc_feature 1..19: note = Description of Artificial Sequence: Synthetic oligonucleotide
  source 1..19: mol_type = other RNA
gagagggactgggtcagcg

SEQ ID NO: 437 - RNA, 19 nt, synthetic construct
  misc_feature 1..19: note = Description of Artificial Sequence: Synthetic oligonucleotide
  source 1..19: mol_type = other RNA
agagggactgggtcagcgt

SEQ ID NO: 438 - RNA, 19 nt, synthetic construct
  misc_feature 1..19: note = Description of Artificial Sequence: Synthetic oligonucleotide
  source 1..19: mol_type = other RNA
gagggactgggtcagcgtg

SEQ ID NO: 439 - RNA, 19 nt, synthetic construct
  misc_feature 1..19: note = Description of Artificial Sequence: Synthetic oligonucleotide
  source 1..19: mol_type = other RNA
agggactgggtcagcgtgg

SEQ ID NO: 440 - RNA, 19 nt, synthetic construct
  misc_feature 1..19: note = Description of Artificial Sequence: Synthetic oligonucleotide
  source 1..19: mol_type = other RNA
gggactgggtcagcgtggt

SEQ ID NO: 441 - RNA, 19 nt, synthetic construct
  misc_feature 1..19: note = Description of Artificial Sequence: Synthetic oligonucleotide
  source 1..19: mol_type = other RNA
ggactgggtcagcgtggtc

SEQ ID NO: 442 - RNA, 19 nt, synthetic construct
  misc_feature 1..19: note = Description of Artificial Sequence: Synthetic oligonucleotide
  source 1..19: mol_type = other RNA
gactgggtcagcgtggtca

SEQ ID NO: 443 - RNA, 19 nt, synthetic construct
  misc_feature 1..19: note = Description of Artificial Sequence: Synthetic oligonucleotide
  source 1..19: mol_type = other RNA
actgggtcagcgtggtcat

SEQ ID NO: 444 - RNA, 19 nt, synthetic construct
  misc_feature 1..19: note = Description of Artificial Sequence: Synthetic oligonucleotide
  source 1..19: mol_type = other RNA
ctgggtcagcgtggtcatg

SEQ ID NO: 445 - RNA, 19 nt, synthetic construct
  misc_feature 1..19: note = Description of Artificial Sequence: Synthetic oligonucleotide
  source 1..19: mol_type = other RNA
tgggtcagcgtggtcatgc

SEQ ID NO: 446 - RNA, 19 nt, synthetic construct
  misc_feature 1..19: note = Description of Artificial Sequence: Synthetic oligonucleotide
  source 1..19: mol_type = other RNA
gggtcagcgtggtcatgca

SEQ ID NO: 447 - RNA, 19 nt, synthetic construct
  misc_feature 1..19: note = Description of Artificial Sequence: Synthetic oligonucleotide
  source 1..19: mol_type = other RNA
ggtcagcgtggtcatgcag

SEQ ID NO: 448 - RNA, 19 nt, synthetic construct
  misc_feature 1..19: note = Description of Artificial Sequence: Synthetic oligonucleotide
  source 1..19: mol_type = other RNA
gtcagcgtggtcatgcagg

SEQ ID NO: 449 - RNA, 19 nt, synthetic construct
  misc_feature 1..19: note = Description of Artificial Sequence: Synthetic oligonucleotide
  source 1..19: mol_type = other RNA
tcagcgtggtcatgcaggt

SEQ ID NO: 450 - RNA, 19 nt, synthetic construct
  misc_feature 1..19: note = Description of Artificial Sequence: Synthetic oligonucleotide
  source 1..19: mol_type = other RNA
cagcgtggtcatgcaggtg

SEQ ID NO: 451 - RNA, 19 nt, synthetic construct
  misc_feature 1..19: note = Description of Artificial Sequence: Synthetic oligonucleotide
  source 1..19: mol_type = other RNA
agcgtggtcatgcaggtga

SEQ ID NO: 452 - RNA, 19 nt, synthetic construct
  misc_feature 1..19: note = Description of Artificial Sequence: Synthetic oligonucleotide
  source 1..19: mol_type = other RNA
gcgtggtcatgcaggtgat

SEQ ID NO: 453 - RNA, 19 nt, synthetic construct
  misc_feature 1..19: note = Description of Artificial Sequence: Synthetic oligonucleotide
  source 1..19: mol_type = other RNA
cgtggtcatgcaggtgatg

SEQ ID NO: 454 - RNA, 19 nt, synthetic construct
  misc_feature 1..19: note = Description of Artificial Sequence: Synthetic oligonucleotide
  source 1..19: mol_type = other RNA
gtggtcatgcaggtgatgg

SEQ ID NO: 455 - RNA, 19 nt, synthetic construct
  misc_feature 1..19: note = Description of Artificial Sequence: Synthetic oligonucleotide
  source 1..19: mol_type = other RNA
tggtcatgcaggtgatgga

SEQ ID NO: 456 - RNA, 19 nt, synthetic construct
  misc_feature 1..19: note = Description of Artificial Sequence: Synthetic oligonucleotide
  source 1..19: mol_type = other RNA
ggtcatgcaggtgatggag

SEQ ID NO: 457 - RNA, 19 nt, synthetic construct
  misc_feature 1..19: note = Description of Artificial Sequence: Synthetic oligonucleotide
  source 1..19: mol_type = other RNA
gtcatgcaggtgatggagc

SEQ ID NO: 458 - RNA, 19 nt, synthetic construct
  misc_feature 1..19: note = Description of Artificial Sequence: Synthetic oligonucleotide
  source 1..19: mol_type = other RNA
tcatgcaggtgatggagct

SEQ ID NO: 459 - RNA, 19 nt, synthetic construct
  misc_feature 1..19: note = Description of Artificial Sequence: Synthetic oligonucleotide
  source 1..19: mol_type = other RNA
catgcaggtgatggagctg

SEQ ID NO: 460 - RNA, 19 nt, synthetic construct
  misc_feature 1..19: note = Description of Artificial Sequence: Synthetic oligonucleotide
  source 1..19: mol_type = other RNA
atgcaggtgatggagctgg

SEQ ID NO: 461 - RNA, 19 nt, synthetic construct
  misc_feature 1..19: note = Description of Artificial Sequence: Synthetic oligonucleotide
  source 1..19: mol_type = other RNA
tgcaggtgatggagctgga

SEQ ID NO: 462 - RNA, 19 nt, synthetic construct
  misc_feature 1..19: note = Description of Artificial Sequence: Synthetic oligonucleotide
  source 1..19: mol_type = other RNA
gcaggtgatggagctggag

SEQ ID NO: 463 - RNA, 19 nt, synthetic construct
  misc_feature 1..19: note = Description of Artificial Sequence: Synthetic oligonucleotide
  source 1..19: mol_type = other RNA
caggtgatggagctggaga

SEQ ID NO: 464 - RNA, 19 nt, synthetic construct
  misc_feature 1..19: note = Description of Artificial Sequence: Synthetic oligonucleotide
  source 1..19: mol_type = other RNA
aggtgatggagctggagag

SEQ ID NO: 465 - RNA, 19 nt, synthetic construct
  misc_feature 1..19: note = Description of Artificial Sequence: Synthetic oligonucleotide
  source 1..19: mol_type = other RNA
ggtgatggagctggagagc

SEQ ID NO: 466 - RNA, 19 nt, synthetic construct
  misc_feature 1..19: note = Description of Artificial Sequence: Synthetic oligonucleotide
  source 1..19: mol_type = other RNA
gtgatggagctggagagca

SEQ ID NO: 467 - RNA, 19 nt, synthetic construct
  misc_feature 1..19: note = Description of Artificial Sequence: Synthetic oligonucleotide
  source 1..19: mol_type = other RNA
tgatggagctggagagcaa

SEQ ID NO: 468 - RNA, 19 nt, synthetic construct
  misc_feature 1..19: note = Description of Artificial Sequence: Synthetic oligonucleotide
  source 1..19: mol_type = other RNA
gatggagctggagagcaac

SEQ ID NO: 469 - RNA, 19 nt, synthetic construct
  misc_feature 1..19: note = Description of Artificial Sequence: Synthetic oligonucleotide
  source 1..19: mol_type = other RNA
atggagctggagagcaaca

SEQ ID NO: 470 - RNA, 19 nt, synthetic construct
  misc_feature 1..19: note = Description of Artificial Sequence: Synthetic oligonucleotide
  source 1..19: mol_type = other RNA
tggagctggagagcaacag

SEQ ID NO: 471 - RNA, 19 nt, synthetic construct
  misc_feature 1..19: note = Description of Artificial Sequence: Synthetic oligonucleotide
  source 1..19: mol_type = other RNA
ggagctggagagcaacagc

SEQ ID NO: 472 - RNA, 19 nt, synthetic construct
  misc_feature 1..19: note = Description of Artificial Sequence: Synthetic oligonucleotide
  source 1..19: mol_type = other RNA
gagctggagagcaacagca

SEQ ID NO: 473 - RNA, 19 nt, synthetic construct
  misc_feature 1..19: note = Description of Artificial Sequence: Synthetic oligonucleotide
  source 1..19: mol_type = other RNA
agctggagagcaacagcaa

SEQ ID NO: 474 - RNA, 19 nt, synthetic construct
  misc_feature 1..19: note = Description of Artificial Sequence: Synthetic oligonucleotide
  source 1..19: mol_type = other RNA
gctggagagcaacagcaag

SEQ ID NO: 475 - RNA, 19 nt, synthetic construct
  misc_feature 1..19: note = Description of Artificial Sequence: Synthetic oligonucleotide
  source 1..19: mol_type = other RNA
ctggagagcaacagcaagc

SEQ ID NO: 476 - RNA, 19 nt, synthetic construct
  misc_feature 1..19: note = Description of Artificial Sequence: Synthetic oligonucleotide
  source 1..19: mol_type = other RNA
tggagagcaacagcaagcg

SEQ ID NO: 477 - RNA, 19 nt, synthetic construct
  misc_feature 1..19: note = Description of Artificial Sequence: Synthetic oligonucleotide
  source 1..19: mol_type = other RNA
ggagagcaacagcaagcgc

SEQ ID NO: 478 - RNA, 19 nt, synthetic construct
  misc_feature 1..19: note = Description of Artificial Sequence: Synthetic oligonucleotide
  source 1..19: mol_type = other RNA
gagagcaacagcaagcgca

SEQ ID NO: 479 - RNA, 19 nt, synthetic construct
  misc_feature 1..19: note = Description of Artificial Sequence: Synthetic oligonucleotide
  source 1..19: mol_type = other RNA
agagcaacagcaagcgcat

SEQ ID NO: 480 - RNA, 19 nt, synthetic construct
  misc_feature 1..19: note = Description of Artificial Sequence: Synthetic oligonucleotide
  source 1..19: mol_type = other RNA
gagcaacagcaagcgcatg

SEQ ID NO: 481 - RNA, 19 nt, synthetic construct
  misc_feature 1..19: note = Description of Artificial Sequence: Synthetic oligonucleotide
  source 1..19: mol_type = other RNA
agcaacagcaagcgcatgg

SEQ ID NO: 482 - RNA, 19 nt, synthetic construct
  misc_feature 1..19: note = Description of Artificial Sequence: Synthetic oligonucleotide
  source 1..19: mol_type = other RNA
gcaacagcaagcgcatgga

SEQ ID NO: 483 - RNA, 19 nt, synthetic construct
  misc_feature 1..19: note = Description of Artificial Sequence: Synthetic oligonucleotide
  source 1..19: mol_type = other RNA
caacagcaagcgcatggag

SEQ ID NO: 484 - RNA, 19 nt, synthetic construct
  misc_feature 1..19: note = Description of Artificial Sequence: Synthetic oligonucleotide
  source 1..19: mol_type = other RNA
aacagcaagcgcatggagt

SEQ ID NO: 485 - RNA, 19 nt, synthetic construct
  misc_feature 1..19: note = Description of Artificial Sequence: Synthetic oligonucleotide
  source 1..19: mol_type = other RNA
acagcaagcgcatggagtc

SEQ ID NO: 486 - RNA, 19 nt, synthetic construct
  misc_feature 1..19: note = Description of Artificial Sequence: Synthetic oligonucleotide
  source 1..19: mol_type = other RNA
cagcaagcgcatggagtcg

SEQ ID NO: 487 - RNA, 19 nt, synthetic construct
  misc_feature 1..19: note = Description of Artificial Sequence: Synthetic oligonucleotide
  source 1..19: mol_type = other RNA
agcaagcgcatggagtcgc

SEQ ID NO: 488 - RNA, 19 nt, synthetic construct
  misc_feature 1..19: note = Description of Artificial Sequence: Synthetic oligonucleotide
  source 1..19: mol_type = other RNA
gcaagcgcatggagtcgcg

SEQ ID NO: 489 - RNA, 19 nt, synthetic construct
  misc_feature 1..19: note = Description of Artificial Sequence: Synthetic oligonucleotide
  source 1..19: mol_type = other RNA
caagcgcatggagtcgcgg

SEQ ID NO: 490 - RNA, 19 nt, synthetic construct
  misc_feature 1..19: note = Description of Artificial Sequence: Synthetic oligonucleotide
  source 1..19: mol_type = other RNA
aagcgcatggagtcgcggc

SEQ ID NO: 491 - RNA, 19 nt, synthetic construct
  misc_feature 1..19: note = Description of Artificial Sequence: Synthetic oligonucleotide
  source 1..19: mol_type = other RNA
agcgcatggagtcgcggct

SEQ ID NO: 492 - RNA, 19 nt, synthetic construct
  misc_feature 1..19: note = Description of Artificial Sequence: Synthetic oligonucleotide
  source 1..19: mol_type = other RNA
gcgcatggagtcgcggctc

SEQ ID NO: 493 - RNA, 19 nt, synthetic construct
  misc_feature 1..19: note = Description of Artificial Sequence: Synthetic oligonucleotide
  source 1..19: mol_type = other RNA
cgcatggagtcgcggctca

SEQ ID NO: 494 - RNA, 19 nt, synthetic construct
  misc_feature 1..19: note = Description of Artificial Sequence: Synthetic oligonucleotide
  source 1..19: mol_type = other RNA
gcatggagtcgcggctcac

SEQ ID NO: 495 - RNA, 19 nt, synthetic construct
  misc_feature 1..19: note = Description of Artificial Sequence: Synthetic oligonucleotide
  source 1..19: mol_type = other RNA
catggagtcgcggctcaca

SEQ ID NO: 496 - RNA, 19 nt, synthetic construct
  misc_feature 1..19: note = Description of Artificial Sequence: Synthetic oligonucleotide
  source 1..19: mol_type = other RNA
atggagtcgcggctcacag

SEQ ID NO: 497 - RNA, 19 nt, synthetic construct
  misc_feature 1..19: note = Description of Artificial Sequence: Synthetic oligonucleotide
  source 1..19: mol_type = other RNA
tggagtcgcggctcacaga

SEQ ID NO: 498 - RNA, 19 nt, synthetic construct
  misc_feature 1..19: note = Description of Artificial Sequence: Synthetic oligonucleotide
  source 1..19: mol_type = other RNA
ggagtcgcggctcacagat

SEQ ID NO: 499 - RNA, 19 nt, synthetic construct
  misc_feature 1..19: note = Description of Artificial Sequence: Synthetic oligonucleotide
  source 1..19: mol_type = other RNA
gagtcgcggctcacagatg

SEQ ID NO: 500 - RNA, 19 nt, synthetic construct
  misc_feature 1..19: note = Description of Artificial Sequence: Synthetic oligonucleotide
  source 1..19: mol_type = other RNA
agtcgcggctcacagatgc

SEQ ID NO: 501 - RNA, 19 nt, synthetic construct
  misc_feature 1..19: note = Description of Artificial Sequence: Synthetic oligonucleotide
  source 1..19: mol_type = other RNA
gtcgcggctcacagatgct

SEQ ID NO: 502 - RNA, 19 nt, synthetic construct
  misc_feature 1..19: note = Description of Artificial Sequence: Synthetic oligonucleotide
  source 1..19: mol_type = other RNA
tcgcggctcacagatgctg

SEQ ID NO: 503 - RNA, 19 nt, synthetic construct
  misc_feature 1..19: note = Description of Artificial Sequence: Synthetic oligonucleotide
  source 1..19: mol_type = other RNA
cgcggctcacagatgctga

SEQ ID NO: 504 - RNA, 19 nt, synthetic construct
  misc_feature 1..19: note = Description of Artificial Sequence: Synthetic oligonucleotide
  source 1..19: mol_type = other RNA
gcggctcacagatgctgag

SEQ ID NO: 505 - RNA, 19 nt, synthetic construct
  misc_feature 1..19: note = Description of Artificial Sequence: Synthetic oligonucleotide
  source 1..19: mol_type = other RNA
cggctcacagatgctgaga

SEQ ID NO: 506 - RNA, 19 nt, synthetic construct
  misc_feature 1..19: note = Description of Artificial Sequence: Synthetic oligonucleotide
  source 1..19: mol_type = other RNA
ggctcacagatgctgagag

SEQ ID NO: 507 - RNA, 19 nt, synthetic construct
  misc_feature 1..19: note = Description of Artificial Sequence: Synthetic oligonucleotide
  source 1..19: mol_type = other RNA
gctcacagatgctgagagc

SEQ ID NO: 508 - RNA, 19 nt, synthetic construct
  misc_feature 1..19: note = Description of Artificial Sequence: Synthetic oligonucleotide
  source 1..19: mol_type = other RNA
ctcacagatgctgagagca

SEQ ID NO: 509 - RNA, 19 nt, synthetic construct
  misc_feature 1..19: note = Description of Artificial Sequence: Synthetic oligonucleotide
  source 1..19: mol_type = other RNA
tcacagatgctgagagcaa

SEQ ID NO: 510 - RNA, 19 nt, synthetic construct
  misc_feature 1..19: note = Description of Artificial Sequence: Synthetic oligonucleotide
  source 1..19: mol_type = other RNA
cacagatgctgagagcaag

SEQ ID NO: 511 - RNA, 19 nt, synthetic construct
  misc_feature 1..19: note = Description of Artificial Sequence: Synthetic oligonucleotide
  source 1..19: mol_type = other RNA
acagatgctgagagcaagt

SEQ ID NO: 512 - RNA, 19 nt, synthetic construct
  misc_feature 1..19: note = Description of Artificial Sequence: Synthetic oligonucleotide
  source 1..19: mol_type = other RNA
cagatgctgagagcaagta

SEQ ID NO: 513 - RNA, 19 nt, synthetic construct
  misc_feature 1..19: note = Description of Artificial Sequence: Synthetic oligonucleotide
  source 1..19: mol_type = other RNA
agatgctgagagcaagtac

SEQ ID NO: 514 - RNA, 19 nt, synthetic construct
  misc_feature 1..19: note = Description of Artificial Sequence: Synthetic oligonucleotide
  source 1..19: mol_type = other RNA
gatgctgagagcaagtact

SEQ ID NO: 515 - RNA, 19 nt, synthetic construct
  misc_feature 1..19: note = Description of Artificial Sequence: Synthetic oligonucleotide
  source 1..19: mol_type = other RNA
atgctgagagcaagtactc

SEQ ID NO: 516 - RNA, 19 nt, synthetic construct
  misc_feature 1..19: note = Description of Artificial Sequence: Synthetic oligonucleotide
  source 1..19: mol_type = other RNA
tgctgagagcaagtactcc

SEQ ID NO: 517 - RNA, 19 nt, synthetic construct
  misc_feature 1..19: note = Description of Artificial Sequence: Synthetic oligonucleotide
  source 1..19: mol_type = other RNA
gctgagagcaagtactccg

SEQ ID NO: 518 - RNA, 19 nt, synthetic construct
  misc_feature 1..19: note = Description of Artificial Sequence: Synthetic oligonucleotide
  source 1..19: mol_type = other RNA
ctgagagcaagtactccga

SEQ ID NO: 519 - RNA, 19 nt, synthetic construct
  misc_feature 1..19: note = Description of Artificial Sequence: Synthetic oligonucleotide
  source 1..19: mol_type = other RNA
tgagagcaagtactccgag

SEQ ID NO: 520 - RNA, 19 nt, synthetic construct
  misc_feature 1..19: note = Description of Artificial Sequence: Synthetic oligonucleotide
  source 1..19: mol_type = other RNA
gagagcaagtactccgaga

SEQ ID NO: 521 - RNA, 19 nt, synthetic construct
  misc_feature 1..19: note = Description of Artificial Sequence: Synthetic oligonucleotide
  source 1..19: mol_type = other RNA
agagcaagtactccgagat

SEQ ID NO: 522 - RNA, 19 nt, synthetic construct
  misc_feature 1..19: note = Description of Artificial Sequence: Synthetic oligonucleotide
  source 1..19: mol_type = other RNA
gagcaagtactccgagatg

SEQ ID NO: 523 - RNA, 19 nt, synthetic construct
  misc_feature 1..19: note = Description of Artificial Sequence: Synthetic oligonucleotide
  source 1..19: mol_type = other RNA
agcaagtactccgagatga

SEQ ID NO: 524 - RNA, 19 nt, synthetic construct
  misc_feature 1..19: note = Description of Artificial Sequence: Synthetic oligonucleotide
  source 1..19: mol_type = other RNA
gcaagtactccgagatgaa

SEQ ID NO: 525 - RNA, 19 nt, synthetic construct
  misc_feature 1..19: note = Description of Artificial Sequence: Synthetic oligonucleotide
  source 1..19: mol_type = other RNA
caagtactccgagatgaac

SEQ ID NO: 526 - RNA, 19 nt, synthetic construct
  misc_feature 1..19: note = Description of Artificial Sequence: Synthetic oligonucleotide
  source 1..19: mol_type = other RNA
aagtactccgagatgaaca

SEQ ID NO: 527 - RNA, 19 nt, synthetic construct
  misc_feature 1..19: note = Description of Artificial Sequence: Synthetic oligonucleotide
  source 1..19: mol_type = other RNA
agtactccgagatgaacaa

SEQ ID NO: 528 - RNA, 19 nt, synthetic construct
  misc_feature 1..19: note = Description of Artificial Sequence: Synthetic oligonucleotide
  source 1..19: mol_type = other RNA
gtactccgagatgaacaac

SEQ ID NO: 529 - RNA, 19 nt, synthetic construct
  misc_feature 1..19: note = Description of Artificial Sequence: Synthetic oligonucleotide
  source 1..19: mol_type = other RNA
tactccgagatgaacaacc

SEQ ID NO: 530 - RNA, 19 nt, synthetic construct
  misc_feature 1..19: note = Description of Artificial Sequence: Synthetic oligonucleotide
  source 1..19: mol_type = other RNA
actccgagatgaacaacca

SEQ ID NO: 531 - RNA, 19 nt, synthetic construct
  misc_feature 1..19: note = Description of Artificial Sequence: Synthetic oligonucleotide
  source 1..19: mol_type = other RNA
ctccgagatgaacaaccaa

SEQ ID NO: 532 - RNA, 19 nt, synthetic construct
  misc_feature 1..19: note = Description of Artificial Sequence: Synthetic oligonucleotide
  source 1..19: mol_type = other RNA
tccgagatgaacaaccaaa

SEQ ID NO: 533 - RNA, 19 nt, synthetic construct
  misc_feature 1..19: note = Description of Artificial Sequence: Synthetic oligonucleotide
  source 1..19: mol_type = other RNA
ccgagatgaacaaccaaat

SEQ ID NO: 534 - RNA, 19 nt, synthetic construct
  misc_feature 1..19: note = Description of Artificial Sequence: Synthetic oligonucleotide
  source 1..19: mol_type = other RNA
cgagatgaacaaccaaatt

SEQ ID NO: 535 - RNA, 19 nt, synthetic construct
  misc_feature 1..19: note = Description of Artificial Sequence: Synthetic oligonucleotide
  source 1..19: mol_type = other RNA
gagatgaacaaccaaattg

SEQ ID NO: 536 - RNA, 19 nt, synthetic construct
  misc_feature 1..19: note = Description of Artificial Sequence: Synthetic oligonucleotide
  source 1..19: mol_type = other RNA
agatgaacaaccaaattga

SEQ ID NO: 537 - RNA, 19 nt, synthetic construct
  misc_feature 1..19: note = Description of Artificial Sequence: Synthetic oligonucleotide
  source 1..19: mol_type = other RNA
gatgaacaaccaaattgac

SEQ ID NO: 538 - RNA, 19 nt, synthetic construct
  misc_feature 1..19: note = Description of Artificial Sequence: Synthetic oligonucleotide
  source 1..19: mol_type = other RNA
atgaacaaccaaattgaca

SEQ ID NO: 539 - RNA, 19 nt, synthetic construct
  misc_feature 1..19: note = Description of Artificial Sequence: Synthetic oligonucleotide
  source 1..19: mol_type = other RNA
tgaacaaccaaattgacat

SEQ ID NO: 540 - RNA, 19 nt, synthetic construct
  misc_feature 1..19: note = Description of Artificial Sequence: Synthetic oligonucleotide
  source 1..19: mol_type = other RNA
gaacaaccaaattgacatc

SEQ ID NO: 541 - RNA, 19 nt, synthetic construct
  misc_feature 1..19: note = Description of Artificial Sequence: Synthetic oligonucleotide
  source 1..19: mol_type = other RNA
aacaaccaaattgacatca

SEQ ID NO: 542 - RNA, 19 nt, synthetic construct
  misc_feature 1..19: note = Description of Artificial Sequence: Synthetic oligonucleotide
  source 1..19: mol_type = other RNA
acaaccaaattgacatcat

SEQ ID NO: 543 - RNA, 19 nt, synthetic construct
  misc_feature 1..19: note = Description of Artificial Sequence: Synthetic oligonucleotide
  source 1..19: mol_type = other RNA
caaccaaattgacatcatg

SEQ ID NO: 544 - RNA, 19 nt, synthetic construct
  misc_feature 1..19: note = Description of Artificial Sequence: Synthetic oligonucleotide
  source 1..19: mol_type = other RNA
aaccaaattgacatcatgc

SEQ ID NO: 545 - RNA, 19 nt, synthetic construct
  misc_feature 1..19: note = Description of Artificial Sequence: Synthetic oligonucleotide
  source 1..19: mol_type = other RNA
accaaattgacatcatgca

SEQ ID NO: 546 - RNA, 19 nt, synthetic construct
  misc_feature 1..19: note = Description of Artificial Sequence: Synthetic oligonucleotide
  source 1..19: mol_type = other RNA
ccaaattgacatcatgcag

SEQ ID NO: 547 - RNA, 19 nt, synthetic construct
  misc_feature 1..19: note = Description of Artificial Sequence: Synthetic oligonucleotide
  source 1..19: mol_type = other RNA
caaattgacatcatgcagc

SEQ ID NO: 548 - RNA, 19 nt, synthetic construct
  misc_feature 1..19: note = Description of Artificial Sequence: Synthetic oligonucleotide
  source 1..19: mol_type = other RNA
aaattgacatcatgcagct

SEQ ID NO: 549 - RNA, 19 nt, synthetic construct
  misc_feature 1..19: note = Description of Artificial Sequence: Synthetic oligonucleotide
  source 1..19: mol_type = other RNA
aattgacatcatgcagctg

SEQ ID NO: 550 - RNA, 19 nt, synthetic construct
  misc_feature 1..19: note = Description of Artificial Sequence: Synthetic oligonucleotide
  source 1..19: mol_type = other RNA
attgacatcatgcagctgc

SEQ ID NO: 551 - RNA, 19 nt, synthetic construct
  misc_feature 1..19: note = Description of Artificial Sequence: Synthetic oligonucleotide
  source 1..19: mol_type = other RNA
ttgacatcatgcagctgca

SEQ ID NO: 552 - RNA, 19 nt, synthetic construct
  misc_feature 1..19: note = Description of Artificial Sequence: Synthetic oligonucleotide
  source 1..19: mol_type = other RNA
tgacatcatgcagctgcag

SEQ ID NO: 553 - RNA, 19 nt, synthetic construct
  misc_feature 1..19: note = Description of Artificial Sequence: Synthetic oligonucleotide
  source 1..19: mol_type = other RNA
gacatcatgcagctgcagg

SEQ ID NO: 554 - RNA, 19 nt, synthetic construct
  misc_feature 1..19: note = Description of Artificial Sequence: Synthetic oligonucleotide
  source 1..19: mol_type = other RNA
acatcatgcagctgcaggc

SEQ ID NO: 555 - RNA, 19 nt, synthetic construct
  misc_feature 1..19: note = Description of Artificial Sequence: Synthetic oligonucleotide
  source 1..19: mol_type = other RNA
catcatgcagctgcaggca

SEQ ID NO: 556 - RNA, 19 nt, synthetic construct
  misc_feature 1..19: note = Description of Artificial Sequence: Synthetic oligonucleotide
  source 1..19: mol_type = other RNA
atcatgcagctgcaggcag

SEQ ID NO: 557 - RNA, 19 nt, synthetic construct
  misc_feature 1..19: note = Description of Artificial Sequence: Synthetic oligonucleotide
  source 1..19: mol_type = other RNA
tcatgcagctgcaggcagc

SEQ ID NO: 558 - RNA, 19 nt, synthetic construct
  misc_feature 1..19: note = Description of Artificial Sequence: Synthetic oligonucleotide
  source 1..19: mol_type = other RNA
catgcagctgcaggcagca

SEQ ID NO: 559 - RNA, 19 nt, synthetic construct
  misc_feature 1..19: note = Description of Artificial Sequence: Synthetic oligonucleotide
  source 1..19: mol_type = other RNA
atgcagctgcaggcagcac

SEQ ID NO: 560 - RNA, 19 nt, synthetic construct
  misc_feature 1..19: note = Description of Artificial Sequence: Synthetic oligonucleotide
  source 1..19: mol_type = other RNA
tgcagctgcaggcagcaca

SEQ ID NO: 561 - RNA, 19 nt, synthetic construct
  misc_feature 1..19: note = Description of Artificial Sequence: Synthetic oligonucleotide
  source 1..19: mol_type = other RNA
gcagctgcaggcagcacag

SEQ ID NO: 562 - RNA, 19 nt, synthetic construct
  misc_feature 1..19: note = Description of Artificial Sequence: Synthetic oligonucleotide
  source 1..19: mol_type = other RNA
cagctgcaggcagcacaga

SEQ ID NO: 563 - RNA, 19 nt, synthetic construct
  misc_feature 1..19: note = Description of Artificial Sequence: Synthetic oligonucleotide
  source 1..19: mol_type = other RNA
agctgcaggcagcacagac

SEQ ID NO: 564 - RNA, 19 nt, synthetic construct
  misc_feature 1..19: note = Description of Artificial Sequence: Synthetic oligonucleotide
  source 1..19: mol_type = other RNA
gctgcaggcagcacagacg

SEQ ID NO: 565 - RNA, 19 nt, synthetic construct
  misc_feature 1..19: note = Description of Artificial Sequence: Synthetic oligonucleotide
  source 1..19: mol_type = other RNA
ctgcaggcagcacagacgg

SEQ ID NO: 566 - RNA, 19 nt, synthetic construct
  misc_feature 1..19: note = Description of Artificial Sequence: Synthetic oligonucleotide
  source 1..19: mol_type = other RNA
tgcaggcagcacagacggt

SEQ ID NO: 567 - RNA, 19 nt, synthetic construct
  misc_feature 1..19: note = Description of Artificial Sequence: Synthetic oligonucleotide
  source 1..19: mol_type = other RNA
gcaggcagcacagacggtc

SEQ ID NO: 568 - RNA, 19 nt, synthetic construct
  misc_feature 1..19: note = Description of Artificial Sequence: Synthetic oligonucleotide
  source 1..19: mol_type = other RNA
caggcagcacagacggtca

SEQ ID NO: 569 - RNA, 19 nt, synthetic construct
  misc_feature 1..19: note = Description of Artificial Sequence: Synthetic oligonucleotide
  source 1..19: mol_type = other RNA
aggcagcacagacggtcac

SEQ ID NO: 570 - RNA, 19 nt, synthetic construct
  misc_feature 1..19: note = Description of Artificial Sequence: Synthetic oligonucleotide
  source 1..19: mol_type = other RNA
ggcagcacagacggtcact

SEQ ID NO: 571 - RNA, 19 nt, synthetic construct
  misc_feature 1..19: note = Description of Artificial Sequence: Synthetic oligonucleotide
  source 1..19: mol_type = other RNA
gcagcacagacggtcactc

SEQ ID NO: 572 - RNA, 19 nt, synthetic construct
  misc_feature 1..19: note = Description of Artificial Sequence: Synthetic oligonucleotide
  source 1..19: mol_type = other RNA
cagcacagacggtcactca

SEQ ID NO: 573 - RNA, 19 nt, synthetic construct
  misc_feature 1..19: note = Description of Artificial Sequence: Synthetic oligonucleotide
  source 1..19: mol_type = other RNA
agcacagacggtcactcag

SEQ ID NO: 574 - RNA, 19 nt, synthetic construct
  misc_feature 1..19: note = Description of Artificial Sequence: Synthetic oligonucleotide
  source 1..19: mol_type = other RNA
gcacagacggtcactcaga

SEQ ID NO: 575 - RNA, 19 nt, synthetic construct
  misc_feature 1..19: note = Description of Artificial Sequence: Synthetic oligonucleotide
  source 1..19: mol_type = other RNA
cacagacggtcactcagac

SEQ ID NO: 576 - RNA, 19 nt, synthetic construct
  misc_feature 1..19: note = Description of Artificial Sequence: Synthetic oligonucleotide
  source 1..19: mol_type = other RNA
acagacggtcactcagacc

SEQ ID NO: 577 - RNA, 19 nt, synthetic construct
  misc_feature 1..19: note = Description of Artificial Sequence: Synthetic oligonucleotide
  source 1..19: mol_type = other RNA
cagacggtcactcagacct

SEQ ID NO: 578 - RNA, 19 nt, synthetic construct
  misc_feature 1..19: note = Description of Artificial Sequence: Synthetic oligonucleotide
  source 1..19: mol_type = other RNA
agacggtcactcagacctc

SEQ ID NO: 579 - RNA, 19 nt, synthetic construct
  misc_feature 1..19: note = Description of Artificial Sequence: Synthetic oligonucleotide
  source 1..19: mol_type = other RNA
gacggtcactcagacctcc

SEQ ID NO: 580 - RNA, 19 nt, synthetic construct
  misc_feature 1..19: note = Description of Artificial Sequence: Synthetic oligonucleotide
  source 1..19: mol_type = other RNA
acggtcactcagacctccg

SEQ ID NO: 581 - RNA, 19 nt, synthetic construct
  misc_feature 1..19: note = Description of Artificial Sequence: Synthetic oligonucleotide
  source 1..19: mol_type = other RNA
cggtcactcagacctccgc

SEQ ID NO: 582 - RNA, 19 nt, synthetic construct
  misc_feature 1..19: note = Description of Artificial Sequence: Synthetic oligonucleotide
  source 1..19: mol_type = other RNA
ggtcactcagacctccgca

SEQ ID NO: 583 - RNA, 19 nt, synthetic construct
  misc_feature 1..19: note = Description of Artificial Sequence: Synthetic oligonucleotide
  source 1..19: mol_type = other RNA
gtcactcagacctccgcag

SEQ ID NO: 584 - RNA, 19 nt, synthetic construct
  misc_feature 1..19: note = Description of Artificial Sequence: Synthetic oligonucleotide
  source 1..19: mol_type = other RNA
tcactcagacctccgcaga

SEQ ID NO: 585 - RNA, 19 nt, synthetic construct
  misc_feature 1..19: note = Description of Artificial Sequence: Synthetic oligonucleotide
  source 1..19: mol_type = other RNA
cactcagacctccgcagat

SEQ ID NO: 586 - RNA, 19 nt, synthetic construct
  misc_feature 1..19: note = Description of Artificial Sequence: Synthetic oligonucleotide
  source 1..19: mol_type = other RNA
actcagacctccgcagatg

SEQ ID NO: 587 - RNA, 19 nt, synthetic construct
  misc_feature 1..19: note = Description of Artificial Sequence: Synthetic oligonucleotide
  source 1..19: mol_type = other RNA
ctcagacctccgcagatgc

SEQ ID NO: 588 - RNA, 19 nt, synthetic construct
  misc_feature 1..19: note = Description of Artificial Sequence: Synthetic oligonucleotide
  source 1..19: mol_type = other RNA
tcagacctccgcagatgcc

SEQ ID NO: 589 - RNA, 19 nt, synthetic construct
  misc_feature 1..19: note = Description of Artificial Sequence: Synthetic oligonucleotide
  source 1..19: mol_type = other RNA
cagacctccgcagatgcca

SEQ ID NO: 590 - RNA, 19 nt, synthetic construct
  misc_feature 1..19: note = Description of Artificial Sequence: Synthetic oligonucleotide
  source 1..19: mol_type = other RNA
agacctccgcagatgccat

SEQ ID NO: 591 - RNA, 19 nt, synthetic construct
  misc_feature 1..19: note = Description of Artificial Sequence: Synthetic oligonucleotide
  source 1..19: mol_type = other RNA
gacctccgcagatgccatc

SEQ ID NO: 592 - RNA, 19 nt, synthetic construct
  misc_feature 1..19: note = Description of Artificial Sequence: Synthetic oligonucleotide
  source 1..19: mol_type = other RNA
acctccgcagatgccatct

SEQ ID NO: 593 - RNA, 19 nt, synthetic construct
  misc_feature 1..19: note = Description of Artificial Sequence: Synthetic oligonucleotide
  source 1..19: mol_type = other RNA
cctccgcagatgccatcta

SEQ ID NO: 594 - RNA, 19 nt, synthetic construct
  misc_feature 1..19: note = Description of Artificial Sequence: Synthetic oligonucleotide
  source 1..19: mol_type = other RNA
ctccgcagatgccatctac

SEQ ID NO: 595 - RNA, 19 nt, synthetic construct
  misc_feature 1..19: note = Description of Artificial Sequence: Synthetic oligonucleotide
  source 1..19: mol_type = other RNA
tccgcagatgccatctacg

SEQ ID NO: 596 - RNA, 19 nt, synthetic construct
  misc_feature 1..19: note = Description of Artificial Sequence: Synthetic oligonucleotide
  source 1..19: mol_type = other RNA
ccgcagatgccatctacga

SEQ ID NO: 597 - RNA, 19 nt, synthetic construct
  misc_feature 1..19: note = Description of Artificial Sequence: Synthetic oligonucleotide
  source 1..19: mol_type = other RNA
cgcagatgccatctacgac

SEQ ID NO: 598 - RNA, 19 nt, synthetic construct
  misc_feature 1..19: note = Description of Artificial Sequence: Synthetic oligonucleotide
  source 1..19: mol_type = other RNA
gcagatgccatctacgact

SEQ ID NO: 599 - RNA, 19 nt, synthetic construct
  misc_feature 1..19: note = Description of Artificial Sequence: Synthetic oligonucleotide
  source 1..19: mol_type = other RNA
cagatgccatctacgactg

SEQ ID NO: 600 - RNA, 19 nt, synthetic construct
  misc_feature 1..19: note = Description of Artificial Sequence: Synthetic oligonucleotide
  source 1..19: mol_type = other RNA
agatgccatctacgactgc

SEQ ID NO: 601 - RNA, 19 nt, synthetic construct
  misc_feature 1..19: note = Description of Artificial Sequence: Synthetic oligonucleotide
  source 1..19: mol_type = other RNA
gatgccatctacgactgct

SEQ ID NO: 602 - RNA, 19 nt, synthetic construct
  misc_feature 1..19: note = Description of Artificial Sequence: Synthetic oligonucleotide
  source 1..19: mol_type = other RNA
atgccatctacgactgctc

SEQ ID NO: 603 - RNA, 19 nt, synthetic construct
  misc_feature 1..19: note = Description of Artificial Sequence: Synthetic oligonucleotide
  source 1..19: mol_type = other RNA
tgccatctacgactgctct

SEQ ID NO: 604 - RNA, 19 nt, synthetic construct
  misc_feature 1..19: note = Description of Artificial Sequence: Synthetic oligonucleotide
  source 1..19: mol_type = other RNA
gccatctacgactgctctt

SEQ ID NO: 605 - RNA, 19 nt, synthetic construct
  misc_feature 1..19: note = Description of Artificial Sequence: Synthetic oligonucleotide
  source 1..19: mol_type = other RNA
ccatctacgactgctcttc

SEQ ID NO: 606 - RNA, 19 nt, synthetic construct
  misc_feature 1..19: note = Description of Artificial Sequence: Synthetic oligonucleotide
  source 1..19: mol_type = other RNA
catctacgactgctcttcc

SEQ ID NO: 607 - RNA, 19 nt, synthetic construct
  misc_feature 1..19: note = Description of Artificial Sequence: Synthetic oligonucleotide
  source 1..19: mol_type = other RNA
atctacgactgctcttccc

SEQ ID NO: 608 - RNA, 19 nt, synthetic construct
  misc_feature 1..19: note = Description of Artificial Sequence: Synthetic oligonucleotide
  source 1..19: mol_type = other RNA
tctacgactgctcttccct

SEQ ID NO: 609 - RNA, 19 nt, synthetic construct
  misc_feature 1..19: note = Description of Artificial Sequence: Synthetic oligonucleotide
  source 1..19: mol_type = other RNA
ctacgactgctcttccctc

SEQ ID NO: 610 - RNA, 19 nt, synthetic construct
  misc_feature 1..19: note = Description of Artificial Sequence: Synthetic oligonucleotide
  source 1..19: mol_type = other RNA
tacgactgctcttccctct

SEQ ID NO: 611 - RNA, 19 nt, synthetic construct
  misc_feature 1..19: note = Description of Artificial Sequence: Synthetic oligonucleotide
  source 1..19: mol_type = other RNA
acgactgctcttccctcta

SEQ ID NO: 612 - RNA, 19 nt, synthetic construct
  misc_feature 1..19: note = Description of Artificial Sequence: Synthetic oligonucleotide
  source 1..19: mol_type = other RNA
cgactgctcttccctctac

SEQ ID NO: 613 - RNA, 19 nt, synthetic construct
  misc_feature 1..19: note = Description of Artificial Sequence: Synthetic oligonucleotide
  source 1..19: mol_type = other RNA
gactgctcttccctctacc

SEQ ID NO: 614 - RNA, 19 nt, synthetic construct
  misc_feature 1..19: note = Description of Artificial Sequence: Synthetic oligonucleotide
  source 1..19: mol_type = other RNA
actgctcttccctctacca

SEQ ID NO: 615 - RNA, 19 nt, synthetic construct
  misc_feature 1..19: note = Description of Artificial Sequence: Synthetic oligonucleotide
  source 1..19: mol_type = other RNA
ctgctcttccctctaccag

SEQ ID NO: 616 - RNA, 19 nt, synthetic construct
  misc_feature 1..19: note = Description of Artificial Sequence: Synthetic oligonucleotide
  source 1..19: mol_type = other RNA
tgctcttccctctaccaga

SEQ ID NO: 617 - RNA, 19 nt, synthetic construct
  misc_feature 1..19: note = Description of Artificial Sequence: Synthetic oligonucleotide
  source 1..19: mol_type = other RNA
gctcttccctctaccagaa

SEQ ID NO: 618 - RNA, 19 nt, synthetic construct
  misc_feature 1..19: note = Description of Artificial Sequence: Synthetic oligonucleotide
  source 1..19: mol_type = other RNA
ctcttccctctaccagaag

SEQ ID NO: 619 - RNA, 19 nt, synthetic construct
  misc_feature 1..19: note = Description of Artificial Sequence: Synthetic oligonucleotide
  source 1..19: mol_type = other RNA
tcttccctctaccagaaga

SEQ ID NO: 620 - RNA, 19 nt, synthetic construct
  misc_feature 1..19: note = Description of Artificial Sequence: Synthetic oligonucleotide
  source 1..19: mol_type = other RNA
cttccctctaccagaagaa

SEQ ID NO: 621 - RNA, 19 nt, synthetic construct
  misc_feature 1..19: note = Description of Artificial Sequence: Synthetic oligonucleotide
  source 1..19: mol_type = other RNA
ttccctctaccagaagaac

SEQ ID NO: 622 - RNA, 19 nt, synthetic construct
  misc_feature 1..19: note = Description of Artificial Sequence: Synthetic oligonucleotide
  source 1..19: mol_type = other RNA
tccctctaccagaagaact

SEQ ID NO: 623 - RNA, 19 nt, synthetic construct
  misc_feature 1..19: note = Description of Artificial Sequence: Synthetic oligonucleotide
  source 1..19: mol_type = other RNA
ccctctaccagaagaacta

SEQ ID NO: 624 - RNA, 19 nt, synthetic construct
  misc_feature 1..19: note = Description of Artificial Sequence: Synthetic oligonucleotide
  source 1..19: mol_type = other RNA
cctctaccagaagaactac

SEQ ID NO: 625 - RNA, 19 nt, synthetic construct
  misc_feature 1..19: note = Description of Artificial Sequence: Synthetic oligonucleotide
  source 1..19: mol_type = other RNA
ctctaccagaagaactacc

SEQ ID NO: 626 - RNA, 19 nt, synthetic construct
  misc_feature 1..19: note = Description of Artificial Sequence: Synthetic oligonucleotide
  source 1..19: mol_type = other RNA
tctaccagaagaactaccg

SEQ ID NO: 627 - RNA, 19 nt, synthetic construct
  misc_feature 1..19: note = Description of Artificial Sequence: Synthetic oligonucleotide
  source 1..19: mol_type = other RNA
ctaccagaagaactaccgc

SEQ ID NO: 628 - RNA, 19 nt, synthetic construct
  misc_feature 1..19: note = Description of Artificial Sequence: Synthetic oligonucleotide
  source 1..19: mol_type = other RNA
taccagaagaactaccgca

SEQ ID NO: 629 - RNA, 19 nt, synthetic construct
  misc_feature 1..19: note = Description of Artificial Sequence: Synthetic oligonucleotide
  source 1..19: mol_type = other RNA
accagaagaactaccgcat

SEQ ID NO: 630 - RNA, 19 nt, synthetic construct
  misc_feature 1..19: note = Description of Artificial Sequence: Synthetic oligonucleotide
  source 1..19: mol_type = other RNA
ccagaagaactaccgcatc

SEQ ID NO: 631 - RNA, 19 nt, synthetic construct
  misc_feature 1..19: note = Description of Artificial Sequence: Synthetic oligonucleotide
  source 1..19: mol_type = other RNA
cagaagaactaccgcatct

SEQ ID NO: 632 - RNA, 19 nt, synthetic construct
  misc_feature 1..19: note = Description of Artificial Sequence: Synthetic oligonucleotide
  source 1..19: mol_type = other RNA
agaagaactaccgcatctc

SEQ ID NO: 633 - RNA, 19 nt, synthetic construct
  misc_feature 1..19: note = Description of Artificial Sequence: Synthetic oligonucleotide
  source 1..19: mol_type = other RNA
gaagaactaccgcatctct

SEQ ID NO: 634 - RNA, 19 nt, synthetic construct
  misc_feature 1..19: note = Description of Artificial Sequence: Synthetic oligonucleotide
  source 1..19: mol_type = other RNA
aagaactaccgcatctctg

SEQ ID NO: 635 - RNA, 19 nt, synthetic construct
  misc_feature 1..19: note = Description of Artificial Sequence: Synthetic oligonucleotide
  source 1..19: mol_type = other RNA
agaactaccgcatctctgg

SEQ ID NO: 636 - RNA, 19 nt, synthetic construct
  misc_feature 1..19: note = Description of Artificial Sequence: Synthetic oligonucleotide
  source 1..19: mol_type = other RNA
gaactaccgcatctctgga

SEQ ID NO: 637 - RNA, 19 nt, synthetic construct
  misc_feature 1..19: note = Description of Artificial Sequence: Synthetic oligonucleotide
  source 1..19: mol_type = other RNA
aactaccgcatctctggag

SEQ ID NO: 638 - RNA, 19 nt, synthetic construct
  misc_feature 1..19: note = Description of Artificial Sequence: Synthetic oligonucleotide
  source 1..19: mol_type = other RNA
actaccgcatctctggagt

SEQ ID NO: 639 - RNA, 19 nt, synthetic construct
  misc_feature 1..19: note = Description of Artificial Sequence: Synthetic oligonucleotide
  source 1..19: mol_type = other RNA
ctaccgcatctctggagtg

SEQ ID NO: 640 - RNA, 19 nt, synthetic construct
  misc_feature 1..19: note = Description of Artificial Sequence: Synthetic oligonucleotide
  source 1..19: mol_type = other RNA
taccgcatctctggagtgt

SEQ ID NO: 641 - RNA, 19 nt, synthetic construct
  misc_feature 1..19: note = Description of Artificial Sequence: Synthetic oligonucleotide
  source 1..19: mol_type = other RNA
accgcatctctggagtgta

SEQ ID NO: 642 - RNA, 19 nt, synthetic construct
  misc_feature 1..19: note = Description of Artificial Sequence: Synthetic oligonucleotide
  source 1..19: mol_type = other RNA
ccgcatctctggagtgtat

SEQ ID NO: 643 - RNA, 19 nt, synthetic construct
  misc_feature 1..19: note = Description of Artificial Sequence: Synthetic oligonucleotide
  source 1..19: mol_type = other RNA
cgcatctctggagtgtata

SEQ ID NO: 644 - RNA, 19 nt, synthetic construct
  misc_feature 1..19: note = Description of Artificial Sequence: Synthetic oligonucleotide
  source 1..19: mol_type = other RNA
gcatctctggagtgtataa

SEQ ID NO: 645 - RNA, 19 nt, synthetic construct
  misc_feature 1..19: note = Description of Artificial Sequence: Synthetic oligonucleotide
  source 1..19: mol_type = other RNA
catctctggagtgtataag

SEQ ID NO: 646 - RNA, 19 nt, synthetic construct
  misc_feature 1..19: note = Description of Artificial Sequence: Synthetic oligonucleotide
  source 1..19: mol_type = other RNA
atctctggagtgtataagc

SEQ ID NO: 647 - RNA, 19 nt, synthetic construct
  misc_feature 1..19: note = Description of Artificial Sequence: Synthetic oligonucleotide
  source 1..19: mol_type = other RNA
tctctggagtgtataagct

SEQ ID NO: 648 - RNA, 19 nt, synthetic construct
  misc_feature 1..19: note = Description of Artificial Sequence: Synthetic oligonucleotide
  source 1..19: mol_type = other RNA
ctctggagtgtataagctt

SEQ ID NO: 649 - RNA, 19 nt, synthetic construct
  misc_feature 1..19: note = Description of Artificial Sequence: Synthetic oligonucleotide
  source 1..19: mol_type = other RNA
tctggagtgtataagcttc

SEQ ID NO: 650 - RNA, 19 nt, synthetic construct
  misc_feature 1..19: note = Description of Artificial Sequence: Synthetic oligonucleotide
  source 1..19: mol_type = other RNA
ctggagtgtataagcttcc

SEQ ID NO: 651 - RNA, 19 nt, synthetic construct
  misc_feature 1..19: note = Description of Artificial Sequence: Synthetic oligonucleotide
  source 1..19: mol_type = other RNA
tggagtgtataagcttcct

SEQ ID NO: 652 - RNA, 19 nt, synthetic construct
  misc_feature 1..19: note = Description of Artificial Sequence: Synthetic oligonucleotide
  source 1..19: mol_type = other RNA
ggagtgtataagcttcctc

SEQ ID NO: 653 - RNA, 19 nt, synthetic construct
  misc_feature 1..19: note = Description of Artificial Sequence: Synthetic oligonucleotide
  source 1..19: mol_type = other RNA
gagtgtataagcttcctcc

SEQ ID NO: 654 - RNA, 19 nt, synthetic construct
  misc_feature 1..19: note = Description of Artificial Sequence: Synthetic oligonucleotide
  source 1..19: mol_type = other RNA
agtgtataagcttcctcct

SEQ ID NO: 655 - RNA, 19 nt, synthetic construct
  misc_feature 1..19: note = Description of Artificial Sequence: Synthetic oligonucleotide
  source 1..19: mol_type = other RNA
gtgtataagcttcctcctg

SEQ ID NO: 656 - RNA, 19 nt, synthetic construct
  misc_feature 1..19: note = Description of Artificial Sequence: Synthetic oligonucleotide
  source 1..19: mol_type = other RNA
tgtataagcttcctcctga

SEQ ID NO: 657 - RNA, 19 nt, synthetic construct
  misc_feature 1..19: note = Description of Artificial Sequence: Synthetic oligonucleotide
  source 1..19: mol_type = other RNA
gtataagcttcctcctgat

SEQ ID NO: 658 - RNA, 19 nt, synthetic construct
  misc_feature 1..19: note = Description of Artificial Sequence: Synthetic oligonucleotide
  source 1..19: mol_type = other RNA
tataagcttcctcctgatg

SEQ ID NO: 659 - RNA, 19 nt, synthetic construct
  misc_feature 1..19: note = Description of Artificial Sequence: Synthetic oligonucleotide
  source 1..19: mol_type = other RNA
ataagcttcctcctgatga

SEQ ID NO: 660 - RNA, 19 nt, synthetic construct
  misc_feature 1..19: note = Description of Artificial Sequence: Synthetic oligonucleotide
  source 1..19: mol_type = other RNA
taagcttcctcctgatgac

SEQ ID NO: 661 - RNA, 19 nt, synthetic construct
  misc_feature 1..19: note = Description of Artificial Sequence: Synthetic oligonucleotide
  source 1..19: mol_type = other RNA
aagcttcctcctgatgact

SEQ ID NO: 662 - RNA, 19 nt, synthetic construct
  misc_feature 1..19: note = Description of Artificial Sequence: Synthetic oligonucleotide
  source 1..19: mol_type = other RNA
agcttcctcctgatgactt

SEQ ID NO: 663 - RNA, 19 nt, synthetic construct
  misc_feature 1..19: note = Description of Artificial Sequence: Synthetic oligonucleotide
  source 1..19: mol_type = other RNA
gcttcctcctgatgacttc

SEQ ID NO: 664 - RNA, 19 nt, synthetic construct
  misc_feature 1..19: note = Description of Artificial Sequence: Synthetic oligonucleotide
  source 1..19: mol_type = other RNA
cttcctcctgatgacttcc

SEQ ID NO: 665 - RNA, 19 nt, synthetic construct
  misc_feature 1..19: note = Description of Artificial Sequence: Synthetic oligonucleotide
  source 1..19: mol_type = other RNA
ttcctcctgatgacttcct

SEQ ID NO: 666 - RNA, 19 nt, synthetic construct
  misc_feature 1..19: note = Description of Artificial Sequence: Synthetic oligonucleotide
  source 1..19: mol_type = other RNA
tcctcctgatgacttcctg

SEQ ID NO: 667 - RNA, 19 nt, synthetic construct
  misc_feature 1..19: note = Description of Artificial Sequence: Synthetic oligonucleotide
  source 1..19: mol_type = other RNA
cctcctgatgacttcctgg

SEQ ID NO: 668 - RNA, 19 nt, synthetic construct
  misc_feature 1..19: note = Description of Artificial Sequence: Synthetic oligonucleotide
  source 1..19: mol_type = other RNA
ctcctgatgacttcctggg

SEQ ID NO: 669 - RNA, 19 nt, synthetic construct
  misc_feature 1..19: note = Description of Artificial Sequence: Synthetic oligonucleotide
  source 1..19: mol_type = other RNA
tcctgatgacttcctgggc

SEQ ID NO: 670 - RNA, 19 nt, synthetic construct
  misc_feature 1..19: note = Description of Artificial Sequence: Synthetic oligonucleotide
  source 1..19: mol_type = other RNA
cctgatgacttcctgggca

SEQ ID NO: 671 - RNA, 19 nt, synthetic construct
  misc_feature 1..19: note = Description of Artificial Sequence: Synthetic oligonucleotide
  source 1..19: mol_type = other RNA
ctgatgacttcctgggcag

SEQ ID NO: 672 - RNA, 19 nt, synthetic construct
  misc_feature 1..19: note = Description of Artificial Sequence: Synthetic oligonucleotide
  source 1..19: mol_type = other RNA
tgatgacttcctgggcagc

SEQ ID NO: 673 - RNA, 19 nt, synthetic construct
  misc_feature 1..19: note = Description of Artificial Sequence: Synthetic oligonucleotide
  source 1..19: mol_type = other RNA
gatgacttcctgggcagcc

SEQ ID NO: 674 - RNA, 19 nt, synthetic construct
  misc_feature 1..19: note = Description of Artificial Sequence: Synthetic oligonucleotide
  source 1..19: mol_type = other RNA
atgacttcctgggcagccc

SEQ ID NO: 675 - RNA, 19 nt, synthetic construct
  misc_feature 1..19: note = Description of Artificial Sequence: Synthetic oligonucleotide
  source 1..19: mol_type = other RNA
tgacttcctgggcagccct

SEQ ID NO: 676 - RNA, 19 nt, synthetic construct
  misc_feature 1..19: note = Description of Artificial Sequence: Synthetic oligonucleotide
  source 1..19: mol_type = other RNA
gacttcctgggcagccctg

SEQ ID NO: 677 - RNA, 19 nt, synthetic construct
  misc_feature 1..19: note = Description of Artificial Sequence: Synthetic oligonucleotide
  source 1..19: mol_type = other RNA
acttcctgggcagccctga

SEQ ID NO: 678 - RNA, 19 nt, synthetic construct
  misc_feature 1..19: note = Description of Artificial Sequence: Synthetic oligonucleotide
  source 1..19: mol_type = other RNA
cttcctgggcagccctgaa

SEQ ID NO: 679 - RNA, 19 nt, synthetic construct
  misc_feature 1..19: note = Description of Artificial Sequence: Synthetic oligonucleotide
  source 1..19: mol_type = other RNA
ttcctgggcagccctgaac

SEQ ID NO: 680 - RNA, 19 nt, synthetic construct
  misc_feature 1..19: note = Description of Artificial Sequence: Synthetic oligonucleotide
  source 1..19: mol_type = other RNA
tcctgggcagccctgaact

SEQ ID NO: 681 - RNA, 19 nt, synthetic construct
  misc_feature 1..19: note = Description of Artificial Sequence: Synthetic oligonucleotide
  source 1..19: mol_type = other RNA
cctgggcagccctgaactg

SEQ ID NO: 682 - RNA, 19 nt, synthetic construct
  misc_feature 1..19: note = Description of Artificial Sequence: Synthetic oligonucleotide
  source 1..19: mol_type = other RNA
ctgggcagccctgaactgg

SEQ ID NO: 683 - RNA, 19 nt, synthetic construct
  misc_feature 1..19: note = Description of Artificial Sequence: Synthetic oligonucleotide
  source 1..19: mol_type = other RNA
tgggcagccctgaactgga

SEQ ID NO: 684 - RNA, 19 nt, synthetic construct
  misc_feature 1..19: note = Description of Artificial Sequence: Synthetic oligonucleotide
  source 1..19: mol_type = other RNA
gggcagccctgaactggag

SEQ ID NO: 685 - RNA, 19 nt, synthetic construct
  misc_feature 1..19: note = Description of Artificial Sequence: Synthetic oligonucleotide
  source 1..19: mol_type = other RNA
ggcagccctgaactggagg

SEQ ID NO: 686 - RNA, 19 nt, synthetic construct
  misc_feature 1..19: note = Description of Artificial Sequence: Synthetic oligonucleotide
  source 1..19: mol_type = other RNA
gcagccctgaactggaggt

SEQ ID NO: 687 - RNA, 19 nt, synthetic construct
  misc_feature 1..19: note = Description of Artificial Sequence: Synthetic oligonucleotide
  source 1..19: mol_type = other RNA
cagccctgaactggaggtg

SEQ ID NO: 688 - RNA, 19 nt, synthetic construct
  misc_feature 1..19: note = Description of Artificial Sequence: Synthetic oligonucleotide
  source 1..19: mol_type = other RNA
agccctgaactggaggtgt

SEQ ID NO: 689 - RNA, 19 nt, synthetic construct
  misc_feature 1..19: note = Description of Artificial Sequence: Synthetic oligonucleotide
  source 1..19: mol_type = other RNA
gccctgaactggaggtgtt

SEQ ID NO: 690 - RNA, 19 nt, synthetic construct
  misc_feature 1..19: note = Description of Artificial Sequence: Synthetic oligonucleotide
  source 1..19: mol_type = other RNA
ccctgaactggaggtgttc

SEQ ID NO: 691 - RNA, 19 nt, synthetic construct
  misc_feature 1..19: note = Description of Artificial Sequence: Synthetic oligonucleotide
  source 1..19: mol_type = other RNA
cctgaactggaggtgttct

SEQ ID NO: 692 - RNA, 19 nt, synthetic construct
  misc_feature 1..19: note = Description of Artificial Sequence: Synthetic oligonucleotide
  source 1..19: mol_type = other RNA
ctgaactggaggtgttctg

SEQ ID NO: 693 - RNA, 19 nt, synthetic construct
  misc_feature 1..19: note = Description of Artificial Sequence: Synthetic oligonucleotide
  source 1..19: mol_type = other RNA
tgaactggaggtgttctgt

SEQ ID NO: 694 - RNA, 19 nt, synthetic construct
  misc_feature 1..19: note = Description of Artificial Sequence: Synthetic oligonucleotide
  source 1..19: mol_type = other RNA
gaactggaggtgttctgtg

SEQ ID NO: 695 - RNA, 19 nt, synthetic construct
  misc_feature 1..19: note = Description of Artificial Sequence: Synthetic oligonucleotide
  source 1..19: mol_type = other RNA
aactggaggtgttctgtga

SEQ ID NO: 696 - RNA, 19 nt, synthetic construct
  misc_feature 1..19: note = Description of Artificial Sequence: Synthetic oligonucleotide
  source 1..19: mol_type = other RNA
actggaggtgttctgtgac

SEQ ID NO: 697 - RNA, 19 nt, synthetic construct
  misc_feature 1..19: note = Description of Artificial Sequence: Synthetic oligonucleotide
  source 1..19: mol_type = other RNA
ctggaggtgttctgtgaca

SEQ ID NO: 698 - RNA, 19 nt, synthetic construct
  misc_feature 1..19: note = Description of Artificial Sequence: Synthetic oligonucleotide
  source 1..19: mol_type = other RNA
tggaggtgttctgtgacat

SEQ ID NO: 699 - RNA, 19 nt, synthetic construct
  misc_feature 1..19: note = Description of Artificial Sequence: Synthetic oligonucleotide
  source 1..19: mol_type = other RNA
ggaggtgttctgtgacatg

SEQ ID NO: 700 - RNA, 19 nt, synthetic construct
  misc_feature 1..19: note = Description of Artificial Sequence: Synthetic oligonucleotide
  source 1..19: mol_type = other RNA
gaggtgttctgtgacatgg

SEQ ID NO: 701 - RNA, 19 nt, synthetic construct
  misc_feature 1..19: note = Description of Artificial Sequence: Synthetic oligonucleotide
  source 1..19: mol_type = other RNA
aggtgttctgtgacatgga

SEQ ID NO: 702 - RNA, 19 nt, synthetic construct
  misc_feature 1..19: note = Description of Artificial Sequence: Synthetic oligonucleotide
  source 1..19: mol_type = other RNA
ggtgttctgtgacatggag

SEQ ID NO: 703 - RNA, 19 nt, synthetic construct
  misc_feature 1..19: note = Description of Artificial Sequence: Synthetic oligonucleotide
  source 1..19: mol_type = other RNA
gtgttctgtgacatggaga

SEQ ID NO: 704 - RNA, 19 nt, synthetic construct
  misc_feature 1..19: note = Description of Artificial Sequence: Synthetic oligonucleotide
  source 1..19: mol_type = other RNA
tgttctgtgacatggagac

SEQ ID NO: 705 - RNA, 19 nt, synthetic construct
  misc_feature 1..19: note = Description of Artificial Sequence: Synthetic oligonucleotide
  source 1..19: mol_type = other RNA
gttctgtgacatggagact

SEQ ID NO: 706 - RNA, 19 nt, synthetic construct
  misc_feature 1..19: note = Description of Artificial Sequence: Synthetic oligonucleotide
  source 1..19: mol_type = other RNA
ttctgtgacatggagactt

SEQ ID NO: 707 - RNA, 19 nt, synthetic construct
  misc_feature 1..19: note = Description of Artificial Sequence: Synthetic oligonucleotide
  source 1..19: mol_type = other RNA
tctgtgacatggagacttc

SEQ ID NO: 708 - RNA, 19 nt, synthetic construct
  misc_feature 1..19: note = Description of Artificial Sequence: Synthetic oligonucleotide
  source 1..19: mol_type = other RNA
ctgtgacatggagacttca

SEQ ID NO: 709 - RNA, 19 nt, synthetic construct
  misc_feature 1..19: note = Description of Artificial Sequence: Synthetic oligonucleotide
  source 1..19: mol_type = other RNA
tgtgacatggagacttcag

SEQ ID NO: 710 - RNA, 19 nt, synthetic construct
  misc_feature 1..19: note = Description of Artificial Sequence: Synthetic oligonucleotide
  source 1..19: mol_type = other RNA
gtgacatggagacttcagg

SEQ ID NO: 711 - RNA, 19 nt, synthetic construct
  misc_feature 1..19: note = Description of Artificial Sequence: Synthetic oligonucleotide
  source 1..19: mol_type = other RNA
tgacatggagacttcaggc

SEQ ID NO: 712 - RNA, 19 nt, synthetic construct
  misc_feature 1..19: note = Description of Artificial Sequence: Synthetic oligonucleotide
  source 1..19: mol_type = other RNA
gacatggagacttcaggcg

SEQ ID NO: 713 - RNA, 19 nt, synthetic construct
  misc_feature 1..19: note = Description of Artificial Sequence: Synthetic oligonucleotide
  source 1..19: mol_type = other RNA
acatggagacttcaggcgg

SEQ ID NO: 714 - RNA, 19 nt, synthetic construct
  misc_feature 1..19: note = Description of Artificial Sequence: Synthetic oligonucleotide
  source 1..19: mol_type = other RNA
catggagacttcaggcgga

SEQ ID NO: 715 - RNA, 19 nt, synthetic construct
  misc_feature 1..19: note = Description of Artificial Sequence: Synthetic oligonucleotide
  source 1..19: mol_type = other RNA
atggagacttcaggcggag

SEQ ID NO: 716 - RNA, 19 nt, synthetic construct
  misc_feature 1..19: note = Description of Artificial Sequence: Synthetic oligonucleotide
  source 1..19: mol_type = other RNA
tggagacttcaggcggagg

SEQ ID NO: 717 - RNA, 19 nt, synthetic construct
  misc_feature 1..19: note = Description of Artificial Sequence: Synthetic oligonucleotide
  source 1..19: mol_type = other RNA
ggagacttcaggcggaggc

SEQ ID NO: 718 - RNA, 19 nt, synthetic construct
  misc_feature 1..19: note = Description of Artificial Sequence: Synthetic oligonucleotide
  source 1..19: mol_type = other RNA
gagacttcaggcggaggct

SEQ ID NO: 719 - RNA, 19 nt, synthetic construct
  misc_feature 1..19: note = Description of Artificial Sequence: Synthetic oligonucleotide
  source 1..19: mol_type = other RNA
agacttcaggcggaggctg

SEQ ID NO: 720 - RNA, 19 nt, synthetic construct
  misc_feature 1..19: note = Description of Artificial Sequence: Synthetic oligonucleotide
  source 1..19: mol_type = other RNA
gacttcaggcggaggctgg

SEQ ID NO: 721 - RNA, 19 nt, synthetic construct
  misc_feature 1..19: note = Description of Artificial Sequence: Synthetic oligonucleotide
  source 1..19: mol_type = other RNA
acttcaggcggaggctgga

SEQ ID NO: 722 - RNA, 19 nt, synthetic construct
  misc_feature 1..19: note = Description of Artificial Sequence: Synthetic oligonucleotide
  source 1..19: mol_type = other RNA
cttcaggcggaggctggac

SEQ ID NO: 723 - RNA, 19 nt, synthetic construct
  misc_feature 1..19: note = Description of Artificial Sequence: Synthetic oligonucleotide
  source 1..19: mol_type = other RNA
ttcaggcggaggctggacc

SEQ ID NO: 724 - RNA, 19 nt, synthetic construct
  misc_feature 1..19: note = Description of Artificial Sequence: Synthetic oligonucleotide
  source 1..19: mol_type = other RNA
tcaggcggaggctggacca

SEQ ID NO: 725 - RNA, 19 nt, synthetic construct
  misc_feature 1..19: note = Description of Artificial Sequence: Synthetic oligonucleotide
  source 1..19: mol_type = other RNA
caggcggaggctggaccat

SEQ ID NO: 726 - RNA, 19 nt, synthetic construct
  misc_feature 1..19: note = Description of Artificial Sequence: Synthetic oligonucleotide
  source 1..19: mol_type = other RNA
aggcggaggctggaccatc

SEQ ID NO: 727 - RNA, 19 nt, synthetic construct
  misc_feature 1..19: note = Description of Artificial Sequence: Synthetic oligonucleotide
  source 1..19: mol_type = other RNA
ggcggaggctggaccatca

SEQ ID NO: 728 - RNA, 19 nt, synthetic construct
  misc_feature 1..19: note = Description of Artificial Sequence: Synthetic oligonucleotide
  source 1..19: mol_type = other RNA
gcggaggctggaccatcat

SEQ ID NO: 729 - RNA, 19 nt, synthetic construct
  misc_feature 1..19: note = Description of Artificial Sequence: Synthetic oligonucleotide
  source 1..19: mol_type = other RNA
cggaggctggaccatcatc

SEQ ID NO: 730 - RNA, 19 nt, synthetic construct
  misc_feature 1..19: note = Description of Artificial Sequence: Synthetic oligonucleotide
  source 1..19: mol_type = other RNA
ggaggctggaccatcatcc

SEQ ID NO: 731 - RNA, 19 nt, synthetic construct
  misc_feature 1..19: note = Description of Artificial Sequence: Synthetic oligonucleotide
  source 1..19: mol_type = other RNA
gaggctggaccatcatcca

SEQ ID NO: 732 - RNA, 19 nt, synthetic construct
  misc_feature 1..19: note = Description of Artificial Sequence: Synthetic oligonucleotide
  source 1..19: mol_type = other RNA
aggctggaccatcatccag

SEQ ID NO: 733 - RNA, 19 nt, synthetic construct
  misc_feature 1..19: note = Description of Artificial Sequence: Synthetic oligonucleotide
  source 1..19: mol_type = other RNA
ggctggaccatcatccaga

SEQ ID NO: 734 - RNA, 19 nt, synthetic construct
  misc_feature 1..19: note = Description of Artificial Sequence: Synthetic oligonucleotide
  source 1..19: mol_type = other RNA
gctggaccatcatccagag

SEQ ID NO: 735 - RNA, 19 nt, synthetic construct
  misc_feature 1..19: note = Description of Artificial Sequence: Synthetic oligonucleotide
  source 1..19: mol_type = other RNA
ctggaccatcatccagaga

SEQ ID NO: 736 - RNA, 19 nt, synthetic construct
  misc_feature 1..19: note = Description of Artificial Sequence: Synthetic oligonucleotide
  source 1..19: mol_type = other RNA
tggaccatcatccagagac

SEQ ID NO: 737 - RNA, 19 nt, synthetic construct
  misc_feature 1..19: note = Description of Artificial Sequence: Synthetic oligonucleotide
  source 1..19: mol_type = other RNA
ggaccatcatccagagacg

SEQ ID NO: 738 - RNA, 19 nt, synthetic construct
  misc_feature 1..19: note = Description of Artificial Sequence: Synthetic oligonucleotide
  source 1..19: mol_type = other RNA
gaccatcatccagagacga

SEQ ID NO: 739 - RNA, 19 nt, synthetic construct
  misc_feature 1..19: note = Description of Artificial Sequence: Synthetic oligonucleotide
  source 1..19: mol_type = other RNA
accatcatccagagacgaa

SEQ ID NO: 740 - RNA, 19 nt, synthetic construct
  misc_feature 1..19: note = Description of Artificial Sequence: Synthetic oligonucleotide
  source 1..19: mol_type = other RNA
ccatcatccagagacgaaa

SEQ ID NO: 741 - RNA, 19 nt, synthetic construct
  misc_feature 1..19: note = Description of Artificial Sequence: Synthetic oligonucleotide
  source 1..19: mol_type = other RNA
catcatccagagacgaaaa

SEQ ID NO: 742 - RNA, 19 nt, synthetic construct
  misc_feature 1..19: note = Description of Artificial Sequence: Synthetic oligonucleotide
  source 1..19: mol_type = other RNA
atcatccagagacgaaaaa

SEQ ID NO: 743 - RNA, 19 nt, synthetic construct
  misc_feature 1..19: note = Description of Artificial Sequence: Synthetic oligonucleotide
  source 1..19: mol_type = other RNA
tcatccagagacgaaaaag

SEQ ID NO: 744 - RNA, 19 nt, synthetic construct
  misc_feature 1..19: note = Description of Artificial Sequence: Synthetic oligonucleotide
  source 1..19: mol_type = other RNA
catccagagacgaaaaagt

SEQ ID NO: 745 - RNA, 19 nt, synthetic construct
  misc_feature 1..19: note = Description of Artificial Sequence: Synthetic oligonucleotide
  source 1..19: mol_type = other RNA
atccagagacgaaaaagtg

SEQ ID NO: 746 - RNA, 19 nt, synthetic construct
  misc_feature 1..19: note = Description of Artificial Sequence: Synthetic oligonucleotide
  source 1..19: mol_type = other RNA
tccagagacgaaaaagtgg

SEQ ID NO: 747 - RNA, 19 nt, synthetic construct
  misc_feature 1..19: note = Description of Artificial Sequence: Synthetic oligonucleotide
  source 1..19: mol_type = other RNA
ccagagacgaaaaagtggc

SEQ ID NO: 748 - RNA, 19 nt, synthetic construct
  misc_feature 1..19: note = Description of Artificial Sequence: Synthetic oligonucleotide
  source 1..19: mol_type = other RNA
cagagacgaaaaagtggcc

SEQ ID NO: 749 - RNA, 19 nt, synthetic construct
  misc_feature 1..19: note = Description of Artificial Sequence: Synthetic oligonucleotide
  source 1..19: mol_type = other RNA
agagacgaaaaagtggcct

SEQ ID NO: 750 - RNA, 19 nt, synthetic construct
  misc_feature 1..19: note = Description of Artificial Sequence: Synthetic oligonucleotide
  source 1..19: mol_type = other RNA
gagacgaaaaagtggcctt

SEQ ID NO: 751 - RNA, 19 nt, synthetic construct
  misc_feature 1..19: note = Description of Artificial Sequence: Synthetic oligonucleotide
  source 1..19: mol_type = other RNA
agacgaaaaagtggccttg

SEQ ID NO: 752 - RNA, 19 nt, synthetic construct
  misc_feature 1..19: note = Description of Artificial Sequence: Synthetic oligonucleotide
  source 1..19: mol_type = other RNA
gacgaaaaagtggccttgt

SEQ ID NO: 753 - RNA, 19 nt, synthetic construct
  misc_feature 1..19: note = Description of Artificial Sequence: Synthetic oligonucleotide
  source 1..19: mol_type = other RNA
acgaaaaagtggccttgtc

SEQ ID NO: 754 - RNA, 19 nt, synthetic construct
  misc_feature 1..19: note = Description of Artificial Sequence: Synthetic oligonucleotide
  source 1..19: mol_type = other RNA
cgaaaaagtggccttgtct

SEQ ID NO: 755 - RNA, 19 nt, synthetic construct
  misc_feature 1..19: note = Description of Artificial Sequence: Synthetic oligonucleotide
  source 1..19: mol_type = other RNA
gaaaaagtggccttgtctc

SEQ ID NO: 756 - RNA, 19 nt, synthetic construct
  misc_feature 1..19: note = Description of Artificial Sequence: Synthetic oligonucleotide
  source 1..19: mol_type = other RNA
aaaaagtggccttgtctcc

SEQ ID NO: 757 - RNA, 19 nt, synthetic construct
  misc_feature 1..19: note = Description of Artificial Sequence: Synthetic oligonucleotide
  source 1..19: mol_type = other RNA
aaaagtggccttgtctcct

SEQ ID NO: 758 - RNA, 19 nt, synthetic construct
  misc_feature 1..19: note = Description of Artificial Sequence: Synthetic oligonucleotide
  source 1..19: mol_type = other RNA
aaagtggccttgtctcctt

SEQ ID NO: 759 - RNA, 19 nt, synthetic construct
  misc_feature 1..19: note = Description of Artificial Sequence: Synthetic oligonucleotide
  source 1..19: mol_type = other RNA
aagtggccttgtctccttc

SEQ ID NO: 760 - RNA, 19 nt, synthetic construct
  misc_feature 1..19: note = Description of Artificial Sequence: Synthetic oligonucleotide
  source 1..19: mol_type = other RNA
agtggccttgtctccttct

SEQ ID NO: 761 - RNA, 19 nt, synthetic construct
  misc_feature 1..19: note = Description of Artificial Sequence: Synthetic oligonucleotide
  source 1..19: mol_type = other RNA
gtggccttgtctccttcta

SEQ ID NO: 762 - RNA, 19 nt, synthetic construct
  misc_feature 1..19: note = Description of Artificial Sequence: Synthetic oligonucleotide
  source 1..19: mol_type = other RNA
tggccttgtctccttctac

SEQ ID NO: 763 - RNA, 19 nt, synthetic construct
  misc_feature 1..19: note = Description of Artificial Sequence: Synthetic oligonucleotide
  source 1..19: mol_type = other RNA
ggccttgtctccttctacc

SEQ ID NO: 764 - RNA, 19 nt, synthetic construct
  misc_feature 1..19: note = Description of Artificial Sequence: Synthetic oligonucleotide
  source 1..19: mol_type = other RNA
gccttgtctccttctaccg

SEQ ID NO: 765 - RNA, 19 nt, synthetic construct
  misc_feature 1..19: note = Description of Artificial Sequence: Synthetic oligonucleotide
  source 1..19: mol_type = other RNA
ccttgtctccttctaccgg

SEQ ID NO: 766 - RNA, 19 nt, synthetic construct
  misc_feature 1..19: note = Description of Artificial Sequence: Synthetic oligonucleotide
  source 1..19: mol_type = other RNA
cttgtctccttctaccggg

SEQ ID NO: 767 - RNA, 19 nt, synthetic construct
  misc_feature 1..19: note = Description of Artificial Sequence: Synthetic oligonucleotide
  source 1..19: mol_type = other RNA
ttgtctccttctaccggga

SEQ ID NO: 768 - RNA, 19 nt, synthetic construct
  misc_feature 1..19: note = Description of Artificial Sequence: Synthetic oligonucleotide
  source 1..19: mol_type = other RNA
tgtctccttctaccgggac

SEQ ID NO: 769 - RNA, 19 nt, synthetic construct
  misc_feature 1..19: note = Description of Artificial Sequence: Synthetic oligonucleotide
  source 1..19: mol_type = other RNA
gtctccttctaccgggact

SEQ ID NO: 770 - RNA, 19 nt, synthetic construct
  misc_feature 1..19: note = Description of Artificial Sequence: Synthetic oligonucleotide
  source 1..19: mol_type = other RNA
tctccttctaccgggactg

SEQ ID NO: 771 - RNA, 19 nt, synthetic construct
  misc_feature 1..19: note = Description of Artificial Sequence: Synthetic oligonucleotide
  source 1..19: mol_type = other RNA
ctccttctaccgggactgg

SEQ ID NO: 772 - RNA, 19 nt, synthetic construct
  misc_feature 1..19: note = Description of Artificial Sequence: Synthetic oligonucleotide
  source 1..19: mol_type = other RNA
tccttctaccgggactgga

SEQ ID NO: 773 - RNA, 19 nt, synthetic construct
  misc_feature 1..19: note = Description of Artificial Sequence: Synthetic oligonucleotide
  source 1..19: mol_type = other RNA
ccttctaccgggactggaa

SEQ ID NO: 774 - RNA, 19 nt, synthetic construct
  misc_feature 1..19: note = Description of Artificial Sequence: Synthetic oligonucleotide
  source 1..19: mol_type = other RNA
cttctaccgggactggaag

SEQ ID NO: 775 - RNA, 19 nt, synthetic construct
  misc_feature 1..19: note = Description of Artificial Sequence: Synthetic oligonucleotide
  source 1..19: mol_type = other RNA
ttctaccgggactggaagc

SEQ ID NO: 776 - RNA, 19 nt, synthetic construct
  misc_feature 1..19: note = Description of Artificial Sequence: Synthetic oligonucleotide
  source 1..19: mol_type = other RNA
tctaccgggactggaagca

SEQ ID NO: 777 - RNA, 19 nt, synthetic construct
  misc_feature 1..19: note = Description of Artificial Sequence: Synthetic oligonucleotide
  source 1..19: mol_type = other RNA
ctaccgggactggaagcag

SEQ ID NO: 778 - RNA, 19 nt, synthetic construct
  misc_feature 1..19: note = Description of Artificial Sequence: Synthetic oligonucleotide
  source 1..19: mol_type = other RNA
taccgggactggaagcagt

SEQ ID NO: 779 - RNA, 19 nt, synthetic construct
  misc_feature 1..19: note = Description of Artificial Sequence: Synthetic oligonucleotide
  source 1..19: mol_type = other RNA
accgggactggaagcagta

SEQ ID NO: 780 - RNA, 19 nt, synthetic construct
  misc_feature 1..19: note = Description of Artificial Sequence: Synthetic oligonucleotide
  source 1..19: mol_type = other RNA
ccgggactggaagcagtac

SEQ ID NO: 781 - RNA, 19 nt, synthetic construct
  misc_feature 1..19: note = Description of Artificial Sequence: Synthetic oligonucleotide
  source 1..19: mol_type = other RNA
cgggactggaagcagtaca

SEQ ID NO: 782 - RNA, 19 nt, synthetic construct
  misc_feature 1..19: note = Description of Artificial Sequence: Synthetic oligonucleotide
  source 1..19: mol_type = other RNA
gggactggaagcagtacaa

SEQ ID NO: 783 - RNA, 19 nt, synthetic construct
  misc_feature 1..19: note = Description of Artificial Sequence: Synthetic oligonucleotide
  source 1..19: mol_type = other RNA
ggactggaagcagtacaag

SEQ ID NO: 784 - RNA, 19 nt, synthetic construct
  misc_feature 1..19: note = Description of Artificial Sequence: Synthetic oligonucleotide
  source 1..19: mol_type = other RNA
gactggaagcagtacaagc

SEQ ID NO: 785 - RNA, 19 nt, synthetic construct
  misc_feature 1..19: note = Description of Artificial Sequence: Synthetic oligonucleotide
  source 1..19: mol_type = other RNA
actggaagcagtacaagca

SEQ ID NO: 786 - RNA, 19 nt, synthetic construct
  misc_feature 1..19: note = Description of Artificial Sequence: Synthetic oligonucleotide
  source 1..19: mol_type = other RNA
ctggaagcagtacaagcag

SEQ ID NO: 787 - RNA, 19 nt, synthetic construct
  misc_feature 1..19: note = Description of Artificial Sequence: Synthetic oligonucleotide
  source 1..19: mol_type = other RNA
tggaagcagtacaagcagg

SEQ ID NO: 788 - RNA, 19 nt, synthetic construct
  misc_feature 1..19: note = Description of Artificial Sequence: Synthetic oligonucleotide
  source 1..19: mol_type = other RNA
ggaagcagtacaagcaggg

SEQ ID NO: 789 - RNA, 19 nt, synthetic construct
  misc_feature 1..19: note = Description of Artificial Sequence: Synthetic oligonucleotide
  source 1..19: mol_type = other RNA
gaagcagtacaagcagggc

SEQ ID NO: 790 - RNA, 19 nt, synthetic construct
  misc_feature 1..19: note = Description of Artificial Sequence: Synthetic oligonucleotide
  source 1..19: mol_type = other RNA
aagcagtacaagcagggct

SEQ ID NO: 791 - RNA, 19 nt, synthetic construct
  misc_feature 1..19: note = Description of Artificial Sequence: Synthetic oligonucleotide
  source 1..19: mol_type = other RNA
agcagtacaagcagggctt

SEQ ID NO: 792 - RNA, 19 nt, synthetic construct
  misc_feature 1..19: note = Description of Artificial Sequence: Synthetic oligonucleotide
  source 1..19: mol_type = other RNA
gcagtacaagcagggcttt

SEQ ID NO: 793 - RNA, 19 nt, synthetic construct
  misc_feature 1..19: note = Description of Artificial Sequence: Synthetic oligonucleotide
  source 1..19: mol_type = other RNA
cagtacaagcagggctttg

SEQ ID NO: 794 - RNA, 19 nt, synthetic construct
  misc_feature 1..19: note = Description of Artificial Sequence: Synthetic oligonucleotide
  source 1..19: mol_type = other RNA
agtacaagcagggctttgg

SEQ ID NO: 795 - RNA, 19 nt, synthetic construct
  misc_feature 1..19: note = Description of Artificial Sequence: Synthetic oligonucleotide
  source 1..19: mol_type = other RNA
gtacaagcagggctttggc

SEQ ID NO: 796 - RNA, 19 nt, synthetic construct
  misc_feature 1..19: note = Description of Artificial Sequence: Synthetic oligonucleotide
  source 1..19: mol_type = other RNA
tacaagcagggctttggca

SEQ ID NO: 797 - RNA, 19 nt, synthetic construct
  misc_feature 1..19: note = Description of Artificial Sequence: Synthetic oligonucleotide
  source 1..19: mol_type = other RNA
acaagcagggctttggcag

SEQ ID NO: 798 - RNA, 19 nt, synthetic construct
  misc_feature 1..19: note = Description of Artificial Sequence: Synthetic oligonucleotide
  source 1..19: mol_type = other RNA
caagcagggctttggcagc

SEQ ID NO: 799 - RNA, 19 nt, synthetic construct
  misc_feature 1..19: note = Description of Artificial Sequence: Synthetic oligonucleotide
  source 1..19: mol_type = other RNA
aagcagggctttggcagca

SEQ ID NO: 800 - RNA, 19 nt, synthetic construct
  misc_feature 1..19: note = Description of Artificial Sequence: Synthetic oligonucleotide
  source 1..19: mol_type = other RNA
agcagggctttggcagcat

SEQ ID NO: 801 - RNA, 19 nt, synthetic construct
  misc_feature 1..19: note = Description of Artificial Sequence: Synthetic oligonucleotide
  source 1..19: mol_type = other RNA
gcagggctttggcagcatc

SEQ ID NO: 802 - RNA, 19 nt, synthetic construct
  misc_feature 1..19: note = Description of Artificial Sequence: Synthetic oligonucleotide
  source 1..19: mol_type = other RNA
cagggctttggcagcatcc

SEQ ID NO: 803 - RNA, 19 nt, synthetic construct
  misc_feature 1..19: note = Description of Artificial Sequence: Synthetic oligonucleotide
  source 1..19: mol_type = other RNA
agggctttggcagcatccg

SEQ ID NO: 804 - RNA, 19 nt, synthetic construct
  misc_feature 1..19: note = Description of Artificial Sequence: Synthetic oligonucleotide
  source 1..19: mol_type = other RNA
gggctttggcagcatccgt

SEQ ID NO: 805 - RNA, 19 nt, synthetic construct
  misc_feature 1..19: note = Description of Artificial Sequence: Synthetic oligonucleotide
  source 1..19: mol_type = other RNA
ggctttggcagcatccgtg

SEQ ID NO: 806 - RNA, 19 nt, synthetic construct
  misc_feature 1..19: note = Description of Artificial Sequence: Synthetic oligonucleotide
  source 1..19: mol_type = other RNA
gctttggcagcatccgtgg

SEQ ID NO: 807 - RNA, 19 nt, synthetic construct
  misc_feature 1..19: note = Description of Artificial Sequence: Synthetic oligonucleotide
  source 1..19: mol_type = other RNA
ctttggcagcatccgtggg

SEQ ID NO: 808 - RNA, 19 nt, synthetic construct
  misc_feature 1..19: note = Description of Artificial Sequence: Synthetic oligonucleotide
  source 1..19: mol_type = other RNA
tttggcagcatccgtgggg

SEQ ID NO: 809 - RNA, 19 nt, synthetic construct
  misc_feature 1..19: note = Description of Artificial Sequence: Synthetic oligonucleotide
  source 1..19: mol_type = other RNA
ttggcagcatccgtgggga

SEQ ID NO: 810 - RNA, 19 nt, synthetic construct
  misc_feature 1..19: note = Description of Artificial Sequence: Synthetic oligonucleotide
  source 1..19: mol_type = other RNA
tggcagcatccgtggggac

SEQ ID NO: 811 - RNA, 19 nt, synthetic construct
  misc_feature 1..19: note = Description of Artificial Sequence: Synthetic oligonucleotide
  source 1..19: mol_type = other RNA
ggcagcatccgtggggact

SEQ ID NO: 812 - RNA, 19 nt, synthetic construct
  misc_feature 1..19: note = Description of Artificial Sequence: Synthetic oligonucleotide
  source 1..19: mol_type = other RNA
gcagcatccgtggggactt

SEQ ID NO: 813 - RNA, 19 nt, synthetic construct
  misc_feature 1..19: note = Description of Artificial Sequence: Synthetic oligonucleotide
  source 1..19: mol_type = other RNA
cagcatccgtggggacttc

SEQ ID NO: 814 - RNA, 19 nt, synthetic construct
  misc_feature 1..19: note = Description of Artificial Sequence: Synthetic oligonucleotide
  source 1..19: mol_type = other RNA
agcatccgtggggacttct

SEQ ID NO: 815 - RNA, 19 nt, synthetic construct
  misc_feature 1..19: note = Description of Artificial Sequence: Synthetic oligonucleotide
  source 1..19: mol_type = other RNA
gcatccgtggggacttctg

SEQ ID NO: 816 - RNA, 19 nt, synthetic construct
  misc_feature 1..19: note = Description of Artificial Sequence: Synthetic oligonucleotide
  source 1..19: mol_type = other RNA
catccgtggggacttctgg

SEQ ID NO: 817 - RNA, 19 nt, synthetic construct
  misc_feature 1..19: note = Description of Artificial Sequence: Synthetic oligonucleotide
  source 1..19: mol_type = other RNA
atccgtggggacttctggc

SEQ ID NO: 818 - RNA, 19 nt, synthetic construct
  misc_feature 1..19: note = Description of Artificial Sequence: Synthetic oligonucleotide
  source 1..19: mol_type = other RNA
tccgtggggacttctggct

SEQ ID NO: 819 - RNA, 19 nt, synthetic construct
  misc_feature 1..19: note = Description of Artificial Sequence: Synthetic oligonucleotide
  source 1..19: mol_type = other RNA
ccgtggggacttctggctg

SEQ ID NO: 820 - RNA, 19 nt, synthetic construct
  misc_feature 1..19: note = Description of Artificial Sequence: Synthetic oligonucleotide
  source 1..19: mol_type = other RNA
cgtggggacttctggctgg

SEQ ID NO: 821 - RNA, 19 nt, synthetic construct
  misc_feature 1..19: note = Description of Artificial Sequence: Synthetic oligonucleotide
  source 1..19: mol_type = other RNA
gtggggacttctggctggg

SEQ ID NO: 822 - RNA, 19 nt, synthetic construct
  misc_feature 1..19: note = Description of Artificial Sequence: Synthetic oligonucleotide
  source 1..19: mol_type = other RNA
tggggacttctggctgggg

SEQ ID NO: 823 - RNA, 19 nt, synthetic construct
  misc_feature 1..19: note = Description of Artificial Sequence: Synthetic oligonucleotide
  source 1..19: mol_type = other RNA
ggggacttctggctgggga

SEQ ID NO: 824 - RNA, 19 nt, synthetic construct
  misc_feature 1..19: note = Description of Artificial Sequence: Synthetic oligonucleotide
  source 1..19: mol_type = other RNA
gggacttctggctggggaa

SEQ ID NO: 825 - RNA, 19 nt, synthetic construct
  misc_feature 1..19: note = Description of Artificial Sequence: Synthetic oligonucleotide
  source 1..19: mol_type = other RNA
ggacttctggctggggaac

SEQ ID NO: 826 - RNA, 19 nt, synthetic construct
  misc_feature 1..19: note = Description of Artificial Sequence: Synthetic oligonucleotide
  source 1..19: mol_type = other RNA
gacttctggctggggaacg

SEQ ID NO: 827 - RNA, 19 nt, synthetic construct
  misc_feature 1..19: note = Description of Artificial Sequence: Synthetic oligonucleotide
  source 1..19: mol_type = other RNA
acttctggctggggaacga

SEQ ID NO: 828 - RNA, 19 nt, synthetic construct
  misc_feature 1..19: note = Description of Artificial Sequence: Synthetic oligonucleotide
  source 1..19: mol_type = other RNA
cttctggctggggaacgaa

SEQ ID NO: 829 - RNA, 19 nt, synthetic construct
  misc_feature 1..19: note = Description of Artificial Sequence: Synthetic oligonucleotide
  source 1..19: mol_type = other RNA
ttctggctggggaacgaac

SEQ ID NO: 830 - RNA, 19 nt, synthetic construct
  misc_feature 1..19: note = Description of Artificial Sequence: Synthetic oligonucleotide
  source 1..19: mol_type = other RNA
tctggctggggaacgaaca

SEQ ID NO: 831 - RNA, 19 nt, synthetic construct
  misc_feature 1..19: note = Description of Artificial Sequence: Synthetic oligonucleotide
  source 1..19: mol_type = other RNA
ctggctggggaacgaacac

SEQ ID NO: 832 - RNA, 19 nt, synthetic construct
  misc_feature 1..19: note = Description of Artificial Sequence: Synthetic oligonucleotide
  source 1..19: mol_type = other RNA
tggctggggaacgaacaca

SEQ ID NO: 833 - RNA, 19 nt, synthetic construct
  misc_feature 1..19: note = Description of Artificial Sequence: Synthetic oligonucleotide
  source 1..19: mol_type = other RNA
ggctggggaacgaacacat

SEQ ID NO: 834 - RNA, 19 nt, synthetic construct
  misc_feature 1..19: note = Description of Artificial Sequence: Synthetic oligonucleotide
  source 1..19: mol_type = other RNA
gctggggaacgaacacatc

SEQ ID NO: 835 - RNA, 19 nt, synthetic construct
  misc_feature 1..19: note = Description of Artificial Sequence: Synthetic oligonucleotide
  source 1..19: mol_type = other RNA
ctggggaacgaacacatcc

SEQ ID NO: 836 - RNA, 19 nt, synthetic construct
  misc_feature 1..19: note = Description of Artificial Sequence: Synthetic oligonucleotide
  source 1..19: mol_type = other RNA
tggggaacgaacacatcca

SEQ ID NO: 837 - RNA, 19 nt, synthetic construct
  misc_feature 1..19: note = Description of Artificial Sequence: Synthetic oligonucleotide
  source 1..19: mol_type = other RNA
ggggaacgaacacatccac

SEQ ID NO: 838 - RNA, 19 nt, synthetic construct
  misc_feature 1..19: note = Description of Artificial Sequence: Synthetic oligonucleotide
  source 1..19: mol_type = other RNA
gggaacgaacacatccacc

SEQ ID NO: 839 - RNA, 19 nt, synthetic construct
  misc_feature 1..19: note = Description of Artificial Sequence: Synthetic oligonucleotide
  source 1..19: mol_type = other RNA
ggaacgaacacatccaccg

SEQ ID NO: 840 - RNA, 19 nt, synthetic construct
  misc_feature 1..19: note = Description of Artificial Sequence: Synthetic oligonucleotide
  source 1..19: mol_type = other RNA
gaacgaacacatccaccgg

SEQ ID NO: 841 - RNA, 19 nt, synthetic construct
  misc_feature 1..19: note = Description of Artificial Sequence: Synthetic oligonucleotide
  source 1..19: mol_type = other RNA
aacgaacacatccaccggc

SEQ ID NO: 842 - RNA, 19 nt, synthetic construct
  misc_feature 1..19: note = Description of Artificial Sequence: Synthetic oligonucleotide
  source 1..19: mol_type = other RNA
acgaacacatccaccggct

SEQ ID NO: 843 - RNA, 19 nt, synthetic construct
  misc_feature 1..19: note = Description of Artificial Sequence: Synthetic oligonucleotide
  source 1..19: mol_type = other RNA
cgaacacatccaccggctc

SEQ ID NO: 844 - RNA, 19 nt, synthetic construct
  misc_feature 1..19: note = Description of Artificial Sequence: Synthetic oligonucleotide
  source 1..19: mol_type = other RNA
gaacacatccaccggctct

SEQ ID NO: 845 - RNA, 19 nt, synthetic construct
  misc_feature 1..19: note = Description of Artificial Sequence: Synthetic oligonucleotide
  source 1..19: mol_type = other RNA
aacacatccaccggctctc

SEQ ID NO: 846 - RNA, 19 nt, synthetic construct
  misc_feature 1..19: note = Description of Artificial Sequence: Synthetic oligonucleotide
  source 1..19: mol_type = other RNA
acacatccaccggctctcc

SEQ ID NO: 847 - RNA, 19 nt, synthetic construct
  misc_feature 1..19: note = Description of Artificial Sequence: Synthetic oligonucleotide
  source 1..19: mol_type = other RNA
cacatccaccggctctcca

SEQ ID NO: 848 - RNA, 19 nt, synthetic construct
  misc_feature 1..19: note = Description of Artificial Sequence: Synthetic oligonucleotide
  source 1..19: mol_type = other RNA
acatccaccggctctccag

SEQ ID NO: 849 - RNA, 19 nt, synthetic construct
  misc_feature 1..19: note = Description of Artificial Sequence: Synthetic oligonucleotide
  source 1..19: mol_type = other RNA
catccaccggctctccaga

SEQ ID NO: 850 - RNA, 19 nt, synthetic construct
  misc_feature 1..19: note = Description of Artificial Sequence: Synthetic oligonucleotide
  source 1..19: mol_type = other RNA
atccaccggctctccagac

SEQ ID NO: 851 - RNA, 19 nt, synthetic construct
  misc_feature 1..19: note = Description of Artificial Sequence: Synthetic oligonucleotide
  source 1..19: mol_type = other RNA
tccaccggctctccagaca

SEQ ID NO: 852 - RNA, 19 nt, synthetic construct
  misc_feature 1..19: note = Description of Artificial Sequence: Synthetic oligonucleotide
  source 1..19: mol_type = other RNA
ccaccggctctccagacag

SEQ ID NO: 853 - RNA, 19 nt, synthetic construct
  misc_feature 1..19: note = Description of Artificial Sequence: Synthetic oligonucleotide
  source 1..19: mol_type = other RNA
caccggctctccagacagc

SEQ ID NO: 854 - RNA, 19 nt, synthetic construct
  misc_feature 1..19: note = Description of Artificial Sequence: Synthetic oligonucleotide
  source 1..19: mol_type = other RNA
accggctctccagacagcc

SEQ ID NO: 855 - RNA, 19 nt, synthetic construct
  misc_feature 1..19: note = Description of Artificial Sequence: Synthetic oligonucleotide
  source 1..19: mol_type = other RNA
ccggctctccagacagcca

SEQ ID NO: 856 - RNA, 19 nt, synthetic construct
  misc_feature 1..19: note = Description of Artificial Sequence: Synthetic oligonucleotide
  source 1..19: mol_type = other RNA
cggctctccagacagccaa

SEQ ID NO: 857 - RNA, 19 nt, synthetic construct
  misc_feature 1..19: note = Description of Artificial Sequence: Synthetic oligonucleotide
  source 1..19: mol_type = other RNA
ggctctccagacagccaac

SEQ ID NO: 858 - RNA, 19 nt, synthetic construct
  misc_feature 1..19: note = Description of Artificial Sequence: Synthetic oligonucleotide
  source 1..19: mol_type = other RNA
gctctccagacagccaacc

SEQ ID NO: 859 - RNA, 19 nt, synthetic construct
  misc_feature 1..19: note = Description of Artificial Sequence: Synthetic oligonucleotide
  source 1..19: mol_type = other RNA
ctctccagacagccaaccc

SEQ ID NO: 860 - RNA, 19 nt, synthetic construct
  misc_feature 1..19: note = Description of Artificial Sequence: Synthetic oligonucleotide
  source 1..19: mol_type = other RNA
tctccagacagccaacccg

SEQ ID NO: 861 - RNA, 19 nt, synthetic construct
  misc_feature 1..19: note = Description of Artificial Sequence: Synthetic oligonucleotide
  source 1..19: mol_type = other RNA
ctccagacagccaacccgg

SEQ ID NO: 862 - RNA, 19 nt, synthetic construct
  misc_feature 1..19: note = Description of Artificial Sequence: Synthetic oligonucleotide
  source 1..19: mol_type = other RNA
tccagacagccaacccggc

SEQ ID NO: 863 - RNA, 19 nt, synthetic construct
  misc_feature 1..19: note = Description of Artificial Sequence: Synthetic oligonucleotide
  source 1..19: mol_type = other RNA
ccagacagccaacccggct

SEQ ID NO: 864 - RNA, 19 nt, synthetic construct
  misc_feature 1..19: note = Description of Artificial Sequence: Synthetic oligonucleotide
  source 1..19: mol_type = other RNA
cagacagccaacccggctg

SEQ ID NO: 865 - RNA, 19 nt, synthetic construct
  misc_feature 1..19: note = Description of Artificial Sequence: Synthetic oligonucleotide
  source 1..19: mol_type = other RNA
agacagccaacccggctgc

SEQ ID NO: 866 - RNA, 19 nt, synthetic construct
  misc_feature 1..19: note = Description of Artificial Sequence: Synthetic oligonucleotide
  source 1..19: mol_type = other RNA
gacagccaacccggctgcg

SEQ ID NO: 867 - RNA, 19 nt, synthetic construct
  misc_feature 1..19: note = Description of Artificial Sequence: Synthetic oligonucleotide
  source 1..19: mol_type = other RNA
acagccaacccggctgcgt

SEQ ID NO: 868 - RNA, 19 nt, synthetic construct
  misc_feature 1..19: note = Description of Artificial Sequence: Synthetic oligonucleotide
  source 1..19: mol_type = other RNA
cagccaacccggctgcgtg

SEQ ID NO: 869 - RNA, 19 nt, synthetic construct
  misc_feature 1..19: note = Description of Artificial Sequence: Synthetic oligonucleotide
  source 1..19: mol_type = other RNA
agccaacccggctgcgtgt

SEQ ID NO: 870 - RNA, 19 nt, synthetic construct
  misc_feature 1..19: note = Description of Artificial Sequence: Synthetic oligonucleotide
  source 1..19: mol_type = other RNA
gccaacccggctgcgtgta

SEQ ID NO: 871 - RNA, 19 nt, synthetic construct
  misc_feature 1..19: note = Description of Artificial Sequence: Synthetic oligonucleotide
  source 1..19: mol_type = other RNA
ccaacccggctgcgtgtag

SEQ ID NO: 872 - RNA, 19 nt, synthetic construct
  misc_feature 1..19: note = Description of Artificial Sequence: Synthetic oligonucleotide
  source 1..19: mol_type = other RNA
caacccggctgcgtgtaga

SEQ ID NO: 873 - RNA, 19 nt, synthetic construct
  misc_feature 1..19: note = Description of Artificial Sequence: Synthetic oligonucleotide
  source 1..19: mol_type = other RNA
aacccggctgcgtgtagag

SEQ ID NO: 874 - RNA, 19 nt, synthetic construct
  misc_feature 1..19: note = Description of Artificial Sequence: Synthetic oligonucleotide
  source 1..19: mol_type = other RNA
acccggctgcgtgtagaga

SEQ ID NO: 875 - RNA, 19 nt, synthetic construct
  misc_feature 1..19: note = Description of Artificial Sequence: Synthetic oligonucleotide
  source 1..19: mol_type = other RNA
cccggctgcgtgtagagat

SEQ ID NO: 876 - RNA, 19 nt, synthetic construct
  misc_feature 1..19: note = Description of Artificial Sequence: Synthetic oligonucleotide
  source 1..19: mol_type = other RNA
ccggctgcgtgtagagatg

SEQ ID NO: 877 - RNA, 19 nt, synthetic construct
  misc_feature 1..19: note = Description of Artificial Sequence: Synthetic oligonucleotide
  source 1..19: mol_type = other RNA
cggctgcgtgtagagatgg

SEQ ID NO: 878 - RNA, 19 nt, synthetic construct
  misc_feature 1..19: note = Description of Artificial Sequence: Synthetic oligonucleotide
  source 1..19: mol_type = other RNA
ggctgcgtgtagagatgga

SEQ ID NO: 879 - RNA, 19 nt, synthetic construct
  misc_feature 1..19: note = Description of Artificial Sequence: Synthetic oligonucleotide
  source 1..19: mol_type = other RNA
gctgcgtgtagagatggag

SEQ ID NO: 880 - RNA, 19 nt, synthetic construct
  misc_feature 1..19: note = Description of Artificial Sequence: Synthetic oligonucleotide
  source 1..19: mol_type = other RNA
ctgcgtgtagagatggagg

SEQ ID NO: 881 - RNA, 19 nt, synthetic construct
  misc_feature 1..19: note = Description of Artificial Sequence: Synthetic oligonucleotide
  source 1..19: mol_type = other RNA
tgcgtgtagagatggagga

SEQ ID NO: 882 - RNA, 19 nt, synthetic construct
  misc_feature 1..19: note = Description of Artificial Sequence: Synthetic oligonucleotide
  source 1..19: mol_type = other RNA
gcgtgtagagatggaggac

SEQ ID NO: 883 - RNA, 19 nt, synthetic construct
  misc_feature 1..19: note = Description of Artificial Sequence: Synthetic oligonucleotide
  source 1..19: mol_type = other RNA
cgtgtagagatggaggact

SEQ ID NO: 884 - RNA, 19 nt, synthetic construct
  misc_feature 1..19: note = Description of Artificial Sequence: Synthetic oligonucleotide
  source 1..19: mol_type = other RNA
gtgtagagatggaggactg

SEQ ID NO: 885 - RNA, 19 nt, synthetic construct
  misc_feature 1..19: note = Description of Artificial Sequence: Synthetic oligonucleotide
  source 1..19: mol_type = other RNA
tgtagagatggaggactgg

SEQ ID NO: 886 - RNA, 19 nt, synthetic construct
  misc_feature 1..19: note = Description of Artificial Sequence: Synthetic oligonucleotide
  source 1..19: mol_type = other RNA
gtagagatggaggactggg

SEQ ID NO: 887 - RNA, 19 nt, synthetic construct
  misc_feature 1..19: note = Description of Artificial Sequence: Synthetic oligonucleotide
  source 1..19: mol_type = other RNA
tagagatggaggactggga

SEQ ID NO: 888 - RNA, 19 nt, synthetic construct
  misc_feature 1..19: note = Description of Artificial Sequence: Synthetic oligonucleotide
  source 1..19: mol_type = other RNA
agagatggaggactgggag

SEQ ID NO: 889 - RNA, 19 nt, synthetic construct
  misc_feature 1..19: note = Description of Artificial Sequence: Synthetic oligonucleotide
  source 1..19: mol_type = other RNA
gagatggaggactgggagg

SEQ ID NO: 890 - RNA, 19 nt, synthetic construct
  misc_feature 1..19: note = Description of Artificial Sequence: Synthetic oligonucleotide
  source 1..19: mol_type = other RNA
agatggaggactgggaggg

SEQ ID NO: 891 - RNA, 19 nt, synthetic construct
  misc_feature 1..19: note = Description of Artificial Sequence: Synthetic oligonucleotide
  source 1..19: mol_type = other RNA
gatggaggactgggagggc

SEQ ID NO: 892 - RNA, 19 nt, synthetic construct
  misc_feature 1..19: note = Description of Artificial Sequence: Synthetic oligonucleotide
  source 1..19: mol_type = other RNA
atggaggactgggagggca

SEQ ID NO: 893 - RNA, 19 nt, synthetic construct
  misc_feature 1..19: note = Description of Artificial Sequence: Synthetic oligonucleotide
  source 1..19: mol_type = other RNA
tggaggactgggagggcaa

SEQ ID NO: 894 - RNA, 19 nt, synthetic construct
  misc_feature 1..19: note = Description of Artificial Sequence: Synthetic oligonucleotide
  source 1..19: mol_type = other RNA
ggaggactgggagggcaac

SEQ ID NO: 895 - RNA, 19 nt, synthetic construct
  misc_feature 1..19: note = Description of Artificial Sequence: Synthetic oligonucleotide
  source 1..19: mol_type = other RNA
gaggactgggagggcaacc

SEQ ID NO: 896 - RNA, 19 nt, synthetic construct
  misc_feature 1..19: note = Description of Artificial Sequence: Synthetic oligonucleotide
  source 1..19: mol_type = other RNA
aggactgggagggcaacct

SEQ ID NO: 897 - RNA, 19 nt, synthetic construct
  misc_feature 1..19: note = Description of Artificial Sequence: Synthetic oligonucleotide
  source 1..19: mol_type = other RNA
ggactgggagggcaacctg

SEQ ID NO: 898 - RNA, 19 nt, synthetic construct
  misc_feature 1..19: note = Description of Artificial Sequence: Synthetic oligonucleotide
  source 1..19: mol_type = other RNA
gactgggagggcaacctgc

SEQ ID NO: 899 - RNA, 19 nt, synthetic construct
  misc_feature 1..19: note = Description of Artificial Sequence: Synthetic oligonucleotide
  source 1..19: mol_type = other RNA
actgggagggcaacctgcg

SEQ ID NO: 900 - RNA, 19 nt, synthetic construct
  misc_feature 1..19: note = Description of Artificial Sequence: Synthetic oligonucleotide
  source 1..19: mol_type = other RNA
ctgggagggcaacctgcgc

SEQ ID NO: 901 - RNA, 19 nt, synthetic construct
  misc_feature 1..19: note = Description of Artificial Sequence: Synthetic oligonucleotide
  source 1..19: mol_type = other RNA
tgggagggcaacctgcgct

SEQ ID NO: 902 - RNA, 19 nt, synthetic construct
  misc_feature 1..19: note = Description of Artificial Sequence: Synthetic oligonucleotide
  source 1..19: mol_type = other RNA
gggagggcaacctgcgcta

SEQ ID NO: 903 - RNA, 19 nt, synthetic construct
  misc_feature 1..19: note = Description of Artificial Sequence: Synthetic oligonucleotide
  source 1..19: mol_type = other RNA
ggagggcaacctgcgctac

SEQ ID NO: 904 - RNA, 19 nt, synthetic construct
  misc_feature 1..19: note = Description of Artificial Sequence: Synthetic oligonucleotide
  source 1..19: mol_type = other RNA
gagggcaacctgcgctacg

SEQ ID NO: 905 - RNA, 19 nt, synthetic construct
  misc_feature 1..19: note = Description of Artificial Sequence: Synthetic oligonucleotide
  source 1..19: mol_type = other RNA
agggcaacctgcgctacgc

SEQ ID NO: 906 - RNA, 19 nt, synthetic construct
  misc_feature 1..19: note = Description of Artificial Sequence: Synthetic oligonucleotide
  source 1..19: mol_type = other RNA
gggcaacctgcgctacgct

SEQ ID NO: 907 - RNA, 19 nt, synthetic construct
  misc_feature 1..19: note = Description of Artificial Sequence: Synthetic oligonucleotide
  source 1..19: mol_type = other RNA
ggcaacctgcgctacgctg

SEQ ID NO: 908 - RNA, 19 nt, synthetic construct
  misc_feature 1..19: note = Description of Artificial Sequence: Synthetic oligonucleotide
  source 1..19: mol_type = other RNA
gcaacctgcgctacgctga

SEQ ID NO: 909 - RNA, 19 nt, synthetic construct
  misc_feature 1..19: note = Description of Artificial Sequence: Synthetic oligonucleotide
  source 1..19: mol_type = other RNA
caacctgcgctacgctgag

SEQ ID NO: 910 - RNA, 19 nt, synthetic construct
  misc_feature 1..19: note = Description of Artificial Sequence: Synthetic oligonucleotide
  source 1..19: mol_type = other RNA
aacctgcgctacgctgagt

SEQ ID NO: 911 - RNA, 19 nt, synthetic construct
  misc_feature 1..19: note = Description of Artificial Sequence: Synthetic oligonucleotide
  source 1..19: mol_type = other RNA
acctgcgctacgctgagta

SEQ ID NO: 912 - RNA, 19 nt, synthetic construct
  misc_feature 1..19: note = Description of Artificial Sequence: Synthetic oligonucleotide
  source 1..19: mol_type = other RNA
cctgcgctacgctgagtat

SEQ ID NO: 913 - RNA, 19 nt, synthetic construct
  misc_feature 1..19: note = Description of Artificial Sequence: Synthetic oligonucleotide
  source 1..19: mol_type = other RNA
ctgcgctacgctgagtata

SEQ ID NO: 914 - RNA, 19 nt, synthetic construct
  misc_feature 1..19: note = Description of Artificial Sequence: Synthetic oligonucleotide
  source 1..19: mol_type = other RNA
tgcgctacgctgagtatag

SEQ ID NO: 915 - RNA, 19 nt, synthetic construct
  misc_feature 1..19: note = Description of Artificial Sequence: Synthetic oligonucleotide
  source 1..19: mol_type = other RNA
gcgctacgctgagtatagc

SEQ ID NO: 916 - RNA, 19 nt, synthetic construct
  misc_feature 1..19: note = Description of Artificial Sequence: Synthetic oligonucleotide
  source 1..19: mol_type = other RNA
cgctacgctgagtatagcc

SEQ ID NO: 917 - RNA, 19 nt, synthetic construct
  misc_feature 1..19: note = Description of Artificial Sequence: Synthetic oligonucleotide
  source 1..19: mol_type = other RNA
gctacgctgagtatagcca

SEQ ID NO: 918 - RNA, 19 nt, synthetic construct
  misc_feature 1..19: note = Description of Artificial Sequence: Synthetic oligonucleotide
  source 1..19: mol_type = other RNA
ctacgctgagtatagccac

SEQ ID NO: 919 - RNA, 19 nt, synthetic construct
  misc_feature 1..19: note = Description of Artificial Sequence: Synthetic oligonucleotide
  source 1..19: mol_type = other RNA
tacgctgagtatagccact

SEQ ID NO: 920 - RNA, 19 nt, synthetic construct
  misc_feature 1..19: note = Description of Artificial Sequence: Synthetic oligonucleotide
  source 1..19: mol_type = other RNA
acgctgagtatagccactt

SEQ ID NO: 921 - RNA, 19 nt, synthetic construct
  misc_feature 1..19: note = Description of Artificial Sequence: Synthetic oligonucleotide
  source 1..19: mol_type = other RNA
cgctgagtatagccacttt

SEQ ID NO: 922 - RNA, 19 nt, synthetic construct
  misc_feature 1..19: note = Description of Artificial Sequence: Synthetic oligonucleotide
  source 1..19: mol_type = other RNA
gctgagtatagccactttg

SEQ ID NO: 923 - RNA, 19 nt, synthetic construct
  misc_feature 1..19: note = Description of Artificial Sequence: Synthetic oligonucleotide
  source 1..19: mol_type = other RNA
ctgagtatagccactttgt

SEQ ID NO: 924 - RNA, 19 nt, synthetic construct
  misc_feature 1..19: note = Description of Artificial Sequence: Synthetic oligonucleotide
  source 1..19: mol_type = other RNA
tgagtatagccactttgtt

SEQ ID NO: 925 - RNA, 19 nt, synthetic construct
  misc_feature 1..19: note = Description of Artificial Sequence: Synthetic oligonucleotide
  source 1..19: mol_type = other RNA
gagtatagccactttgttt

SEQ ID NO: 926 - RNA, 19 nt, synthetic construct
  misc_feature 1..19: note = Description of Artificial Sequence: Synthetic oligonucleotide
  source 1..19: mol_type = other RNA
agtatagccactttgtttt

SEQ ID NO: 927 - RNA, 19 nt, synthetic construct
  misc_feature 1..19: note = Description of Artificial Sequence: Synthetic oligonucleotide
  source 1..19: mol_type = other RNA
gtatagccactttgttttg

SEQ ID NO: 928 - RNA, 19 nt, synthetic construct
  misc_feature 1..19: note = Description of Artificial Sequence: Synthetic oligonucleotide
  source 1..19: mol_type = other RNA
tatagccactttgttttgg

SEQ ID NO: 929 - RNA, 19 nt, synthetic construct
  misc_feature 1..19: note = Description of Artificial Sequence: Synthetic oligonucleotide
  source 1..19: mol_type = other RNA
atagccactttgttttggg

SEQ ID NO: 930 - RNA, 19 nt, synthetic construct
  misc_feature 1..19: note = Description of Artificial Sequence: Synthetic oligonucleotide
  source 1..19: mol_type = other RNA
tagccactttgttttgggc

SEQ ID NO: 931 - RNA, 19 nt, synthetic construct
  misc_feature 1..19: note = Description of Artificial Sequence: Synthetic oligonucleotide
  source 1..19: mol_type = other RNA
agccactttgttttgggca

SEQ ID NO: 932 - RNA, 19 nt, synthetic construct
  misc_feature 1..19: note = Description of Artificial Sequence: Synthetic oligonucleotide
  source 1..19: mol_type = other RNA
gccactttgttttgggcaa

SEQ ID NO: 933 - RNA, 19 nt, synthetic construct
  misc_feature 1..19: note = Description of Artificial Sequence: Synthetic oligonucleotide
  source 1..19: mol_type = other RNA
ccactttgttttgggcaat

SEQ ID NO: 934 - RNA, 19 nt, synthetic construct
  misc_feature 1..19: note = Description of Artificial Sequence: Synthetic oligonucleotide
  source 1..19: mol_type = other RNA
cactttgttttgggcaatg

SEQ ID NO: 935 - RNA, 19 nt, synthetic construct
  misc_feature 1..19: note = Description of Artificial Sequence: Synthetic oligonucleotide
  source 1..19: mol_type = other RNA
actttgttttgggcaatga

SEQ ID NO: 936 - RNA, 19 nt, synthetic construct
  misc_feature 1..19: note = Description of Artificial Sequence: Synthetic oligonucleotide
  source 1..19: mol_type = other RNA
ctttgttttgggcaatgaa

SEQ ID NO: 937 - RNA, 19 nt, synthetic construct
  misc_feature 1..19: note = Description of Artificial Sequence: Synthetic oligonucleotide
  source 1..19: mol_type = other RNA
tttgttttgggcaatgaac

SEQ ID NO: 938 - RNA, 19 nt, synthetic construct
  misc_feature 1..19: note = Description of Artificial Sequence: Synthetic oligonucleotide
  source 1..19: mol_type = other RNA
ttgttttgggcaatgaact

SEQ ID NO: 939 - RNA, 19 nt, synthetic construct
  misc_feature 1..19: note = Description of Artificial Sequence: Synthetic oligonucleotide
  source 1..19: mol_type = other RNA
tgttttgggcaatgaactc

SEQ ID NO: 940 - RNA, 19 nt, synthetic construct
  misc_feature 1..19: note = Description of Artificial Sequence: Synthetic oligonucleotide
  source 1..19: mol_type = other RNA
gttttgggcaatgaactca

SEQ ID NO: 941 - RNA, 19 nt, synthetic construct
  misc_feature 1..19: note = Description of Artificial Sequence: Synthetic oligonucleotide
  source 1..19: mol_type = other RNA
ttttgggcaatgaactcaa

SEQ ID NO: 942 - RNA, 19 nt, synthetic construct
  misc_feature 1..19: note = Description of Artificial Sequence: Synthetic oligonucleotide
  source 1..19: mol_type = other RNA
tttgggcaatgaactcaac

SEQ ID NO: 943 - RNA, 19 nt, synthetic construct
  misc_feature 1..19: note = Description of Artificial Sequence: Synthetic oligonucleotide
  source 1..19: mol_type = other RNA
ttgggcaatgaactcaaca

SEQ ID NO: 944 - RNA, 19 nt, synthetic construct
  misc_feature 1..19: note = Description of Artificial Sequence: Synthetic oligonucleotide
  source 1..19: mol_type = other RNA
tgggcaatgaactcaacag

SEQ ID NO: 945 - RNA, 19 nt, synthetic construct
  misc_feature 1..19: note = Description of Artificial Sequence: Synthetic oligonucleotide
  source 1..19: mol_type = other RNA
gggcaatgaactcaacagc

SEQ ID NO: 946 - RNA, 19 nt, synthetic construct
  misc_feature 1..19: note = Description of Artificial Sequence: Synthetic oligonucleotide
  source 1..19: mol_type = other RNA
ggcaatgaactcaacagct

SEQ ID NO: 947 - RNA, 19 nt, synthetic construct
  misc_feature 1..19: note = Description of Artificial Sequence: Synthetic oligonucleotide
  source 1..19: mol_type = other RNA
gcaatgaactcaacagcta

SEQ ID NO: 948 - RNA, 19 nt, synthetic construct
  misc_feature 1..19: note = Description of Artificial Sequence: Synthetic oligonucleotide
  source 1..19: mol_type = other RNA
caatgaactcaacagctat

SEQ ID NO: 949 - RNA, 19 nt, synthetic construct
  misc_feature 1..19: note = Description of Artificial Sequence: Synthetic oligonucleotide
  source 1..19: mol_type = other RNA
aatgaactcaacagctatc

SEQ ID NO: 950 - RNA, 19 nt, synthetic construct
  misc_feature 1..19: note = Description of Artificial Sequence: Synthetic oligonucleotide
  source 1..19: mol_type = other RNA
atgaactcaacagctatcg

SEQ ID NO: 951 - RNA, 19 nt, synthetic construct
  misc_feature 1..19: note = Description of Artificial Sequence: Synthetic oligonucleotide
  source 1..19: mol_type = other RNA
tgaactcaacagctatcgc

SEQ ID NO: 952 - RNA, 19 nt, synthetic construct
  misc_feature 1..19: note = Description of Artificial Sequence: Synthetic oligonucleotide
  source 1..19: mol_type = other RNA
gaactcaacagctatcgcc

SEQ ID NO: 953 - RNA, 19 nt, synthetic construct
  misc_feature 1..19: note = Description of Artificial Sequence: Synthetic oligonucleotide
  source 1..19: mol_type = other RNA
aactcaacagctatcgcct

SEQ ID NO: 954 - RNA, 19 nt, synthetic construct
  misc_feature 1..19: note = Description of Artificial Sequence: Synthetic oligonucleotide
  source 1..19: mol_type = other RNA
actcaacagctatcgcctc

SEQ ID NO: 955 - RNA, 19 nt, synthetic construct
  misc_feature 1..19: note = Description of Artificial Sequence: Synthetic oligonucleotide
  source 1..19: mol_type = other RNA
ctcaacagctatcgcctct

SEQ ID NO: 956 - RNA, 19 nt, synthetic construct
  misc_feature 1..19: note = Description of Artificial Sequence: Synthetic oligonucleotide
  source 1..19: mol_type = other RNA
tcaacagctatcgcctctt

SEQ ID NO: 957 - RNA, 19 nt, synthetic construct
  misc_feature 1..19: note = Description of Artificial Sequence: Synthetic oligonucleotide
  source 1..19: mol_type = other RNA
caacagctatcgcctcttc

SEQ ID NO: 958 - RNA, 19 nt, synthetic construct
  misc_feature 1..19: note = Description of Artificial Sequence: Synthetic oligonucleotide
  source 1..19: mol_type = other RNA
aacagctatcgcctcttcc

SEQ ID NO: 959 - RNA, 19 nt, synthetic construct
  misc_feature 1..19: note = Description of Artificial Sequence: Synthetic oligonucleotide
  source 1..19: mol_type = other RNA
acagctatcgcctcttcct

SEQ ID NO: 960 - RNA, 19 nt, synthetic construct
  misc_feature 1..19: note = Description of Artificial Sequence: Synthetic oligonucleotide
  source 1..19: mol_type = other RNA
cagctatcgcctcttcctg

SEQ ID NO: 961 - RNA, 19 nt, synthetic construct
  misc_feature 1..19: note = Description of Artificial Sequence: Synthetic oligonucleotide
  source 1..19: mol_type = other RNA
agctatcgcctcttcctgg

SEQ ID NO: 962 - RNA, 19 nt, synthetic construct
  misc_feature 1..19: note = Description of Artificial Sequence: Synthetic oligonucleotide
  source 1..19: mol_type = other RNA
gctatcgcctcttcctggg

SEQ ID NO: 963 - RNA, 19 nt, synthetic construct
  misc_feature 1..19: note = Description of Artificial Sequence: Synthetic oligonucleotide
  source 1..19: mol_type = other RNA
ctatcgcctcttcctgggg

SEQ ID NO: 964 - RNA, 19 nt, synthetic construct
  misc_feature 1..19: note = Description of Artificial Sequence: Synthetic oligonucleotide
  source 1..19: mol_type = other RNA
tatcgcctcttcctgggga

SEQ ID NO: 965 - RNA, 19 nt, synthetic construct
  misc_feature 1..19: note = Description of Artificial Sequence: Synthetic oligonucleotide
  source 1..19: mol_type = other RNA
atcgcctcttcctggggaa

SEQ ID NO: 966 - RNA, 19 nt, synthetic construct
  misc_feature 1..19: note = Description of Artificial Sequence: Synthetic oligonucleotide
  source 1..19: mol_type = other RNA
tcgcctcttcctggggaac

SEQ ID NO: 967 - RNA, 19 nt, synthetic construct
  misc_feature 1..19: note = Description of Artificial Sequence: Synthetic oligonucleotide
  source 1..19: mol_type = other RNA
cgcctcttcctggggaact

SEQ ID NO: 968 - RNA, 19 nt, synthetic construct
  misc_feature 1..19: note = Description of Artificial Sequence: Synthetic oligonucleotide
  source 1..19: mol_type = other RNA
gcctcttcctggggaacta

SEQ ID NO: 969 - RNA, 19 nt, synthetic construct
  misc_feature 1..19: note = Description of Artificial Sequence: Synthetic oligonucleotide
  source 1..19: mol_type = other RNA
cctcttcctggggaactac

SEQ ID NO: 970 - RNA, 19 nt, synthetic construct
  misc_feature 1..19: note = Description of Artificial Sequence: Synthetic oligonucleotide
  source 1..19: mol_type = other RNA
ctcttcctggggaactaca

SEQ ID NO: 971 - RNA, 19 nt, synthetic construct
  misc_feature 1..19: note = Description of Artificial Sequence: Synthetic oligonucleotide
  source 1..19: mol_type = other RNA
tcttcctggggaactacac

SEQ ID NO: 972 - RNA, 19 nt, synthetic construct
  misc_feature 1..19: note = Description of Artificial Sequence: Synthetic oligonucleotide
  source 1..19: mol_type = other RNA
cttcctggggaactacact

SEQ ID NO: 973 - RNA, 19 nt, synthetic construct
  misc_feature 1..19: note = Description of Artificial Sequence: Synthetic oligonucleotide
  source 1..19: mol_type = other RNA
ttcctggggaactacactg

SEQ ID NO: 974 - RNA, 19 nt, synthetic construct
  misc_feature 1..19: note = Description of Artificial Sequence: Synthetic oligonucleotide
  source 1..19: mol_type = other RNA
tcctggggaactacactgg

SEQ ID NO: 975 - RNA, 19 nt, synthetic construct
  misc_feature 1..19: note = Description of Artificial Sequence: Synthetic oligonucleotide
  source 1..19: mol_type = other RNA
cctggggaactacactggc

SEQ ID NO: 976 - RNA, 19 nt, synthetic construct
  misc_feature 1..19: note = Description of Artificial Sequence: Synthetic oligonucleotide
  source 1..19: mol_type = other RNA
ctggggaactacactggca

SEQ ID NO: 977 - RNA, 19 nt, synthetic construct
  misc_feature 1..19: note = Description of Artificial Sequence: Synthetic oligonucleotide
  source 1..19: mol_type = other RNA
tggggaactacactggcaa

SEQ ID NO: 978 - RNA, 19 nt, synthetic construct
  misc_feature 1..19: note = Description of Artificial Sequence: Synthetic oligonucleotide
  source 1..19: mol_type = other RNA
ggggaactacactggcaat

SEQ ID NO: 979 - RNA, 19 nt, synthetic construct
  misc_feature 1..19: note = Description of Artificial Sequence: Synthetic oligonucleotide
  source 1..19: mol_type = other RNA
gggaactacactggcaatg

SEQ ID NO: 980 - RNA, 19 nt, synthetic construct
  misc_feature 1..19: note = Description of Artificial Sequence: Synthetic oligonucleotide
  source 1..19: mol_type = other RNA
ggaactacactggcaatgt

SEQ ID NO: 981 - RNA, 19 nt, synthetic construct
  misc_feature 1..19: note = Description of Artificial Sequence: Synthetic oligonucleotide
  source 1..19: mol_type = other RNA
gaactacactggcaatgtg

SEQ ID NO: 982 - RNA, 19 nt, synthetic construct
  misc_feature 1..19: note = Description of Artificial Sequence: Synthetic oligonucleotide
  source 1..19: mol_type = other RNA
aactacactggcaatgtgg

SEQ ID NO: 983 - RNA, 19 nt, synthetic construct
  misc_feature 1..19: note = Description of Artificial Sequence: Synthetic oligonucleotide
  source 1..19: mol_type = other RNA
actacactggcaatgtggg

SEQ ID NO: 984 - RNA, 19 nt, synthetic construct
  misc_feature 1..19: note = Description of Artificial Sequence: Synthetic oligonucleotide
  source 1..19: mol_type = other RNA
ctacactggcaatgtgggg

SEQ ID NO: 985 - RNA, 19 nt, synthetic construct
  misc_feature 1..19: note = Description of Artificial Sequence: Synthetic oligonucleotide
  source 1..19: mol_type = other RNA
tacactggcaatgtgggga

SEQ ID NO: 986 - RNA, 19 nt, synthetic construct
  misc_feature 1..19: note = Description of Artificial Sequence: Synthetic oligonucleotide
  source 1..19: mol_type = other RNA
acactggcaatgtggggaa

SEQ ID NO: 987 - RNA, 19 nt, synthetic construct
  misc_feature 1..19: note = Description of Artificial Sequence: Synthetic oligonucleotide
  source 1..19: mol_type = other RNA
cactggcaatgtggggaac

SEQ ID NO: 988 - RNA, 19 nt, synthetic construct
  misc_feature 1..19: note = Description of Artificial Sequence: Synthetic oligonucleotide
  source 1..19: mol_type = other RNA
actggcaatgtggggaacg

SEQ ID NO: 989 - RNA, 19 nt, synthetic construct
  misc_feature 1..19: note = Description of Artificial Sequence: Synthetic oligonucleotide
  source 1..19: mol_type = other RNA
ctggcaatgtggggaacga

SEQ ID NO: 990 - RNA, 19 nt, synthetic construct
  misc_feature 1..19: note = Description of Artificial Sequence: Synthetic oligonucleotide
  source 1..19: mol_type = other RNA
tggcaatgtggggaacgac

SEQ ID NO: 991 - RNA, 19 nt, synthetic construct
  misc_feature 1..19: note = Description of Artificial Sequence: Synthetic oligonucleotide
  source 1..19: mol_type = other RNA
ggcaatgtggggaacgacg

SEQ ID NO: 992 - RNA, 19 nt, synthetic construct
  misc_feature 1..19: note = Description of Artificial Sequence: Synthetic oligonucleotide
  source 1..19: mol_type = other RNA
gcaatgtggggaacgacgc

SEQ ID NO: 993 - RNA, 19 nt, synthetic construct
  misc_feature 1..19: note = Description of Artificial Sequence: Synthetic oligonucleotide
  source 1..19: mol_type = other RNA
caatgtggggaacgacgcc

SEQ ID NO: 994 - RNA, 19 nt, synthetic construct
  misc_feature 1..19: note = Description of Artificial Sequence: Synthetic oligonucleotide
  source 1..19: mol_type = other RNA
aatgtggggaacgacgccc

SEQ ID NO: 995 - RNA, 19 nt, synthetic construct
  misc_feature 1..19: note = Description of Artificial Sequence: Synthetic oligonucleotide
  source 1..19: mol_type = other RNA
atgtggggaacgacgccct

SEQ ID NO: 996 - RNA, 19 nt, synthetic construct
  misc_feature 1..19: note = Description of Artificial Sequence: Synthetic oligonucleotide
  source 1..19: mol_type = other RNA
tgtggggaacgacgccctc

SEQ ID NO: 997 - RNA, 19 nt, synthetic construct
  misc_feature 1..19: note = Description of Artificial Sequence: Synthetic oligonucleotide
  source 1..19: mol_type = other RNA
gtggggaacgacgccctcc

SEQ ID NO: 998 - RNA, 19 nt, synthetic construct
  misc_feature 1..19: note = Description of Artificial Sequence: Synthetic oligonucleotide
  source 1..19: mol_type = other RNA
tggggaacgacgccctcca

SEQ ID NO: 999 - RNA, 19 nt, synthetic construct
  misc_feature 1..19: note = Description of Artificial Sequence: Synthetic oligonucleotide
  source 1..19: mol_type = other RNA
ggggaacgacgccctccag

SEQ ID NO: 1000 - RNA, 19 nt, synthetic construct
  misc_feature 1..19: note = Description of Artificial Sequence: Synthetic oligonucleotide
  source 1..19: mol_type = other RNA
gggaacgacgccctccagt

SEQ ID NO: 1001 - RNA, 19 nt, synthetic construct
  misc_feature 1..19: note = Description of Artificial Sequence: Synthetic oligonucleotide
  source 1..19: mol_type = other RNA
ggaacgacgccctccagta

SEQ ID NO: 1002 - RNA, 19 nt, synthetic construct
  misc_feature 1..19: note = Description of Artificial Sequence: Synthetic oligonucleotide
  source 1..19: mol_type = other RNA
gaacgacgccctccagtat

SEQ ID NO: 1003 - RNA, 19 nt, synthetic construct
  misc_feature 1..19: note = Description of Artificial Sequence: Synthetic oligonucleotide
  source 1..19: mol_type = other RNA
aacgacgccctccagtatc

SEQ ID NO: 1004 - RNA, 19 nt, synthetic construct
  misc_feature 1..19: note = Description of Artificial Sequence: Synthetic oligonucleotide
  source 1..19: mol_type = other RNA
acgacgccctccagtatca

SEQ ID NO: 1005 - RNA, 19 nt, synthetic construct
  misc_feature 1..19: note = Description of Artificial Sequence: Synthetic oligonucleotide
  source 1..19: mol_type = other RNA
cgacgccctccagtatcat

SEQ ID NO: 1006 - RNA, 19 nt, synthetic construct
  misc_feature 1..19: note = Description of Artificial Sequence: Synthetic oligonucleotide
  source 1..19: mol_type = other RNA
gacgccctccagtatcata

SEQ ID NO: 1007 - RNA, 19 nt, synthetic construct
  misc_feature 1..19: note = Description of Artificial Sequence: Synthetic oligonucleotide
  source 1..19: mol_type = other RNA
acgccctccagtatcataa

SEQ ID NO: 1008 - RNA, 19 nt, synthetic construct
  misc_feature 1..19: note = Description of Artificial Sequence: Synthetic oligonucleotide
  source 1..19: mol_type = other RNA
cgccctccagtatcataac

SEQ ID NO: 1009 - RNA, 19 nt, synthetic construct
  misc_feature 1..19: note = Description of Artificial Sequence: Synthetic oligonucleotide
  source 1..19: mol_type = other RNA
gccctccagtatcataaca

SEQ ID NO: 1010 - RNA, 19 nt, synthetic construct
  misc_feature 1..19: note = Description of Artificial Sequence: Synthetic oligonucleotide
  source 1..19: mol_type = other RNA
ccctccagtatcataacaa

SEQ ID NO: 1011 - RNA, 19 nt, synthetic construct
  misc_feature 1..19: note = Description of Artificial Sequence: Synthetic oligonucleotide
  source 1..19: mol_type = other RNA
cctccagtatcataacaac

SEQ ID NO: 1012 - RNA, 19 nt, synthetic construct
  misc_feature 1..19: note = Description of Artificial Sequence: Synthetic oligonucleotide
  source 1..19: mol_type = other RNA
ctccagtatcataacaaca

SEQ ID NO: 1013 - RNA, 19 nt, synthetic construct
  misc_feature 1..19: note = Description of Artificial Sequence: Synthetic oligonucleotide
  source 1..19: mol_type = other RNA
tccagtatcataacaacac

SEQ ID NO: 1014 - RNA, 19 nt, synthetic construct
  misc_feature 1..19: note = Description of Artificial Sequence: Synthetic oligonucleotide
  source 1..19: mol_type = other RNA
ccagtatcataacaacaca

SEQ ID NO: 1015 - RNA, 19 nt, synthetic construct
  misc_feature 1..19: note = Description of Artificial Sequence: Synthetic oligonucleotide
  source 1..19: mol_type = other RNA
cagtatcataacaacacag

SEQ ID NO: 1016 - RNA, 19 nt, synthetic construct
  misc_feature 1..19: note = Description of Artificial Sequence: Synthetic oligonucleotide
  source 1..19: mol_type = other RNA
agtatcataacaacacagc

SEQ ID NO: 1017 - RNA, 19 nt, synthetic construct
  misc_feature 1..19: note = Description of Artificial Sequence: Synthetic oligonucleotide
  source 1..19: mol_type = other RNA
gtatcataacaacacagcc

SEQ ID NO: 1018 - RNA, 19 nt, synthetic construct
  misc_feature 1..19: note = Description of Artificial Sequence: Synthetic oligonucleotide
  source 1..19: mol_type = other RNA
tatcataacaacacagcct

SEQ ID NO: 1019 - RNA, 19 nt, synthetic construct
  misc_feature 1..19: note = Description of Artificial Sequence: Synthetic oligonucleotide
  source 1..19: mol_type = other RNA
atcataacaacacagcctt

SEQ ID NO: 1020 - RNA, 19 nt, synthetic construct
  misc_feature 1..19: note = Description of Artificial Sequence: Synthetic oligonucleotide
  source 1..19: mol_type = other RNA
tcataacaacacagccttc

SEQ ID NO: 1021 - RNA, 19 nt, synthetic construct
  misc_feature 1..19: note = Description of Artificial Sequence: Synthetic oligonucleotide
  source 1..19: mol_type = other RNA
cataacaacacagccttca

SEQ ID NO: 1022 - RNA, 19 nt, synthetic construct
  misc_feature 1..19: note = Description of Artificial Sequence: Synthetic oligonucleotide
  source 1..19: mol_type = other RNA
ataacaacacagccttcag

SEQ ID NO: 1023 - RNA, 19 nt, synthetic construct
  misc_feature 1..19: note = Description of Artificial Sequence: Synthetic oligonucleotide
  source 1..19: mol_type = other RNA
taacaacacagccttcagc

SEQ ID NO: 1024 - RNA, 19 nt, synthetic construct
  misc_feature 1..19: note = Description of Artificial Sequence: Synthetic oligonucleotide
  source 1..19: mol_type = other RNA
aacaacacagccttcagca

SEQ ID NO: 1025 - RNA, 19 nt, synthetic construct
  misc_feature 1..19: note = Description of Artificial Sequence: Synthetic oligonucleotide
  source 1..19: mol_type = other RNA
acaacacagccttcagcac

SEQ ID NO: 1026 - RNA, 19 nt, synthetic construct
  misc_feature 1..19: note = Description of Artificial Sequence: Synthetic oligonucleotide
  source 1..19: mol_type = other RNA
caacacagccttcagcacc

SEQ ID NO: 1027 - RNA, 19 nt, synthetic construct
  misc_feature 1..19: note = Description of Artificial Sequence: Synthetic oligonucleotide
  source 1..19: mol_type = other RNA
aacacagccttcagcacca

SEQ ID NO: 1028 - RNA, 19 nt, synthetic construct
  misc_feature 1..19: note = Description of Artificial Sequence: Synthetic oligonucleotide
  source 1..19: mol_type = other RNA
acacagccttcagcaccaa

SEQ ID NO: 1029 - RNA, 19 nt, synthetic construct
  misc_feature 1..19: note = Description of Artificial Sequence: Synthetic oligonucleotide
  source 1..19: mol_type = other RNA
cacagccttcagcaccaag

SEQ ID NO: 1030 - RNA, 19 nt, synthetic construct
  misc_feature 1..19: note = Description of Artificial Sequence: Synthetic oligonucleotide
  source 1..19: mol_type = other RNA
acagccttcagcaccaagg

SEQ ID NO: 1031 - RNA, 19 nt, synthetic construct
  misc_feature 1..19: note = Description of Artificial Sequence: Synthetic oligonucleotide
  source 1..19: mol_type = other RNA
cagccttcagcaccaagga

SEQ ID NO: 1032 - RNA, 19 nt, synthetic construct
  misc_feature 1..19: note = Description of Artificial Sequence: Synthetic oligonucleotide
  source 1..19: mol_type = other RNA
agccttcagcaccaaggac

SEQ ID NO: 1033 - RNA, 19 nt, synthetic construct
  misc_feature 1..19: note = Description of Artificial Sequence: Synthetic oligonucleotide
  source 1..19: mol_type = other RNA
gccttcagcaccaaggaca

SEQ ID NO: 1034 - RNA, 19 nt, synthetic construct
  misc_feature 1..19: note = Description of Artificial Sequence: Synthetic oligonucleotide
  source 1..19: mol_type = other RNA
ccttcagcaccaaggacaa

SEQ ID NO: 1035 - RNA, 19 nt, synthetic construct
  misc_feature 1..19: note = Description of Artificial Sequence: Synthetic oligonucleotide
  source 1..19: mol_type = other RNA
cttcagcaccaaggacaag

SEQ ID NO: 1036 - RNA, 19 nt, synthetic construct
  misc_feature 1..19: note = Description of Artificial Sequence: Synthetic oligonucleotide
  source 1..19: mol_type = other RNA
ttcagcaccaaggacaagg

SEQ ID NO: 1037 - RNA, 19 nt, synthetic construct
  misc_feature 1..19: note = Description of Artificial Sequence: Synthetic oligonucleotide
  source 1..19: mol_type = other RNA
tcagcaccaaggacaagga

SEQ ID NO: 1038 - RNA, 19 nt, synthetic construct
  misc_feature 1..19: note = Description of Artificial Sequence: Synthetic oligonucleotide
  source 1..19: mol_type = other RNA
cagcaccaaggacaaggac

SEQ ID NO: 1039 - RNA, 19 nt, synthetic construct
  misc_feature 1..19: note = Description of Artificial Sequence: Synthetic oligonucleotide
  source 1..19: mol_type = other RNA
agcaccaaggacaaggaca

SEQ ID NO: 1040 - RNA, 19 nt, synthetic construct
  misc_feature 1..19: note = Description of Artificial Sequence: Synthetic oligonucleotide
  source 1..19: mol_type = other RNA
gcaccaaggacaaggacaa

SEQ ID NO: 1041 - RNA, 19 nt, synthetic construct
  misc_feature 1..19: note = Description of Artificial Sequence: Synthetic oligonucleotide
  source 1..19: mol_type = other RNA
caccaaggacaaggacaat

SEQ ID NO: 1042 - RNA, 19 nt, synthetic construct
  misc_feature 1..19: note = Description of Artificial Sequence: Synthetic oligonucleotide
  source 1..19: mol_type = other RNA
accaaggacaaggacaatg

SEQ ID NO: 1043 - RNA, 19 nt, synthetic construct
  misc_feature 1..19: note = Description of Artificial Sequence: Synthetic oligonucleotide
  source 1..19: mol_type = other RNA
ccaaggacaaggacaatga

SEQ ID NO: 1044 - RNA, 19 nt, synthetic construct
  misc_feature 1..19: note = Description of Artificial Sequence: Synthetic oligonucleotide
  source 1..19: mol_type = other RNA
caaggacaaggacaatgac

SEQ ID NO: 1045 - RNA, 19 nt, synthetic construct
  misc_feature 1..19: note = Description of Artificial Sequence: Synthetic oligonucleotide
  source 1..19: mol_type = other RNA
aaggacaaggacaatgaca

SEQ ID NO: 1046 - RNA, 19 nt, synthetic construct
  misc_feature 1..19: note = Description of Artificial Sequence: Synthetic oligonucleotide
  source 1..19: mol_type = other RNA
aggacaaggacaatgacaa

SEQ ID NO: 1047 - RNA, 19 nt, synthetic construct
  misc_feature 1..19: note = Description of Artificial Sequence: Synthetic oligonucleotide
  source 1..19: mol_type = other RNA
ggacaaggacaatgacaac

SEQ ID NO: 1048 - RNA, 19 nt, synthetic construct
  misc_feature 1..19: note = Description of Artificial Sequence: Synthetic oligonucleotide
  source 1..19: mol_type = other RNA
gacaaggacaatgacaact

SEQ ID NO: 1049 - RNA, 19 nt, synthetic construct
  misc_feature 1..19: note = Description of Artificial Sequence: Synthetic oligonucleotide
  source 1..19: mol_type = other RNA
acaaggacaatgacaactg

SEQ ID NO: 1050 - RNA, 19 nt, synthetic construct
  misc_feature 1..19: note = Description of Artificial Sequence: Synthetic oligonucleotide
  source 1..19: mol_type = other RNA
caaggacaatgacaactgc

SEQ ID NO: 1051 - RNA, 19 nt, synthetic construct
  misc_feature 1..19: note = Description of Artificial Sequence: Synthetic oligonucleotide
  source 1..19: mol_type = other RNA
aaggacaatgacaactgct

SEQ ID NO: 1052 - RNA, 19 nt, synthetic construct
  misc_feature 1..19: note = Description of Artificial Sequence: Synthetic oligonucleotide
  source 1..19: mol_type = other RNA
aggacaatgacaactgctt

SEQ ID NO: 1053 - RNA, 19 nt, synthetic construct
  misc_feature 1..19: note = Description of Artificial Sequence: Synthetic oligonucleotide
  source 1..19: mol_type = other RNA
ggacaatgacaactgcttg

SEQ ID NO: 1054 - RNA, 19 nt, synthetic construct
  misc_feature 1..19: note = Description of Artificial Sequence: Synthetic oligonucleotide
  source 1..19: mol_type = other RNA
gacaatgacaactgcttgg

SEQ ID NO: 1055 - RNA, 19 nt, synthetic construct
  misc_feature 1..19: note = Description of Artificial Sequence: Synthetic oligonucleotide
  source 1..19: mol_type = other RNA
acaatgacaactgcttgga

SEQ ID NO: 1056 - RNA, 19 nt, synthetic construct
  misc_feature 1..19: note = Description of Artificial Sequence: Synthetic oligonucleotide
  source 1..19: mol_type = other RNA
caatgacaactgcttggac

SEQ ID NO: 1057 - RNA, 19 nt, synthetic construct
  misc_feature 1..19: note = Description of Artificial Sequence: Synthetic oligonucleotide
  source 1..19: mol_type = other RNA
aatgacaactgcttggaca

SEQ ID NO: 1058 - RNA, 19 nt, synthetic construct
  misc_feature 1..19: note = Description of Artificial Sequence: Synthetic oligonucleotide
  source 1..19: mol_type = other RNA
atgacaactgcttggacaa

SEQ ID NO: 1059 - RNA, 19 nt, synthetic construct
  misc_feature 1..19: note = Description of Artificial Sequence: Synthetic oligonucleotide
  source 1..19: mol_type = other RNA
tgacaactgcttggacaag

SEQ ID NO: 1060 - RNA, 19 nt, synthetic construct
  misc_feature 1..19: note = Description of Artificial Sequence: Synthetic oligonucleotide
  source 1..19: mol_type = other RNA
gacaactgcttggacaagt

SEQ ID NO: 1061 - RNA, 19 nt, synthetic construct
  misc_feature 1..19: note = Description of Artificial Sequence: Synthetic oligonucleotide
  source 1..19: mol_type = other RNA
acaactgcttggacaagtg

SEQ ID NO: 1062 - RNA, 19 nt, synthetic construct
  misc_feature 1..19: note = Description of Artificial Sequence: Synthetic oligonucleotide
  source 1..19: mol_type = other RNA
caactgcttggacaagtgt

SEQ ID NO: 1063 - RNA, 19 nt, synthetic construct
  misc_feature 1..19: note = Description of Artificial Sequence: Synthetic oligonucleotide
  source 1..19: mol_type = other RNA
aactgcttggacaagtgtg

SEQ ID NO: 1064 - RNA, 19 nt, synthetic construct
  misc_feature 1..19: note = Description of Artificial Sequence: Synthetic oligonucleotide
  source 1..19: mol_type = other RNA
actgcttggacaagtgtgc

SEQ ID NO: 1065 - RNA, 19 nt, synthetic construct
  misc_feature 1..19: note = Description of Artificial Sequence: Synthetic oligonucleotide
  source 1..19: mol_type = other RNA
ctgcttggacaagtgtgca

SEQ ID NO: 1066 - RNA, 19 nt, synthetic construct
  misc_feature 1..19: note = Description of Artificial Sequence: Synthetic oligonucleotide
  source 1..19: mol_type = other RNA
tgcttggacaagtgtgcac

SEQ ID NO: 1067 - RNA, 19 nt, synthetic construct
  misc_feature 1..19: note = Description of Artificial Sequence: Synthetic oligonucleotide
  source 1..19: mol_type = other RNA
gcttggacaagtgtgcaca

SEQ ID NO: 1068 - RNA, 19 nt, synthetic construct
  misc_feature 1..19: note = Description of Artificial Sequence: Synthetic oligonucleotide
  source 1..19: mol_type = other RNA
cttggacaagtgtgcacag

SEQ ID NO: 1069 - RNA, 19 nt, synthetic construct
  misc_feature 1..19: note = Description of Artificial Sequence: Synthetic oligonucleotide
  source 1..19: mol_type = other RNA
ttggacaagtgtgcacagc

SEQ ID NO: 1070 - RNA, 19 nt, synthetic construct
  misc_feature 1..19: note = Description of Artificial Sequence: Synthetic oligonucleotide
  source 1..19: mol_type = other RNA
tggacaagtgtgcacagct

SEQ ID NO: 1071 - RNA, 19 nt, synthetic construct
  misc_feature 1..19: note = Description of Artificial Sequence: Synthetic oligonucleotide
  source 1..19: mol_type = other RNA
ggacaagtgtgcacagctc

SEQ ID NO: 1072 - RNA, 19 nt, synthetic construct
  misc_feature 1..19: note = Description of Artificial Sequence: Synthetic oligonucleotide
  source 1..19: mol_type = other RNA
gacaagtgtgcacagctcc

SEQ ID NO: 1073 - RNA, 19 nt, synthetic construct
  misc_feature 1..19: note = Description of Artificial Sequence: Synthetic oligonucleotide
  source 1..19: mol_type = other RNA
acaagtgtgcacagctccg

SEQ ID NO: 1074 - RNA, 19 nt, synthetic construct
  misc_feature 1..19: note = Description of Artificial Sequence: Synthetic oligonucleotide
  source 1..19: mol_type = other RNA
caagtgtgcacagctccgc

SEQ ID NO: 1075 - RNA, 19 nt, synthetic construct
  misc_feature 1..19: note = Description of Artificial Sequence: Synthetic oligonucleotide
  source 1..19: mol_type = other RNA
aagtgtgcacagctccgca

SEQ ID NO: 1076 - RNA, 19 nt, synthetic construct
  misc_feature 1..19: note = Description of Artificial Sequence: Synthetic oligonucleotide
  source 1..19: mol_type = other RNA
agtgtgcacagctccgcaa

SEQ ID NO: 1077 - RNA, 19 nt, synthetic construct
  misc_feature 1..19: note = Description of Artificial Sequence: Synthetic oligonucleotide
  source 1..19: mol_type = other RNA
gtgtgcacagctccgcaaa

SEQ ID NO: 1078 - RNA, 19 nt, synthetic construct
  misc_feature 1..19: note = Description of Artificial Sequence: Synthetic oligonucleotide
  source 1..19: mol_type = other RNA
tgtgcacagctccgcaaag

SEQ ID NO: 1079 - RNA, 19 nt, synthetic construct
  misc_feature 1..19: note = Description of Artificial Sequence: Synthetic oligonucleotide
  source 1..19: mol_type = other RNA
gtgcacagctccgcaaagg

SEQ ID NO: 1080 - RNA, 19 nt, synthetic construct
  misc_feature 1..19: note = Description of Artificial Sequence: Synthetic oligonucleotide
  source 1..19: mol_type = other RNA
tgcacagctccgcaaaggt

SEQ ID NO: 1081 - RNA, 19 nt, synthetic construct
  misc_feature 1..19: note = Description of Artificial Sequence: Synthetic oligonucleotide
  source 1..19: mol_type = other RNA
gcacagctccgcaaaggtg

SEQ ID NO: 1082 - RNA, 19 nt, synthetic construct
  misc_feature 1..19: note = Description of Artificial Sequence: Synthetic oligonucleotide
  source 1..19: mol_type = other RNA
cacagctccgcaaaggtgg

SEQ ID NO: 1083 - RNA, 19 nt, synthetic construct
  misc_feature 1..19: note = Description of Artificial Sequence: Synthetic oligonucleotide
  source 1..19: mol_type = other RNA
acagctccgcaaaggtggc

SEQ ID NO: 1084 - RNA, 19 nt, synthetic construct
  misc_feature 1..19: note = Description of Artificial Sequence: Synthetic oligonucleotide
  source 1..19: mol_type = other RNA
cagctccgcaaaggtggct

SEQ ID NO: 1085 - RNA, 19 nt, synthetic construct
  misc_feature 1..19: note = Description of Artificial Sequence: Synthetic oligonucleotide
  source 1..19: mol_type = other RNA
agctccgcaaaggtggcta

SEQ ID NO: 1086 - RNA, 19 nt, synthetic construct
  misc_feature 1..19: note = Description of Artificial Sequence: Synthetic oligonucleotide
  source 1..19: mol_type = other RNA
gctccgcaaaggtggctac

SEQ ID NO: 1087 - RNA, 19 nt, synthetic construct
  misc_feature 1..19: note = Description of Artificial Sequence: Synthetic oligonucleotide
  source 1..19: mol_type = other RNA
ctccgcaaaggtggctact

SEQ ID NO: 1088 - RNA, 19 nt, synthetic construct
  misc_feature 1..19: note = Description of Artificial Sequence: Synthetic oligonucleotide
  source 1..19: mol_type = other RNA
tccgcaaaggtggctactg

SEQ ID NO: 1089 - RNA, 19 nt, synthetic construct
  misc_feature 1..19: note = Description of Artificial Sequence: Synthetic oligonucleotide
  source 1..19: mol_type = other RNA
ccgcaaaggtggctactgg

SEQ ID NO: 1090 - RNA, 19 nt, synthetic construct
  misc_feature 1..19: note = Description of Artificial Sequence: Synthetic oligonucleotide
  source 1..19: mol_type = other RNA
cgcaaaggtggctactggt

SEQ ID NO: 1091 - RNA, 19 nt, synthetic construct
  misc_feature 1..19: note = Description of Artificial Sequence: Synthetic oligonucleotide
  source 1..19: mol_type = other RNA
gcaaaggtggctactggta

SEQ ID NO: 1092 - RNA, 19 nt, synthetic construct
  misc_feature 1..19: note = Description of Artificial Sequence: Synthetic oligonucleotide
  source 1..19: mol_type = other RNA
caaaggtggctactggtac

SEQ ID NO: 1093 - RNA, 19 nt, synthetic construct
  misc_feature 1..19: note = Description of Artificial Sequence: Synthetic oligonucleotide
  source 1..19: mol_type = other RNA
aaaggtggctactggtaca

SEQ ID NO: 1094 - RNA, 19 nt, synthetic construct
  misc_feature 1..19: note = Description of Artificial Sequence: Synthetic oligonucleotide
  source 1..19: mol_type = other RNA
aaggtggctactggtacaa

SEQ ID NO: 1095 - RNA, 19 nt, synthetic construct
  misc_feature 1..19: note = Description of Artificial Sequence: Synthetic oligonucleotide
  source 1..19: mol_type = other RNA
aggtggctactggtacaac

SEQ ID NO: 1096 - RNA, 19 nt, synthetic construct
  misc_feature 1..19: note = Description of Artificial Sequence: Synthetic oligonucleotide
  source 1..19: mol_type = other RNA
ggtggctactggtacaact

SEQ ID NO: 1097 - RNA, 19 nt, synthetic construct
  misc_feature 1..19: note = Description of Artificial Sequence: Synthetic oligonucleotide
  source 1..19: mol_type = other RNA
gtggctactggtacaactg

SEQ ID NO: 1098 - RNA, 19 nt, synthetic construct
  misc_feature 1..19: note = Description of Artificial Sequence: Synthetic oligonucleotide
  source 1..19: mol_type = other RNA
tggctactggtacaactgc

SEQ ID NO: 1099 - RNA, 19 nt, synthetic construct
  misc_feature 1..19: note = Description of Artificial Sequence: Synthetic oligonucleotide
  source 1..19: mol_type = other RNA
ggctactggtacaactgct

SEQ ID NO: 1100 - RNA, 19 nt, synthetic construct
  misc_feature 1..19: note = Description of Artificial Sequence: Synthetic oligonucleotide
  source 1..19: mol_type = other RNA
gctactggtacaactgctg

SEQ ID NO: 1101 - RNA, 19 nt, synthetic construct
  misc_feature 1..19: note = Description of Artificial Sequence: Synthetic oligonucleotide
  source 1..19: mol_type = other RNA
ctactggtacaactgctgc

SEQ ID NO: 1102 - RNA, 19 nt, synthetic construct
  misc_feature 1..19: note = Description of Artificial Sequence: Synthetic oligonucleotide
  source 1..19: mol_type = other RNA
tactggtacaactgctgca

SEQ ID NO: 1103 - RNA, 19 nt, synthetic construct
  misc_feature 1..19: note = Description of Artificial Sequence: Synthetic oligonucleotide
  source 1..19: mol_type = other RNA
actggtacaactgctgcac

SEQ ID NO: 1104 - RNA, 19 nt, synthetic construct
  misc_feature 1..19: note = Description of Artificial Sequence: Synthetic oligonucleotide
  source 1..19: mol_type = other RNA
ctggtacaactgctgcaca

SEQ ID NO: 1105 - RNA, 19 nt, synthetic construct
  misc_feature 1..19: note = Description of Artificial Sequence: Synthetic oligonucleotide
  source 1..19: mol_type = other RNA
tggtacaactgctgcacag

SEQ ID NO: 1106 - RNA, 19 nt, synthetic construct
  misc_feature 1..19: note = Description of Artificial Sequence: Synthetic oligonucleotide
  source 1..19: mol_type = other RNA
ggtacaactgctgcacaga

SEQ ID NO: 1107 - RNA, 19 nt, synthetic construct
  misc_feature 1..19: note = Description of Artificial Sequence: Synthetic oligonucleotide
  source 1..19: mol_type = other RNA
gtacaactgctgcacagac

SEQ ID NO: 1108 - RNA, 19 nt, synthetic construct
  misc_feature 1..19: note = Description of Artificial Sequence: Synthetic oligonucleotide
  source 1..19: mol_type = other RNA
tacaactgctgcacagact

SEQ ID NO: 1109 - RNA, 19 nt, synthetic construct
  misc_feature 1..19: note = Description of Artificial Sequence: Synthetic oligonucleotide
  source 1..19: mol_type = other RNA
acaactgctgcacagactc

SEQ ID NO: 1110 - RNA, 19 nt, synthetic construct
  misc_feature 1..19: note = Description of Artificial Sequence: Synthetic oligonucleotide
  source 1..19: mol_type = other RNA
caactgctgcacagactcc

SEQ ID NO: 1111 - RNA, 19 nt, synthetic construct
  misc_feature 1..19: note = Description of Artificial Sequence: Synthetic oligonucleotide
  source 1..19: mol_type = other RNA
aactgctgcacagactcca

SEQ ID NO: 1112 - RNA, 19 nt, synthetic construct
  misc_feature 1..19: note = Description of Artificial Sequence: Synthetic oligonucleotide
  source 1..19: mol_type = other RNA
actgctgcacagactccaa

SEQ ID NO: 1113 - RNA, 19 nt, synthetic construct
  misc_feature 1..19: note = Description of Artificial Sequence: Synthetic oligonucleotide
  source 1..19: mol_type = other RNA
ctgctgcacagactccaac

SEQ ID NO: 1114 - RNA, 19 nt, synthetic construct
  misc_feature 1..19: note = Description of Artificial Sequence: Synthetic oligonucleotide
  source 1..19: mol_type = other RNA
tgctgcacagactccaacc

SEQ ID NO: 1115 - RNA, 19 nt, synthetic construct
  misc_feature 1..19: note = Description of Artificial Sequence: Synthetic oligonucleotide
  source 1..19: mol_type = other RNA
gctgcacagactccaacct

SEQ ID NO: 1116 - RNA, 19 nt, synthetic construct
  misc_feature 1..19: note = Description of Artificial Sequence: Synthetic oligonucleotide
  source 1..19: mol_type = other RNA
ctgcacagactccaacctc

SEQ ID NO: 1117 - RNA, 19 nt, synthetic construct
  misc_feature 1..19: note = Description of Artificial Sequence: Synthetic oligonucleotide
  source 1..19: mol_type = other RNA
tgcacagactccaacctca

SEQ ID NO: 1118 - RNA, 19 nt, synthetic construct
  misc_feature 1..19: note = Description of Artificial Sequence: Synthetic oligonucleotide
  source 1..19: mol_type = other RNA
gcacagactccaacctcaa

SEQ ID NO: 1119 - RNA, 19 nt, synthetic construct
  misc_feature 1..19: note = Description of Artificial Sequence: Synthetic oligonucleotide
  source 1..19: mol_type = other RNA
cacagactccaacctcaat

SEQ ID NO: 1120 - RNA, 19 nt, synthetic construct
  misc_feature 1..19: note = Description of Artificial Sequence: Synthetic oligonucleotide
  source 1..19: mol_type = other RNA
acagactccaacctcaatg

SEQ ID NO: 1121 - RNA, 19 nt, synthetic construct
  misc_feature 1..19: note = Description of Artificial Sequence: Synthetic oligonucleotide
  source 1..19: mol_type = other RNA
cagactccaacctcaatgg

SEQ ID NO: 1122 - RNA, 19 nt, synthetic construct
  misc_feature 1..19: note = Description of Artificial Sequence: Synthetic oligonucleotide
  source 1..19: mol_type = other RNA
agactccaacctcaatgga

SEQ ID NO: 1123 - RNA, 19 nt, synthetic construct
  misc_feature 1..19: note = Description of Artificial Sequence: Synthetic oligonucleotide
  source 1..19: mol_type = other RNA
gactccaacctcaatggag

SEQ ID NO: 1124 - RNA, 19 nt, synthetic construct
  misc_feature 1..19: note = Description of Artificial Sequence: Synthetic oligonucleotide
  source 1..19: mol_type = other RNA
actccaacctcaatggagt

SEQ ID NO: 1125 - RNA, 19 nt, synthetic construct
  misc_feature 1..19: note = Description of Artificial Sequence: Synthetic oligonucleotide
  source 1..19: mol_type = other RNA
ctccaacctcaatggagtg

SEQ ID NO: 1126 - RNA, 19 nt, synthetic construct
  misc_feature 1..19: note = Description of Artificial Sequence: Synthetic oligonucleotide
  source 1..19: mol_type = other RNA
tccaacctcaatggagtgt

SEQ ID NO: 1127 - RNA, 19 nt, synthetic construct
  misc_feature 1..19: note = Description of Artificial Sequence: Synthetic oligonucleotide
  source 1..19: mol_type = other RNA
ccaacctcaatggagtgta

SEQ ID NO: 1128 - RNA, 19 nt, synthetic construct
  misc_feature 1..19: note = Description of Artificial Sequence: Synthetic oligonucleotide
  source 1..19: mol_type = other RNA
caacctcaatggagtgtac

SEQ ID NO: 1129 - RNA, 19 nt, synthetic construct
  misc_feature 1..19: note = Description of Artificial Sequence: Synthetic oligonucleotide
  source 1..19: mol_type = other RNA
aacctcaatggagtgtact

SEQ ID NO: 1130 - RNA, 19 nt, synthetic construct
  misc_feature 1..19: note = Description of Artificial Sequence: Synthetic oligonucleotide
  source 1..19: mol_type = other RNA
acctcaatggagtgtacta

SEQ ID NO: 1131 - RNA, 19 nt, synthetic construct
  misc_feature 1..19: note = Description of Artificial Sequence: Synthetic oligonucleotide
  source 1..19: mol_type = other RNA
cctcaatggagtgtactac

SEQ ID NO: 1132 - RNA, 19 nt, synthetic construct
  misc_feature 1..19: note = Description of Artificial Sequence: Synthetic oligonucleotide
  source 1..19: mol_type = other RNA
ctcaatggagtgtactacc

SEQ ID NO: 1133 - RNA, 19 nt, synthetic construct
  misc_feature 1..19: note = Description of Artificial Sequence: Synthetic oligonucleotide
  source 1..19: mol_type = other RNA
tcaatggagtgtactaccg

SEQ ID NO: 1134 - RNA, 19 nt, synthetic construct
  misc_feature 1..19: note = Description of Artificial Sequence: Synthetic oligonucleotide
  source 1..19: mol_type = other RNA
caatggagtgtactaccgc

SEQ ID NO: 1135 - RNA, 19 nt, synthetic construct
  misc_feature 1..19: note = Description of Artificial Sequence: Synthetic oligonucleotide
  source 1..19: mol_type = other RNA
aatggagtgtactaccgcc

SEQ ID NO: 1136 - RNA, 19 nt, synthetic construct
  misc_feature 1..19: note = Description of Artificial Sequence: Synthetic oligonucleotide
  source 1..19: mol_type = other RNA
atggagtgtactaccgcct

SEQ ID NO: 1137 - RNA, 19 nt, synthetic construct
  misc_feature 1..19: note = Description of Artificial Sequence: Synthetic oligonucleotide
  source 1..19: mol_type = other RNA
tggagtgtactaccgcctg

SEQ ID NO: 1138 - RNA, 19 nt, synthetic construct
  misc_feature 1..19: note = Description of Artificial Sequence: Synthetic oligonucleotide
  source 1..19: mol_type = other RNA
ggagtgtactaccgcctgg

SEQ ID NO: 1139 - RNA, 19 nt, synthetic construct
  misc_feature 1..19: note = Description of Artificial Sequence: Synthetic oligonucleotide
  source 1..19: mol_type = other RNA
gagtgtactaccgcctggg

SEQ ID NO: 1140 - RNA, 19 nt, synthetic construct
  misc_feature 1..19: note = Description of Artificial Sequence: Synthetic oligonucleotide
  source 1..19: mol_type = other RNA
agtgtactaccgcctgggt

SEQ ID NO: 1141 - RNA, 19 nt, synthetic construct
  misc_feature 1..19: note = Description of Artificial Sequence: Synthetic oligonucleotide
  source 1..19: mol_type = other RNA
gtgtactaccgcctgggtg

SEQ ID NO: 1142 - RNA, 19 nt, synthetic construct
  misc_feature 1..19: note = Description of Artificial Sequence: Synthetic oligonucleotide
  source 1..19: mol_type = other RNA
tgtactaccgcctgggtga

SEQ ID NO: 1143 - RNA, 19 nt, synthetic construct
  misc_feature 1..19: note = Description of Artificial Sequence: Synthetic oligonucleotide
  source 1..19: mol_type = other RNA
gtactaccgcctgggtgag

SEQ ID NO: 1144 - RNA, 19 nt, synthetic construct
  misc_feature 1..19: note = Description of Artificial Sequence: Synthetic oligonucleotide
  source 1..19: mol_type = other RNA
tactaccgcctgggtgagc

SEQ ID NO: 1145 - RNA, 19 nt, synthetic construct
  misc_feature 1..19: note = Description of Artificial Sequence: Synthetic oligonucleotide
  source 1..19: mol_type = other RNA
actaccgcctgggtgagca

SEQ ID NO: 1146 - RNA, 19 nt, synthetic construct
  misc_feature 1..19: note = Description of Artificial Sequence: Synthetic oligonucleotide
  source 1..19: mol_type = other RNA
ctaccgcctgggtgagcac

SEQ ID NO: 1147 - RNA, 19 nt, synthetic construct
  misc_feature 1..19: note = Description of Artificial Sequence: Synthetic oligonucleotide
  source 1..19: mol_type = other RNA
taccgcctgggtgagcaca

SEQ ID NO: 1148 - RNA, 19 nt, synthetic construct
  misc_feature 1..19: note = Description of Artificial Sequence: Synthetic oligonucleotide
  source 1..19: mol_type = other RNA
accgcctgggtgagcacaa

SEQ ID NO: 1149 - RNA, 19 nt, synthetic construct
  misc_feature 1..19: note = Description of Artificial Sequence: Synthetic oligonucleotide
  source 1..19: mol_type = other RNA
ccgcctgggtgagcacaat

SEQ ID NO: 1150 - RNA, 19 nt, synthetic construct
  misc_feature 1..19: note = Description of Artificial Sequence: Synthetic oligonucleotide
  source 1..19: mol_type = other RNA
cgcctgggtgagcacaata

SEQ ID NO: 1151 - RNA, 19 nt, synthetic construct
  misc_feature 1..19: note = Description of Artificial Sequence: Synthetic oligonucleotide
  source 1..19: mol_type = other RNA
gcctgggtgagcacaataa

SEQ ID NO: 1152 - RNA, 19 nt, synthetic construct
  misc_feature 1..19: note = Description of Artificial Sequence: Synthetic oligonucleotide
  source 1..19: mol_type = other RNA
cctgggtgagcacaataag

SEQ ID NO: 1153 - RNA, 19 nt, synthetic construct
  misc_feature 1..19: note = Description of Artificial Sequence: Synthetic oligonucleotide
  source 1..19: mol_type = other RNA
ctgggtgagcacaataagc

SEQ ID NO: 1154 - RNA, 19 nt, synthetic construct
  misc_feature 1..19: note = Description of Artificial Sequence: Synthetic oligonucleotide
  source 1..19: mol_type = other RNA
tgggtgagcacaataagca

SEQ ID NO: 1155 - RNA, 19 nt, synthetic construct
  misc_feature 1..19: note = Description of Artificial Sequence: Synthetic oligonucleotide
  source 1..19: mol_type = other RNA
gggtgagcacaataagcac

SEQ ID NO: 1156 - RNA, 19 nt, synthetic construct
  misc_feature 1..19: note = Description of Artificial Sequence: Synthetic oligonucleotide
  source 1..19: mol_type = other RNA
ggtgagcacaataagcacc

SEQ ID NO: 1157 - RNA, 19 nt, synthetic construct
  misc_feature 1..19: note = Description of Artificial Sequence: Synthetic oligonucleotide
  source 1..19: mol_type = other RNA
gtgagcacaataagcacct

SEQ ID NO: 1158 - RNA, 19 nt, synthetic construct
  misc_feature 1..19: note = Description of Artificial Sequence: Synthetic oligonucleotide
  source 1..19: mol_type = other RNA
tgagcacaataagcacctg

SEQ ID NO: 1159 - RNA, 19 nt, synthetic construct
  misc_feature 1..19: note = Description of Artificial Sequence: Synthetic oligonucleotide
  source 1..19: mol_type = other RNA
gagcacaataagcacctgg

SEQ ID NO: 1160 - RNA, 19 nt, synthetic construct
  misc_feature 1..19: note = Description of Artificial Sequence: Synthetic oligonucleotide
  source 1..19: mol_type = other RNA
agcacaataagcacctgga

SEQ ID NO: 1161 - RNA, 19 nt, synthetic construct
  misc_feature 1..19: note = Description of Artificial Sequence: Synthetic oligonucleotide
  source 1..19: mol_type = other RNA
gcacaataagcacctggat

SEQ ID NO: 1162 - RNA, 19 nt, synthetic construct
  misc_feature 1..19: note = Description of Artificial Sequence: Synthetic oligonucleotide
  source 1..19: mol_type = other RNA
cacaataagcacctggatg

SEQ ID NO: 1163 - RNA, 19 nt, synthetic construct
  misc_feature 1..19: note = Description of Artificial Sequence: Synthetic oligonucleotide
  source 1..19: mol_type = other RNA
acaataagcacctggatgg

SEQ ID NO: 1164 - RNA, 19 nt, synthetic construct
  misc_feature 1..19: note = Description of Artificial Sequence: Synthetic oligonucleotide
  source 1..19: mol_type = other RNA
caataagcacctggatggc

SEQ ID NO: 1165 - RNA, 19 nt, synthetic construct
  misc_feature 1..19: note = Description of Artificial Sequence: Synthetic oligonucleotide
  source 1..19: mol_type = other RNA
aataagcacctggatggca

SEQ ID NO: 1166 - RNA, 19 nt, synthetic construct
  misc_feature 1..19: note = Description of Artificial Sequence: Synthetic oligonucleotide
  source 1..19: mol_type = other RNA
ataagcacctggatggcat

SEQ ID NO: 1167 - RNA, 19 nt, synthetic construct
  misc_feature 1..19: note = Description of Artificial Sequence: Synthetic oligonucleotide
  source 1..19: mol_type = other RNA
taagcacctggatggcatc

SEQ ID NO: 1168 - RNA, 19 nt, synthetic construct
  misc_feature 1..19: note = Description of Artificial Sequence: Synthetic oligonucleotide
  source 1..19: mol_type = other RNA
aagcacctggatggcatca

SEQ ID NO: 1169 - RNA, 19 nt, synthetic construct
  misc_feature 1..19: note = Description of Artificial Sequence: Synthetic oligonucleotide
  source 1..19: mol_type = other RNA
agcacctggatggcatcac

SEQ ID NO: 1170 - RNA, 19 nt, synthetic construct
  misc_feature 1..19: note = Description of Artificial Sequence: Synthetic oligonucleotide
  source 1..19: mol_type = other RNA
gcacctggatggcatcacc

SEQ ID NO: 1171 - RNA, 19 nt, synthetic construct
  misc_feature 1..19: note = Description of Artificial Sequence: Synthetic oligonucleotide
  source 1..19: mol_type = other RNA
cacctggatggcatcacct

SEQ ID NO: 1172 - RNA, 19 nt, synthetic construct
  misc_feature 1..19: note = Description of Artificial Sequence: Synthetic oligonucleotide
  source 1..19: mol_type = other RNA
acctggatggcatcacctg

SEQ ID NO: 1173 - RNA, 19 nt, synthetic construct
  misc_feature 1..19: note = Description of Artificial Sequence: Synthetic oligonucleotide
  source 1..19: mol_type = other RNA
cctggatggcatcacctgg

SEQ ID NO: 1174 - RNA, 19 nt, synthetic construct
  misc_feature 1..19: note = Description of Artificial Sequence: Synthetic oligonucleotide
  source 1..19: mol_type = other RNA
ctggatggcatcacctggt

SEQ ID NO: 1175 - RNA, 19 nt, synthetic construct
  misc_feature 1..19: note = Description of Artificial Sequence: Synthetic oligonucleotide
  source 1..19: mol_type = other RNA
tggatggcatcacctggta

SEQ ID NO: 1176 - RNA, 19 nt, synthetic construct
  misc_feature 1..19: note = Description of Artificial Sequence: Synthetic oligonucleotide
  source 1..19: mol_type = other RNA
ggatggcatcacctggtat

SEQ ID NO: 1177 - RNA, 19 nt, synthetic construct
  misc_feature 1..19: note = Description of Artificial Sequence: Synthetic oligonucleotide
  source 1..19: mol_type = other RNA
gatggcatcacctggtatg

SEQ ID NO: 1178 - RNA, 19 nt, synthetic construct
  misc_feature 1..19: note = Description of Artificial Sequence: Synthetic oligonucleotide
  source 1..19: mol_type = other RNA
atggcatcacctggtatgg

SEQ ID NO: 1179 - RNA, 19 nt, synthetic construct
  misc_feature 1..19: note = Description of Artificial Sequence: Synthetic oligonucleotide
  source 1..19: mol_type = other RNA
tggcatcacctggtatggc

SEQ ID NO: 1180 - RNA, 19 nt, synthetic construct
  misc_feature 1..19: note = Description of Artificial Sequence: Synthetic oligonucleotide
  source 1..19: mol_type = other RNA
ggcatcacctggtatggct

SEQ ID NO: 1181 - RNA, 19 nt, synthetic construct
  misc_feature 1..19: note = Description of Artificial Sequence: Synthetic oligonucleotide
  source 1..19: mol_type = other RNA
gcatcacctggtatggctg

SEQ ID NO: 1182 - RNA, 19 nt, synthetic construct
  misc_feature 1..19: note = Description of Artificial Sequence: Synthetic oligonucleotide
  source 1..19: mol_type = other RNA
catcacctggtatggctgg

SEQ ID NO: 1183 - RNA, 19 nt, synthetic construct
  misc_feature 1..19: note = Description of Artificial Sequence: Synthetic oligonucleotide
  source 1..19: mol_type = other RNA
atcacctggtatggctggc

SEQ ID NO: 1184 - RNA, 19 nt, synthetic construct
  misc_feature 1..19: note = Description of Artificial Sequence: Synthetic oligonucleotide
  source 1..19: mol_type = other RNA
tcacctggtatggctggca

SEQ ID NO: 1185 - RNA, 19 nt, synthetic construct
  misc_feature 1..19: note = Description of Artificial Sequence: Synthetic oligonucleotide
  source 1..19: mol_type = other RNA
cacctggtatggctggcat

SEQ ID NO: 1186 - RNA, 19 nt, synthetic construct
  misc_feature 1..19: note = Description of Artificial Sequence: Synthetic oligonucleotide
  source 1..19: mol_type = other RNA
acctggtatggctggcatg

SEQ ID NO: 1187 - RNA, 19 nt, synthetic construct
  misc_feature 1..19: note = Description of Artificial Sequence: Synthetic oligonucleotide
  source 1..19: mol_type = other RNA
cctggtatggctggcatgg

SEQ ID NO: 1188 - RNA, 19 nt, synthetic construct
  misc_feature 1..19: note = Description of Artificial Sequence: Synthetic oligonucleotide
  source 1..19: mol_type = other RNA
ctggtatggctggcatgga

SEQ ID NO: 1189 - RNA, 19 nt, synthetic construct
  misc_feature 1..19: note = Description of Artificial Sequence: Synthetic oligonucleotide
  source 1..19: mol_type = other RNA
tggtatggctggcatggat

SEQ ID NO: 1190 - RNA, 19 nt, synthetic construct
  misc_feature 1..19: note = Description of Artificial Sequence: Synthetic oligonucleotide
  source 1..19: mol_type = other RNA
ggtatggctggcatggatc

SEQ ID NO: 1191 - RNA, 19 nt, synthetic construct
  misc_feature 1..19: note = Description of Artificial Sequence: Synthetic oligonucleotide
  source 1..19: mol_type = other RNA
gtatggctggcatggatct

SEQ ID NO: 1192 - RNA, 19 nt, synthetic construct
  misc_feature 1..19: note = Description of Artificial Sequence: Synthetic oligonucleotide
  source 1..19: mol_type = other RNA
tatggctggcatggatcta

SEQ ID NO: 1193 - RNA, 19 nt, synthetic construct
  misc_feature 1..19: note = Description of Artificial Sequence: Synthetic oligonucleotide
  source 1..19: mol_type = other RNA
atggctggcatggatctac

SEQ ID NO: 1194 - RNA, 19 nt, synthetic construct
  misc_feature 1..19: note = Description of Artificial Sequence: Synthetic oligonucleotide
  source 1..19: mol_type = other RNA
tggctggcatggatctacc

SEQ ID NO: 1195 - RNA, 19 nt, synthetic construct
  misc_feature 1..19: note = Description of Artificial Sequence: Synthetic oligonucleotide
  source 1..19: mol_type = other RNA
ggctggcatggatctacct

SEQ ID NO: 1196 - RNA, 19 nt, synthetic construct
  misc_feature 1..19: note = Description of Artificial Sequence: Synthetic oligonucleotide
  source 1..19: mol_type = other RNA
gctggcatggatctaccta

SEQ ID NO: 1197 - RNA, 19 nt, synthetic construct
  misc_feature 1..19: note = Description of Artificial Sequence: Synthetic oligonucleotide
  source 1..19: mol_type = other RNA
ctggcatggatctacctac

SEQ ID NO: 1198 - RNA, 19 nt, synthetic construct
  misc_feature 1..19: note = Description of Artificial Sequence: Synthetic oligonucleotide
  source 1..19: mol_type = other RNA
tggcatggatctacctact

SEQ ID NO: 1199 - RNA, 19 nt, synthetic construct
  misc_feature 1..19: note = Description of Artificial Sequence: Synthetic oligonucleotide
  source 1..19: mol_type = other RNA
ggcatggatctacctactc

SEQ ID NO: 1200 - RNA, 19 nt, synthetic construct
  misc_feature 1..19: note = Description of Artificial Sequence: Synthetic oligonucleotide
  source 1..19: mol_type = other RNA
gcatggatctacctactcc

SEQ ID NO: 1201 - RNA, 19 nt, synthetic construct
  misc_feature 1..19: note = Description of Artificial Sequence: Synthetic oligonucleotide
  source 1..19: mol_type = other RNA
catggatctacctactccc

SEQ ID NO: 1202 - RNA, 19 nt, synthetic construct
  misc_feature 1..19: note = Description of Artificial Sequence: Synthetic oligonucleotide
  source 1..19: mol_type = other RNA
atggatctacctactccct

SEQ ID NO: 1203 - RNA, 19 nt, synthetic construct
  misc_feature 1..19: note = Description of Artificial Sequence: Synthetic oligonucleotide
  source 1..19: mol_type = other RNA
tggatctacctactccctc

SEQ ID NO: 1204 - RNA, 19 nt, synthetic construct
  misc_feature 1..19: note = Description of Artificial Sequence: Synthetic oligonucleotide
  source 1..19: mol_type = other RNA
ggatctacctactccctca

SEQ ID NO: 1205 - RNA, 19 nt, synthetic construct
  misc_feature 1..19: note = Description of Artificial Sequence: Synthetic oligonucleotide
  source 1..19: mol_type = other RNA
gatctacctactccctcaa

SEQ ID NO: 1206 - RNA, 19 nt, synthetic construct
  misc_feature 1..19: note = Description of Artificial Sequence: Synthetic oligonucleotide
  source 1..19: mol_type = other RNA
atctacctactccctcaaa

SEQ ID NO: 1207 - RNA, 19 nt, synthetic construct
  misc_feature 1..19: note = Description of Artificial Sequence: Synthetic oligonucleotide
  source 1..19: mol_type = other RNA
tctacctactccctcaaac

SEQ ID NO: 1208 - RNA, 19 nt, synthetic construct
  misc_feature 1..19: note = Description of Artificial Sequence: Synthetic oligonucleotide
  source 1..19: mol_type = other RNA
ctacctactccctcaaacg

SEQ ID NO: 1209 - RNA, 19 nt, synthetic construct
  misc_feature 1..19: note = Description of Artificial Sequence: Synthetic oligonucleotide
  source 1..19: mol_type = other RNA
tacctactccctcaaacgg

SEQ ID NO: 1210 - RNA, 19 nt, synthetic construct
  misc_feature 1..19: note = Description of Artificial Sequence: Synthetic oligonucleotide
  source 1..19: mol_type = other RNA
acctactccctcaaacggg

SEQ ID NO: 1211 - RNA, 19 nt, synthetic construct
  misc_feature 1..19: note = Description of Artificial Sequence: Synthetic oligonucleotide
  source 1..19: mol_type = other RNA
cctactccctcaaacgggt

SEQ ID NO: 1212 - RNA, 19 nt, synthetic construct
  misc_feature 1..19: note = Description of Artificial Sequence: Synthetic oligonucleotide
  source 1..19: mol_type = other RNA
ctactccctcaaacgggtg

SEQ ID NO: 1213 - RNA, 19 nt, synthetic construct
  misc_feature 1..19: note = Description of Artificial Sequence: Synthetic oligonucleotide
  source 1..19: mol_type = other RNA
tactccctcaaacgggtgg

SEQ ID NO: 1214 - RNA, 19 nt, synthetic construct
  misc_feature 1..19: note = Description of Artificial Sequence: Synthetic oligonucleotide
  source 1..19: mol_type = other RNA
actccctcaaacgggtgga

SEQ ID NO: 1215 - RNA, 19 nt, synthetic construct
  misc_feature 1..19: note = Description of Artificial Sequence: Synthetic oligonucleotide
  source 1..19: mol_type = other RNA
ctccctcaaacgggtggag

SEQ ID NO: 1216 - RNA, 19 nt, synthetic construct
  misc_feature 1..19: note = Description of Artificial Sequence: Synthetic oligonucleotide
  source 1..19: mol_type = other RNA
tccctcaaacgggtggaga

SEQ ID NO: 1217 - RNA, 19 nt, synthetic construct
  misc_feature 1..19: note = Description of Artificial Sequence: Synthetic oligonucleotide
  source 1..19: mol_type = other RNA
ccctcaaacgggtggagat

SEQ ID NO: 1218 - RNA, 19 nt, synthetic construct
  misc_feature 1..19: note = Description of Artificial Sequence: Synthetic oligonucleotide
  source 1..19: mol_type = other RNA
cctcaaacgggtggagatg

SEQ ID NO: 1219 - RNA, 19 nt, synthetic construct
  misc_feature 1..19: note = Description of Artificial Sequence: Synthetic oligonucleotide
  source 1..19: mol_type = other RNA
ctcaaacgggtggagatga

SEQ ID NO: 1220 - RNA, 19 nt, synthetic construct
  misc_feature 1..19: note = Description of Artificial Sequence: Synthetic oligonucleotide
  source 1..19: mol_type = other RNA
tcaaacgggtggagatgaa

SEQ ID NO: 1221 - RNA, 19 nt, synthetic construct
  misc_feature 1..19: note = Description of Artificial Sequence: Synthetic oligonucleotide
  source 1..19: mol_type = other RNA
caaacgggtggagatgaaa

SEQ ID NO: 1222 - RNA, 19 nt, synthetic construct
  misc_feature 1..19: note = Description of Artificial Sequence: Synthetic oligonucleotide
  source 1..19: mol_type = other RNA
aaacgggtggagatgaaaa

SEQ ID NO: 1223 - RNA, 19 nt, synthetic construct
  misc_feature 1..19: note = Description of Artificial Sequence: Synthetic oligonucleotide
  source 1..19: mol_type = other RNA
aacgggtggagatgaaaat

SEQ ID NO: 1224 - RNA, 19 nt, synthetic construct
  misc_feature 1..19: note = Description of Artificial Sequence: Synthetic oligonucleotide
  source 1..19: mol_type = other RNA
acgggtggagatgaaaatc

SEQ ID NO: 1225 - RNA, 19 nt, synthetic construct
  misc_feature 1..19: note = Description of Artificial Sequence: Synthetic oligonucleotide
  source 1..19: mol_type = other RNA
cgggtggagatgaaaatcc

SEQ ID NO: 1226 - RNA, 19 nt, synthetic construct
  misc_feature 1..19: note = Description of Artificial Sequence: Synthetic oligonucleotide
  source 1..19: mol_type = other RNA
gggtggagatgaaaatccg

SEQ ID NO: 1227 - RNA, 19 nt, synthetic construct
  misc_feature 1..19: note = Description of Artificial Sequence: Synthetic oligonucleotide
  source 1..19: mol_type = other RNA
ggtggagatgaaaatccgc

SEQ ID NO: 1228 - RNA, 19 nt, synthetic construct
  misc_feature 1..19: note = Description of Artificial Sequence: Synthetic oligonucleotide
  source 1..19: mol_type = other RNA
gtggagatgaaaatccgcc

SEQ ID NO: 1229 - RNA, 19 nt, synthetic construct
  misc_feature 1..19: note = Description of Artificial Sequence: Synthetic oligonucleotide
  source 1..19: mol_type = other RNA
tggagatgaaaatccgccc

SEQ ID NO: 1230 - RNA, 19 nt, synthetic construct
  misc_feature 1..19: note = Description of Artificial Sequence: Synthetic oligonucleotide
  source 1..19: mol_type = other RNA
ggagatgaaaatccgccca

SEQ ID NO: 1231 - RNA, 19 nt, synthetic construct
  misc_feature 1..19: note = Description of Artificial Sequence: Synthetic oligonucleotide
  source 1..19: mol_type = other RNA
gagatgaaaatccgcccag

SEQ ID NO: 1232 - RNA, 19 nt, synthetic construct
  misc_feature 1..19: note = Description of Artificial Sequence: Synthetic oligonucleotide
  source 1..19: mol_type = other RNA
agatgaaaatccgcccaga

SEQ ID NO: 1233 - RNA, 19 nt, synthetic construct
  misc_feature 1..19: note = Description of Artificial Sequence: Synthetic oligonucleotide
  source 1..19: mol_type = other RNA
gatgaaaatccgcccagaa

SEQ ID NO: 1234 - RNA, 19 nt, synthetic construct
  misc_feature 1..19: note = Description of Artificial Sequence: Synthetic oligonucleotide
  source 1..19: mol_type = other RNA
atgaaaatccgcccagaag

SEQ ID NO: 1235 - RNA, 19 nt, synthetic construct
  misc_feature 1..19: note = Description of Artificial Sequence: Synthetic oligonucleotide
  source 1..19: mol_type = other RNA
tgaaaatccgcccagaaga

SEQ ID NO: 1236 - RNA, 19 nt, synthetic construct
  misc_feature 1..19: note = Description of Artificial Sequence: Synthetic oligonucleotide
  source 1..19: mol_type = other RNA
gaaaatccgcccagaagac

SEQ ID NO: 1237 - RNA, 19 nt, synthetic construct
  misc_feature 1..19: note = Description of Artificial Sequence: Synthetic oligonucleotide
  source 1..19: mol_type = other RNA
aaaatccgcccagaagact

SEQ ID NO: 1238 - RNA, 19 nt, synthetic construct
  misc_feature 1..19: note = Description of Artificial Sequence: Synthetic oligonucleotide
  source 1..19: mol_type = other RNA
aaatccgcccagaagactt

SEQ ID NO: 1239 - RNA, 19 nt, synthetic construct
  misc_feature 1..19: note = Description of Artificial Sequence: Synthetic oligonucleotide
  source 1..19: mol_type = other RNA
aatccgcccagaagacttc

SEQ ID NO: 1240 - RNA, 19 nt, synthetic construct
  misc_feature 1..19: note = Description of Artificial Sequence: Synthetic oligonucleotide
  source 1..19: mol_type = other RNA
atccgcccagaagacttca

SEQ ID NO: 1241 - RNA, 19 nt, synthetic construct
  misc_feature 1..19: note = Description of Artificial Sequence: Synthetic oligonucleotide
  source 1..19: mol_type = other RNA
tccgcccagaagacttcaa

SEQ ID NO: 1242 - RNA, 19 nt, synthetic construct
  misc_feature 1..19: note = Description of Artificial Sequence: Synthetic oligonucleotide
  source 1..19: mol_type = other RNA
ccgcccagaagacttcaag

SEQ ID NO: 1243 - RNA, 19 nt, synthetic construct
  misc_feature 1..19: note = Description of Artificial Sequence: Synthetic oligonucleotide
  source 1..19: mol_type = other RNA
cgcccagaagacttcaagc

SEQ ID NO: 1244 - RNA, 19 nt, synthetic construct
  misc_feature 1..19: note = Description of Artificial Sequence: Synthetic oligonucleotide
  source 1..19: mol_type = other RNA
gcccagaagacttcaagcc

SEQ ID NO: 1245 - RNA, 19 nt, synthetic construct
  misc_feature 1..19: note = Description of Artificial Sequence: Synthetic oligonucleotide
  source 1..19: mol_type = other RNA
cccagaagacttcaagcct

SEQ ID NO: 1246 - RNA, 19 nt, synthetic construct
  misc_feature 1..19: note = Description of Artificial Sequence: Synthetic oligonucleotide
  source 1..19: mol_type = other RNA
ccagaagacttcaagcctt

SEQ ID NO: 1247 - RNA, 19 nt, synthetic construct
  misc_feature 1..19: note = Description of Artificial Sequence: Synthetic oligonucleotide
  source 1..19: mol_type = other RNA
cagaagacttcaagcctta

SEQ ID NO: 1248 - RNA, 19 nt, synthetic construct
  misc_feature 1..19: note = Description of Artificial Sequence: Synthetic oligonucleotide
  source 1..19: mol_type = other RNA
agaagacttcaagccttaa

SEQ ID NO: 1249 - RNA, 19 nt, synthetic construct
  misc_feature 1..19: note = Description of Artificial Sequence: Synthetic oligonucleotide
  source 1..19: mol_type = other RNA
gaagacttcaagccttaaa

SEQ ID NO: 1250 - RNA, 19 nt, synthetic construct
  misc_feature 1..19: note = Description of Artificial Sequence: Synthetic oligonucleotide
  source 1..19: mol_type = other RNA
aagacttcaagccttaaaa

SEQ ID NO: 1251 - RNA, 19 nt, synthetic construct
  misc_feature 1..19: note = Description of Artificial Sequence: Synthetic oligonucleotide
  source 1..19: mol_type = other RNA
agacttcaagccttaaaag

SEQ ID NO: 1252 - RNA, 19 nt, synthetic construct
  misc_feature 1..19: note = Description of Artificial Sequence: Synthetic oligonucleotide
  source 1..19: mol_type = other RNA
gacttcaagccttaaaagg

SEQ ID NO: 1253 - RNA, 19 nt, synthetic construct
  misc_feature 1..19: note = Description of Artificial Sequence: Synthetic oligonucleotide
  source 1..19: mol_type = other RNA
acttcaagccttaaaagga

SEQ ID NO: 1254 - RNA, 19 nt, synthetic construct
  misc_feature 1..19: note = Description of Artificial Sequence: Synthetic oligonucleotide
  source 1..19: mol_type = other RNA
cttcaagccttaaaaggag

SEQ ID NO: 1255 - RNA, 19 nt, synthetic construct
  misc_feature 1..19: note = Description of Artificial Sequence: Synthetic oligonucleotide
  source 1..19: mol_type = other RNA
ttcaagccttaaaaggagg

SEQ ID NO: 1256 - RNA, 19 nt, synthetic construct
  misc_feature 1..19: note = Description of Artificial Sequence: Synthetic oligonucleotide
  source 1..19: mol_type = other RNA
tcaagccttaaaaggaggc

SEQ ID NO: 1257 - RNA, 19 nt, synthetic construct
  misc_feature 1..19: note = Description of Artificial Sequence: Synthetic oligonucleotide
  source 1..19: mol_type = other RNA
caagccttaaaaggaggct

SEQ ID NO: 1258 - RNA, 19 nt, synthetic construct
  misc_feature 1..19: note = Description of Artificial Sequence: Synthetic oligonucleotide
  source 1..19: mol_type = other RNA
aagccttaaaaggaggctg

SEQ ID NO: 1259 - RNA, 19 nt, synthetic construct
  misc_feature 1..19: note = Description of Artificial Sequence: Synthetic oligonucleotide
  source 1..19: mol_type = other RNA
agccttaaaaggaggctgc

SEQ ID NO: 1260 - RNA, 19 nt, synthetic construct
  misc_feature 1..19: note = Description of Artificial Sequence: Synthetic oligonucleotide
  source 1..19: mol_type = other RNA
gccttaaaaggaggctgcc

SEQ ID NO: 1261 - RNA, 19 nt, synthetic construct
  misc_feature 1..19: note = Description of Artificial Sequence: Synthetic oligonucleotide
  source 1..19: mol_type = other RNA
ccttaaaaggaggctgccg

SEQ ID NO: 1262 - RNA, 19 nt, synthetic construct
  misc_feature 1..19: note = Description of Artificial Sequence: Synthetic oligonucleotide
  source 1..19: mol_type = other RNA
cttaaaaggaggctgccgt

SEQ ID NO: 1263 - RNA, 19 nt, synthetic construct
  misc_feature 1..19: note = Description of Artificial Sequence: Synthetic oligonucleotide
  source 1..19: mol_type = other RNA
ttaaaaggaggctgccgtg

SEQ ID NO: 1264 - RNA, 19 nt, synthetic construct
  misc_feature 1..19: note = Description of Artificial Sequence: Synthetic oligonucleotide
  source 1..19: mol_type = other RNA
taaaaggaggctgccgtgg

SEQ ID NO: 1265 - RNA, 19 nt, synthetic construct
  misc_feature 1..19: note = Description of Artificial Sequence: Synthetic oligonucleotide
  source 1..19: mol_type = other RNA
aaaaggaggctgccgtgga

SEQ ID NO: 1266 - RNA, 19 nt, synthetic construct
  misc_feature 1..19: note = Description of Artificial Sequence: Synthetic oligonucleotide
  source 1..19: mol_type = other RNA
aaaggaggctgccgtggag

SEQ ID NO: 1267 - RNA, 19 nt, synthetic construct
  misc_feature 1..19: note = Description of Artificial Sequence: Synthetic oligonucleotide
  source 1..19: mol_type = other RNA
aaggaggctgccgtggagc

SEQ ID NO: 1268 - RNA, 19 nt, synthetic construct
  misc_feature 1..19: note = Description of Artificial Sequence: Synthetic oligonucleotide
  source 1..19: mol_type = other RNA
aggaggctgccgtggagca

SEQ ID NO: 1269 - RNA, 19 nt, synthetic construct
  misc_feature 1..19: note = Description of Artificial Sequence: Synthetic oligonucleotide
  source 1..19: mol_type = other RNA
ggaggctgccgtggagcac

SEQ ID NO: 1270 - RNA, 19 nt, synthetic construct
  misc_feature 1..19: note = Description of Artificial Sequence: Synthetic oligonucleotide
  source 1..19: mol_type = other RNA
gaggctgccgtggagcacg

SEQ ID NO: 1271 - RNA, 19 nt, synthetic construct
  misc_feature 1..19: note = Description of Artificial Sequence: Synthetic oligonucleotide
  source 1..19: mol_type = other RNA
aggctgccgtggagcacgg

SEQ ID NO: 1272 - RNA, 19 nt, synthetic construct
  misc_feature 1..19: note = Description of Artificial Sequence: Synthetic oligonucleotide
  source 1..19: mol_type = other RNA
ggctgccgtggagcacgga

SEQ ID NO: 1273 - RNA, 19 nt, synthetic construct
  misc_feature 1..19: note = Description of Artificial Sequence: Synthetic oligonucleotide
  source 1..19: mol_type = other RNA
gctgccgtggagcacggat

SEQ ID NO: 1274 - RNA, 19 nt, synthetic construct
  misc_feature 1..19: note = Description of Artificial Sequence: Synthetic oligonucleotide
  source 1..19: mol_type = other RNA
ctgccgtggagcacggata

SEQ ID NO: 1275 - RNA, 19 nt, synthetic construct
  misc_feature 1..19: note = Description of Artificial Sequence: Synthetic oligonucleotide
  source 1..19: mol_type = other RNA
tgccgtggagcacggatac

SEQ ID NO: 1276 - RNA, 19 nt, synthetic construct
  misc_feature 1..19: note = Description of Artificial Sequence: Synthetic oligonucleotide
  source 1..19: mol_type = other RNA
gccgtggagcacggataca

SEQ ID NO: 1277 - RNA, 19 nt, synthetic construct
  misc_feature 1..19: note = Description of Artificial Sequence: Synthetic oligonucleotide
  source 1..19: mol_type = other RNA
ccgtggagcacggatacag

SEQ ID NO: 1278 - RNA, 19 nt, synthetic construct
  misc_feature 1..19: note = Description of Artificial Sequence: Synthetic oligonucleotide
  source 1..19: mol_type = other RNA
cgtggagcacggatacaga

SEQ ID NO: 1279 - RNA, 19 nt, synthetic construct
  misc_feature 1..19: note = Description of Artificial Sequence: Synthetic oligonucleotide
  source 1..19: mol_type = other RNA
gtggagcacggatacagaa

SEQ ID NO: 1280 - RNA, 19 nt, synthetic construct
  misc_feature 1..19: note = Description of Artificial Sequence: Synthetic oligonucleotide
  source 1..19: mol_type = other RNA
tggagcacggatacagaaa

SEQ ID NO: 1281 - RNA, 19 nt, synthetic construct
  misc_feature 1..19: note = Description of Artificial Sequence: Synthetic oligonucleotide
  source 1..19: mol_type = other RNA
ggagcacggatacagaaac

SEQ ID NO: 1282 - RNA, 19 nt, synthetic construct
  misc_feature 1..19: note = Description of Artificial Sequence: Synthetic oligonucleotide
  source 1..19: mol_type = other RNA
gagcacggatacagaaact

SEQ ID NO: 1283 - RNA, 19 nt, synthetic construct
  misc_feature 1..19: note = Description of Artificial Sequence: Synthetic oligonucleotide
  source 1..19: mol_type = other RNA
agcacggatacagaaactg

SEQ ID NO: 1284 - RNA, 19 nt, synthetic construct
  misc_feature 1..19: note = Description of Artificial Sequence: Synthetic oligonucleotide
  source 1..19: mol_type = other RNA
gcacggatacagaaactga

SEQ ID NO: 1285 - RNA, 19 nt, synthetic construct
  misc_feature 1..19: note = Description of Artificial Sequence: Synthetic oligonucleotide
  source 1..19: mol_type = other RNA
cacggatacagaaactgag

SEQ ID NO: 1286 - RNA, 19 nt, synthetic construct
  misc_feature 1..19: note = Description of Artificial Sequence: Synthetic oligonucleotide
  source 1..19: mol_type = other RNA
acggatacagaaactgaga

SEQ ID NO: 1287 - RNA, 19 nt, synthetic construct
  misc_feature 1..19: note = Description of Artificial Sequence: Synthetic oligonucleotide
  source 1..19: mol_type = other RNA
cggatacagaaactgagac

SEQ ID NO: 1288 - RNA, 19 nt, synthetic construct
  misc_feature 1..19: note = Description of Artificial Sequence: Synthetic oligonucleotide
  source 1..19: mol_type = other RNA
ggatacagaaactgagaca

SEQ ID NO: 1289 - RNA, 19 nt, synthetic construct
  misc_feature 1..19: note = Description of Artificial Sequence: Synthetic oligonucleotide
  source 1..19: mol_type = other RNA
gatacagaaactgagacac

SEQ ID NO: 1290 - RNA, 19 nt, synthetic construct
  misc_feature 1..19: note = Description of Artificial Sequence: Synthetic oligonucleotide
  source 1..19: mol_type = other RNA
atacagaaactgagacacg

SEQ ID NO: 1291 - RNA, 19 nt, synthetic construct
  misc_feature 1..19: note = Description of Artificial Sequence: Synthetic oligonucleotide
  source 1..19: mol_type = other RNA
tacagaaactgagacacgt

SEQ ID NO: 1292 - RNA, 19 nt, synthetic construct
  misc_feature 1..19: note = Description of Artificial Sequence: Synthetic oligonucleotide
  source 1..19: mol_type = other RNA
acagaaactgagacacgtg

SEQ ID NO: 1293 - RNA, 19 nt, synthetic construct
  misc_feature 1..19: note = Description of Artificial Sequence: Synthetic oligonucleotide
  source 1..19: mol_type = other RNA
cagaaactgagacacgtgg

SEQ ID NO: 1294 - RNA, 19 nt, synthetic construct
  misc_feature 1..19: note = Description of Artificial Sequence: Synthetic oligonucleotide
  source 1..19: mol_type = other RNA
agaaactgagacacgtgga

SEQ ID NO: 1295 - RNA, 19 nt, synthetic construct
  misc_feature 1..19: note = Description of Artificial Sequence: Synthetic oligonucleotide
  source 1..19: mol_type = other RNA
gaaactgagacacgtggag

SEQ ID NO: 1296 - RNA, 19 nt, synthetic construct
  misc_feature 1..19: note = Description of Artificial Sequence: Synthetic oligonucleotide
  source 1..19: mol_type = other RNA
aaactgagacacgtggaga

SEQ ID NO: 1297 - RNA, 19 nt, synthetic construct
  misc_feature 1..19: note = Description of Artificial Sequence: Synthetic oligonucleotide
  source 1..19: mol_type = other RNA
aactgagacacgtggagac

SEQ ID NO: 1298 - RNA, 19 nt, synthetic construct
  misc_feature 1..19: note = Description of Artificial Sequence: Synthetic oligonucleotide
  source 1..19: mol_type = other RNA
actgagacacgtggagact

SEQ ID NO: 1299 - RNA, 19 nt, synthetic construct
  misc_feature 1..19: note = Description of Artificial Sequence: Synthetic oligonucleotide
  source 1..19: mol_type = other RNA
ctgagacacgtggagactg

SEQ ID NO: 1300 - RNA, 19 nt, synthetic construct
  misc_feature 1..19: note = Description of Artificial Sequence: Synthetic oligonucleotide
  source 1..19: mol_type = other RNA
tgagacacgtggagactgg

SEQ ID NO: 1301 - RNA, 19 nt, synthetic construct
  misc_feature 1..19: note = Description of Artificial Sequence: Synthetic oligonucleotide
  source 1..19: mol_type = other RNA
gagacacgtggagactgga

SEQ ID NO: 1302 - RNA, 19 nt, synthetic construct
  misc_feature 1..19: note = Description of Artificial Sequence: Synthetic oligonucleotide
  source 1..19: mol_type = other RNA
agacacgtggagactggat

SEQ ID NO: 1303 - RNA, 19 nt, synthetic construct
  misc_feature 1..19: note = Description of Artificial Sequence: Synthetic oligonucleotide
  source 1..19: mol_type = other RNA
gacacgtggagactggatg

SEQ ID NO: 1304 - RNA, 19 nt, synthetic construct
  misc_feature 1..19: note = Description of Artificial Sequence: Synthetic oligonucleotide
  source 1..19: mol_type = other RNA
acacgtggagactggatga

SEQ ID NO: 1305 - RNA, 19 nt, synthetic construct
  misc_feature 1..19: note = Description of Artificial Sequence: Synthetic oligonucleotide
  source 1..19: mol_type = other RNA
cacgtggagactggatgag

SEQ ID NO: 1306 - RNA, 19 nt, synthetic construct
  misc_feature 1..19: note = Description of Artificial Sequence: Synthetic oligonucleotide
  source 1..19: mol_type = other RNA
acgtggagactggatgagg

SEQ ID NO: 1307 - RNA, 19 nt, synthetic construct
  misc_feature 1..19: note = Description of Artificial Sequence: Synthetic oligonucleotide
  source 1..19: mol_type = other RNA
cgtggagactggatgaggg

SEQ ID NO: 1308 - RNA, 19 nt, synthetic construct
  misc_feature 1..19: note = Description of Artificial Sequence: Synthetic oligonucleotide
  source 1..19: mol_type = other RNA
gtggagactggatgagggc

SEQ ID NO: 1309 - RNA, 19 nt, synthetic construct
  misc_feature 1..19: note = Description of Artificial Sequence: Synthetic oligonucleotide
  source 1..19: mol_type = other RNA
tggagactggatgagggca

SEQ ID NO: 1310 - RNA, 19 nt, synthetic construct
  misc_feature 1..19: note = Description of Artificial Sequence: Synthetic oligonucleotide
  source 1..19: mol_type = other RNA
ggagactggatgagggcag

SEQ ID NO: 1311 - RNA, 19 nt, synthetic construct
  misc_feature 1..19: note = Description of Artificial Sequence: Synthetic oligonucleotide
  source 1..19: mol_type = other RNA
gagactggatgagggcaga

SEQ ID NO: 1312 - RNA, 19 nt, synthetic construct
  misc_feature 1..19: note = Description of Artificial Sequence: Synthetic oligonucleotide
  source 1..19: mol_type = other RNA
agactggatgagggcagat

SEQ ID NO: 1313 - RNA, 19 nt, synthetic construct
  misc_feature 1..19: note = Description of Artificial Sequence: Synthetic oligonucleotide
  source 1..19: mol_type = other RNA
gactggatgagggcagatg

SEQ ID NO: 1314 - RNA, 19 nt, synthetic construct
  misc_feature 1..19: note = Description of Artificial Sequence: Synthetic oligonucleotide
  source 1..19: mol_type = other RNA
actggatgagggcagatga

SEQ ID NO: 1315 - RNA, 19 nt, synthetic construct
  misc_feature 1..19: note = Description of Artificial Sequence: Synthetic oligonucleotide
  source 1..19: mol_type = other RNA
ctggatgagggcagatgag

SEQ ID NO: 1316 - RNA, 19 nt, synthetic construct
  misc_feature 1..19: note = Description of Artificial Sequence: Synthetic oligonucleotide
  source 1..19: mol_type = other RNA
tggatgagggcagatgagg

SEQ ID NO: 1317 - RNA, 19 nt, synthetic construct
  misc_feature 1..19: note = Description of Artificial Sequence: Synthetic oligonucleotide
  source 1..19: mol_type = other RNA
ggatgagggcagatgagga

SEQ ID NO: 1318 - RNA, 19 nt, synthetic construct
  misc_feature 1..19: note = Description of Artificial Sequence: Synthetic oligonucleotide
  source 1..19: mol_type = other RNA
gatgagggcagatgaggac

SEQ ID NO: 1319 - RNA, 19 nt, synthetic construct
  misc_feature 1..19: note = Description of Artificial Sequence: Synthetic oligonucleotide
  source 1..19: mol_type = other RNA
atgagggcagatgaggaca

SEQ ID NO: 1320 - RNA, 19 nt, synthetic construct
  misc_feature 1..19: note = Description of Artificial Sequence: Synthetic oligonucleotide
  source 1..19: mol_type = other RNA
tgagggcagatgaggacag

SEQ ID NO: 1321 - RNA, 19 nt, synthetic construct
  misc_feature 1..19: note = Description of Artificial Sequence: Synthetic oligonucleotide
  source 1..19: mol_type = other RNA
gagggcagatgaggacagg

SEQ ID NO: 1322 - RNA, 19 nt, synthetic construct
  misc_feature 1..19: note = Description of Artificial Sequence: Synthetic oligonucleotide
  source 1..19: mol_type = other RNA
agggcagatgaggacagga

SEQ ID NO: 1323 - RNA, 19 nt, synthetic construct
  misc_feature 1..19: note = Description of Artificial Sequence: Synthetic oligonucleotide
  source 1..19: mol_type = other RNA
gggcagatgaggacaggaa

SEQ ID NO: 1324 - RNA, 19 nt, synthetic construct
  misc_feature 1..19: note = Description of Artificial Sequence: Synthetic oligonucleotide
  source 1..19: mol_type = other RNA
ggcagatgaggacaggaag

SEQ ID NO: 1325 - RNA, 19 nt, synthetic construct
  misc_feature 1..19: note = Description of Artificial Sequence: Synthetic oligonucleotide
  source 1..19: mol_type = other RNA
gcagatgaggacaggaaga

SEQ ID NO: 1326 - RNA, 19 nt, synthetic construct
  misc_feature 1..19: note = Description of Artificial Sequence: Synthetic oligonucleotide
  source 1..19: mol_type = other RNA
cagatgaggacaggaagag

SEQ ID NO: 1327 - RNA, 19 nt, synthetic construct
  misc_feature 1..19: note = Description of Artificial Sequence: Synthetic oligonucleotide
  source 1..19: mol_type = other RNA
agatgaggacaggaagaga

SEQ ID NO: 1328 - RNA, 19 nt, synthetic construct
  misc_feature 1..19: note = Description of Artificial Sequence: Synthetic oligonucleotide
  source 1..19: mol_type = other RNA
gatgaggacaggaagagag

SEQ ID NO: 1329 - RNA, 19 nt, synthetic construct
  misc_feature 1..19: note = Description of Artificial Sequence: Synthetic oligonucleotide
  source 1..19: mol_type = other RNA
atgaggacaggaagagagt

SEQ ID NO: 1330 - RNA, 19 nt, synthetic construct
  misc_feature 1..19: note = Description of Artificial Sequence: Synthetic oligonucleotide
  source 1..19: mol_type = other RNA
tgaggacaggaagagagtg

SEQ ID NO: 1331 - RNA, 19 nt, synthetic construct
  misc_feature 1..19: note = Description of Artificial Sequence: Synthetic oligonucleotide
  source 1..19: mol_type = other RNA
gaggacaggaagagagtgt

SEQ ID NO: 1332 - RNA, 19 nt, synthetic construct
  misc_feature 1..19: note = Description of Artificial Sequence: Synthetic oligonucleotide
  source 1..19: mol_type = other RNA
aggacaggaagagagtgtt

SEQ ID NO: 1333 - RNA, 19 nt, synthetic construct
  misc_feature 1..19: note = Description of Artificial Sequence: Synthetic oligonucleotide
  source 1..19: mol_type = other RNA
ggacaggaagagagtgtta

SEQ ID NO: 1334 - RNA, 19 nt, synthetic construct
  misc_feature 1..19: note = Description of Artificial Sequence: Synthetic oligonucleotide
  source 1..19: mol_type = other RNA
gacaggaagagagtgttag

SEQ ID NO: 1335 - RNA, 19 nt, synthetic construct
  misc_feature 1..19: note = Description of Artificial Sequence: Synthetic oligonucleotide
  source 1..19: mol_type = other RNA
acaggaagagagtgttaga

SEQ ID NO: 1336 - RNA, 19 nt, synthetic construct
  misc_feature 1..19: note = Description of Artificial Sequence: Synthetic oligonucleotide
  source 1..19: mol_type = other RNA
caggaagagagtgttagaa

SEQ ID NO: 1337 - RNA, 19 nt, synthetic construct
  misc_feature 1..19: note = Description of Artificial Sequence: Synthetic oligonucleotide
  source 1..19: mol_type = other RNA
aggaagagagtgttagaaa

SEQ ID NO: 1338 - RNA, 19 nt, synthetic construct
  misc_feature 1..19: note = Description of Artificial Sequence: Synthetic oligonucleotide
  source 1..19: mol_type = other RNA
ggaagagagtgttagaaag

SEQ ID NO: 1339 - RNA, 19 nt, synthetic construct
  misc_feature 1..19: note = Description of Artificial Sequence: Synthetic oligonucleotide
  source 1..19: mol_type = other RNA
gaagagagtgttagaaagg

SEQ ID NO: 1340 - RNA, 19 nt, synthetic construct
  misc_feature 1..19: note = Description of Artificial Sequence: Synthetic oligonucleotide
  source 1..19: mol_type = other RNA
aagagagtgttagaaaggg

SEQ ID NO: 1341 - RNA, 19 nt, synthetic construct
  misc_feature 1..19: note = Description of Artificial Sequence: Synthetic oligonucleotide
  source 1..19: mol_type = other RNA
agagagtgttagaaagggt

SEQ ID NO: 1342 - RNA, 19 nt, synthetic construct
  misc_feature 1..19: note = Description of Artificial Sequence: Synthetic oligonucleotide
  source 1..19: mol_type = other RNA
gagagtgttagaaagggta

SEQ ID NO: 1343 - RNA, 19 nt, synthetic construct
  misc_feature 1..19: note = Description of Artificial Sequence: Synthetic oligonucleotide
  source 1..19: mol_type = other RNA
agagtgttagaaagggtag

SEQ ID NO: 1344 - RNA, 19 nt, synthetic construct
  misc_feature 1..19: note = Description of Artificial Sequence: Synthetic oligonucleotide
  source 1..19: mol_type = other RNA
gagtgttagaaagggtagg

SEQ ID NO: 1345 - RNA, 19 nt, synthetic construct
  misc_feature 1..19: note = Description of Artificial Sequence: Synthetic oligonucleotide
  source 1..19: mol_type = other RNA
agtgttagaaagggtagga

SEQ ID NO: 1346 - RNA, 19 nt, synthetic construct
  misc_feature 1..19: note = Description of Artificial Sequence: Synthetic oligonucleotide
  source 1..19: mol_type = other RNA
gtgttagaaagggtaggac

SEQ ID NO: 1347 - RNA, 19 nt, synthetic construct
  misc_feature 1..19: note = Description of Artificial Sequence: Synthetic oligonucleotide
  source 1..19: mol_type = other RNA
tgttagaaagggtaggact

SEQ ID NO: 1348 - RNA, 19 nt, synthetic construct
  misc_feature 1..19: note = Description of Artificial Sequence: Synthetic oligonucleotide
  source 1..19: mol_type = other RNA
gttagaaagggtaggactg

SEQ ID NO: 1349 - RNA, 19 nt, synthetic construct
  misc_feature 1..19: note = Description of Artificial Sequence: Synthetic oligonucleotide
  source 1..19: mol_type = other RNA
ttagaaagggtaggactga

SEQ ID NO: 1350 - RNA, 19 nt, synthetic construct
  misc_feature 1..19: note = Description of Artificial Sequence: Synthetic oligonucleotide
  source 1..19: mol_type = other RNA
tagaaagggtaggactgag

SEQ ID NO: 1351 - RNA, 19 nt, synthetic construct
  misc_feature 1..19: note = Description of Artificial Sequence: Synthetic oligonucleotide
  source 1..19: mol_type = other RNA
agaaagggtaggactgaga

SEQ ID NO: 1352 - RNA, 19 nt, synthetic construct
  misc_feature 1..19: note = Description of Artificial Sequence: Synthetic oligonucleotide
  source 1..19: mol_type = other RNA
gaaagggtaggactgagaa

SEQ ID NO: 1353 - RNA, 19 nt, synthetic construct
  misc_feature 1..19: note = Description of Artificial Sequence: Synthetic oligonucleotide
  source 1..19: mol_type = other RNA
aaagggtaggactgagaaa

SEQ ID NO: 1354 - RNA, 19 nt, synthetic construct
  misc_feature 1..19: note = Description of Artificial Sequence: Synthetic oligonucleotide
  source 1..19: mol_type = other RNA
aagggtaggactgagaaac

SEQ ID NO: 1355 - RNA, 19 nt, synthetic construct
  misc_feature 1..19: note = Description of Artificial Sequence: Synthetic oligonucleotide
  source 1..19: mol_type = other RNA
agggtaggactgagaaaca

SEQ ID NO: 1356 - RNA, 19 nt, synthetic construct
  misc_feature 1..19: note = Description of Artificial Sequence: Synthetic oligonucleotide
  source 1..19: mol_type = other RNA
gggtaggactgagaaacag

SEQ ID NO: 1357 - RNA, 19 nt, synthetic construct
  misc_feature 1..19: note = Description of Artificial Sequence: Synthetic oligonucleotide
  source 1..19: mol_type = other RNA
ggtaggactgagaaacagc

SEQ ID NO: 1358 - RNA, 19 nt, synthetic construct
  misc_feature 1..19: note = Description of Artificial Sequence: Synthetic oligonucleotide
  source 1..19: mol_type = other RNA
gtaggactgagaaacagcc

SEQ ID NO: 1359 - RNA, 19 nt, synthetic construct
  misc_feature 1..19: note = Description of Artificial Sequence: Synthetic oligonucleotide
  source 1..19: mol_type = other RNA
taggactgagaaacagcct

SEQ ID NO: 1360 - RNA, 19 nt, synthetic construct
  misc_feature 1..19: note = Description of Artificial Sequence: Synthetic oligonucleotide
  source 1..19: mol_type = other RNA
aggactgagaaacagccta

SEQ ID NO: 1361 - RNA, 19 nt, synthetic construct
  misc_feature 1..19: note = Description of Artificial Sequence: Synthetic oligonucleotide
  source 1..19: mol_type = other RNA
ggactgagaaacagcctat

SEQ ID NO: 1362 - RNA, 19 nt, synthetic construct
  misc_feature 1..19: note = Description of Artificial Sequence: Synthetic oligonucleotide
  source 1..19: mol_type = other RNA
gactgagaaacagcctata

SEQ ID NO: 1363 - RNA, 19 nt, synthetic construct
  misc_feature 1..19: note = Description of Artificial Sequence: Synthetic oligonucleotide
  source 1..19: mol_type = other RNA
actgagaaacagcctataa

SEQ ID NO: 1364 - RNA, 19 nt, synthetic construct
  misc_feature 1..19: note = Description of Artificial Sequence: Synthetic oligonucleotide
  source 1..19: mol_type = other RNA
ctgagaaacagcctataat

SEQ ID NO: 1365 - RNA, 19 nt, synthetic construct
  misc_feature 1..19: note = Description of Artificial Sequence: Synthetic oligonucleotide
  source 1..19: mol_type = other RNA
tgagaaacagcctataatc

SEQ ID NO: 1366 - RNA, 19 nt, synthetic construct
  misc_feature 1..19: note = Description of Artificial Sequence: Synthetic oligonucleotide
  source 1..19: mol_type = other RNA
gagaaacagcctataatct

SEQ ID NO: 1367 - RNA, 19 nt, synthetic construct
  misc_feature 1..19: note = Description of Artificial Sequence: Synthetic oligonucleotide
  source 1..19: mol_type = other RNA
agaaacagcctataatctc

SEQ ID NO: 1368 - RNA, 19 nt, synthetic construct
  misc_feature 1..19: note = Description of Artificial Sequence: Synthetic oligonucleotide
  source 1..19: mol_type = other RNA
gaaacagcctataatctcc

SEQ ID NO: 1369 - RNA, 19 nt, synthetic construct
  misc_feature 1..19: note = Description of Artificial Sequence: Synthetic oligonucleotide
  source 1..19: mol_type = other RNA
aaacagcctataatctcca

SEQ ID NO: 1370 - RNA, 19 nt, synthetic construct
  misc_feature 1..19: note = Description of Artificial Sequence: Synthetic oligonucleotide
  source 1..19: mol_type = other RNA
aacagcctataatctccaa

SEQ ID NO: 1371 - RNA, 19 nt, synthetic construct
  misc_feature 1..19: note = Description of Artificial Sequence: Synthetic oligonucleotide
  source 1..19: mol_type = other RNA
acagcctataatctccaaa

SEQ ID NO: 1372 - RNA, 19 nt, synthetic construct
  misc_feature 1..19: note = Description of Artificial Sequence: Synthetic oligonucleotide
  source 1..19: mol_type = other RNA
cagcctataatctccaaag

SEQ ID NO: 1373 - RNA, 19 nt, synthetic construct
  misc_feature 1..19: note = Description of Artificial Sequence: Synthetic oligonucleotide
  source 1..19: mol_type = other RNA
agcctataatctccaaaga

SEQ ID NO: 1374 - RNA, 19 nt, synthetic construct
  misc_feature 1..19: note = Description of Artificial Sequence: Synthetic oligonucleotide
  source 1..19: mol_type = other RNA
gcctataatctccaaagaa

SEQ ID NO: 1375 - RNA, 19 nt, synthetic construct
  misc_feature 1..19: note = Description of Artificial Sequence: Synthetic oligonucleotide
  source 1..19: mol_type = other RNA
cctataatctccaaagaaa

SEQ ID NO: 1376 - RNA, 19 nt, synthetic construct
  misc_feature 1..19: note = Description of Artificial Sequence: Synthetic oligonucleotide
  source 1..19: mol_type = other RNA
ctataatctccaaagaaag

SEQ ID NO: 1377 - RNA, 19 nt, synthetic construct
  misc_feature 1..19: note = Description of Artificial Sequence: Synthetic oligonucleotide
  source 1..19: mol_type = other RNA
tataatctccaaagaaaga

SEQ ID NO: 1378 - RNA, 19 nt, synthetic construct
  misc_feature 1..19: note = Description of Artificial Sequence: Synthetic oligonucleotide
  source 1..19: mol_type = other RNA
ataatctccaaagaaagaa

SEQ ID NO: 1379 - RNA, 19 nt, synthetic construct
  misc_feature 1..19: note = Description of Artificial Sequence: Synthetic oligonucleotide
  source 1..19: mol_type = other RNA
taatctccaaagaaagaat

SEQ ID NO: 1380 - RNA, 19 nt, synthetic construct
  misc_feature 1..19: note = Description of Artificial Sequence: Synthetic oligonucleotide
  source 1..19: mol_type = other RNA
aatctccaaagaaagaata

SEQ ID NO: 1381 - RNA, 19 nt, synthetic construct
  misc_feature 1..19: note = Description of Artificial Sequence: Synthetic oligonucleotide
  source 1..19: mol_type = other RNA
atctccaaagaaagaataa

SEQ ID NO: 1382 - RNA, 19 nt, synthetic construct
  misc_feature 1..19: note = Description of Artificial Sequence: Synthetic oligonucleotide
  source 1..19: mol_type = other RNA
tctccaaagaaagaataag

SEQ ID NO: 1383 - RNA, 19 nt, synthetic construct
  misc_feature 1..19: note = Description of Artificial Sequence: Synthetic oligonucleotide
  source 1..19: mol_type = other RNA
ctccaaagaaagaataagt

SEQ ID NO: 1384 - RNA, 19 nt, synthetic construct
  misc_feature 1..19: note = Description of Artificial Sequence: Synthetic oligonucleotide
  source 1..19: mol_type = other RNA
tccaaagaaagaataagtc

SEQ ID NO: 1385 - RNA, 19 nt, synthetic construct
  misc_feature 1..19: note = Description of Artificial Sequence: Synthetic oligonucleotide
  source 1..19: mol_type = other RNA
ccaaagaaagaataagtct

SEQ ID NO: 1386 - RNA, 19 nt, synthetic construct
  misc_feature 1..19: note = Description of Artificial Sequence: Synthetic oligonucleotide
  source 1..19: mol_type = other RNA
caaagaaagaataagtctc

SEQ ID NO: 1387 - RNA, 19 nt, synthetic construct
  misc_feature 1..19: note = Description of Artificial Sequence: Synthetic oligonucleotide
  source 1..19: mol_type = other RNA
aaagaaagaataagtctcc

SEQ ID NO: 1388 - RNA, 19 nt, synthetic construct
  misc_feature 1..19: note = Description of Artificial Sequence: Synthetic oligonucleotide
  source 1..19: mol_type = other RNA
aagaaagaataagtctcca

SEQ ID NO: 1389 - RNA, 19 nt, synthetic construct
  misc_feature 1..19: note = Description of Artificial Sequence: Synthetic oligonucleotide
  source 1..19: mol_type = other RNA
agaaagaataagtctccaa

SEQ ID NO: 1390 - RNA, 19 nt, synthetic construct
  misc_feature 1..19: note = Description of Artificial Sequence: Synthetic oligonucleotide
  source 1..19: mol_type = other RNA
gaaagaataagtctccaag

SEQ ID NO: 1391 - RNA, 19 nt, synthetic construct
  misc_feature 1..19: note = Description of Artificial Sequence: Synthetic oligonucleotide
  source 1..19: mol_type = other RNA
aaagaataagtctccaagg

SEQ ID NO: 1392 - RNA, 19 nt, synthetic construct
  misc_feature 1..19: note = Description of Artificial Sequence: Synthetic oligonucleotide
  source 1..19: mol_type = other RNA
aagaataagtctccaagga

SEQ ID NO: 1393 - RNA, 19 nt, synthetic construct
  misc_feature 1..19: note = Description of Artificial Sequence: Synthetic oligonucleotide
  source 1..19: mol_type = other RNA
agaataagtctccaaggag

SEQ ID NO: 1394 - RNA, 19 nt, synthetic construct
  misc_feature 1..19: note = Description of Artificial Sequence: Synthetic oligonucleotide
  source 1..19: mol_type = other RNA
gaataagtctccaaggagc

SEQ ID NO: 1395 - RNA, 19 nt, synthetic construct
  misc_feature 1..19: note = Description of Artificial Sequence: Synthetic oligonucleotide
  source 1..19: mol_type = other RNA
aataagtctccaaggagca

SEQ ID NO: 1396 - RNA, 19 nt, synthetic construct
  misc_feature 1..19: note = Description of Artificial Sequence: Synthetic oligonucleotide
  source 1..19: mol_type = other RNA
ataagtctccaaggagcac

SEQ ID NO: 1397 - RNA, 19 nt, synthetic construct
  misc_feature 1..19: note = Description of Artificial Sequence: Synthetic oligonucleotide
  source 1..19: mol_type = other RNA
taagtctccaaggagcaca

SEQ ID NO: 1398 - RNA, 19 nt, synthetic construct
  misc_feature 1..19: note = Description of Artificial Sequence: Synthetic oligonucleotide
  source 1..19: mol_type = other RNA
aagtctccaaggagcacaa

SEQ ID NO: 1399 - RNA, 19 nt, synthetic construct
  misc_feature 1..19: note = Description of Artificial Sequence: Synthetic oligonucleotide
  source 1..19: mol_type = other RNA
agtctccaaggagcacaaa

SEQ ID NO: 1400 - RNA, 19 nt, synthetic construct
  misc_feature 1..19: note = Description of Artificial Sequence: Synthetic oligonucleotide
  source 1..19: mol_type = other RNA
gtctccaaggagcacaaaa

SEQ ID NO: 1401 - RNA, 19 nt, synthetic construct
  misc_feature 1..19: note = Description of Artificial Sequence: Synthetic oligonucleotide
  source 1..19: mol_type = other RNA
tctccaaggagcacaaaaa

SEQ ID NO: 1402 - RNA, 19 nt, synthetic construct
  misc_feature 1..19: note = Description of Artificial Sequence: Synthetic oligonucleotide
  source 1..19: mol_type = other RNA
ctccaaggagcacaaaaaa

SEQ ID NO: 1403 - RNA, 19 nt, synthetic construct
  misc_feature 1..19: note = Description of Artificial Sequence: Synthetic oligonucleotide
  source 1..19: mol_type = other RNA
tccaaggagcacaaaaaaa

SEQ ID NO: 1404 - RNA, 19 nt, synthetic construct
  misc_feature 1..19: note = Description of Artificial Sequence: Synthetic oligonucleotide
  source 1..19: mol_type = other RNA
ccaaggagcacaaaaaaat

SEQ ID NO: 1405 - RNA, 19 nt, synthetic construct
  misc_feature 1..19: note = Description of Artificial Sequence: Synthetic oligonucleotide
  source 1..19: mol_type = other RNA
caaggagcacaaaaaaatc

SEQ ID NO: 1406 - RNA, 19 nt, synthetic construct
  misc_feature 1..19: note = Description of Artificial Sequence: Synthetic oligonucleotide
  source 1..19: mol_type = other RNA
aaggagcacaaaaaaatca

SEQ ID NO: 1407 - RNA, 19 nt, synthetic construct
  misc_feature 1..19: note = Description of Artificial Sequence: Synthetic oligonucleotide
  source 1..19: mol_type = other RNA
aggagcacaaaaaaatcat

SEQ ID NO: 1408 - RNA, 19 nt, synthetic construct
  misc_feature 1..19: note = Description of Artificial Sequence: Synthetic oligonucleotide
  source 1..19: mol_type = other RNA
ggagcacaaaaaaatcata

SEQ ID NO: 1409 - RNA, 19 nt, synthetic construct
  misc_feature 1..19: note = Description of Artificial Sequence: Synthetic oligonucleotide
  source 1..19: mol_type = other RNA
gagcacaaaaaaatcatat

SEQ ID NO: 1410 - RNA, 19 nt, synthetic construct
  misc_feature 1..19: note = Description of Artificial Sequence: Synthetic oligonucleotide
  source 1..19: mol_type = other RNA
agcacaaaaaaatcatatg

SEQ ID NO: 1411 - RNA, 19 nt, synthetic construct
  misc_feature 1..19: note = Description of Artificial Sequence: Synthetic oligonucleotide
  source 1..19: mol_type = other RNA
gcacaaaaaaatcatatgt

SEQ ID NO: 1412 - RNA, 19 nt, synthetic construct
  misc_feature 1..19: note = Description of Artificial Sequence: Synthetic oligonucleotide
  source 1..19: mol_type = other RNA
cacaaaaaaatcatatgta

SEQ ID NO: 1413 - RNA, 19 nt, synthetic construct
  misc_feature 1..19: note = Description of Artificial Sequence: Synthetic oligonucleotide
  source 1..19: mol_type = other RNA
acaaaaaaatcatatgtac

SEQ ID NO: 1414 - RNA, 19 nt, synthetic construct
  misc_feature 1..19: note = Description of Artificial Sequence: Synthetic oligonucleotide
  source 1..19: mol_type = other RNA
caaaaaaatcatatgtacc

SEQ ID NO: 1415 - RNA, 19 nt, synthetic construct
  misc_feature 1..19: note = Description of Artificial Sequence: Synthetic oligonucleotide
  source 1..19: mol_type = other RNA
aaaaaaatcatatgtacca

SEQ ID NO: 1416 - RNA, 19 nt, synthetic construct
  misc_feature 1..19: note = Description of Artificial Sequence: Synthetic oligonucleotide
  source 1..19: mol_type = other RNA
aaaaaatcatatgtaccaa

SEQ ID NO: 1417 - RNA, 19 nt, synthetic construct
  misc_feature 1..19: note = Description of Artificial Sequence: Synthetic oligonucleotide
  source 1..19: mol_type = other RNA
aaaaatcatatgtaccaag

SEQ ID NO: 1418 - RNA, 19 nt, synthetic construct
  misc_feature 1..19: note = Description of Artificial Sequence: Synthetic oligonucleotide
  source 1..19: mol_type = other RNA
aaaatcatatgtaccaagg

SEQ ID NO: 1419 - RNA, 19 nt, synthetic construct
  misc_feature 1..19: note = Description of Artificial Sequence: Synthetic oligonucleotide
  source 1..19: mol_type = other RNA
aaatcatatgtaccaagga

SEQ ID NO: 1420 - RNA, 19 nt, synthetic construct
  misc_feature 1..19: note = Description of Artificial Sequence: Synthetic oligonucleotide
  source 1..19: mol_type = other RNA
aatcatatgtaccaaggat

SEQ ID NO: 1421 - RNA, 19 nt, synthetic construct
  misc_feature 1..19: note = Description of Artificial Sequence: Synthetic oligonucleotide
  source 1..19: mol_type = other RNA
atcatatgtaccaaggatg

SEQ ID NO: 1422 - RNA, 19 nt, synthetic construct
  misc_feature 1..19: note = Description of Artificial Sequence: Synthetic oligonucleotide
  source 1..19: mol_type = other RNA
tcatatgtaccaaggatgt

SEQ ID NO: 1423 - RNA, 19 nt, synthetic construct
  misc_feature 1..19: note = Description of Artificial Sequence: Synthetic oligonucleotide
  source 1..19: mol_type = other RNA
catatgtaccaaggatgtt

SEQ ID NO: 1424 - RNA, 19 nt, synthetic construct
  misc_feature 1..19: note = Description of Artificial Sequence: Synthetic oligonucleotide
  source 1..19: mol_type = other RNA
atatgtaccaaggatgtta

SEQ ID NO: 1425 - RNA, 19 nt, synthetic construct
  misc_feature 1..19: note = Description of Artificial Sequence: Synthetic oligonucleotide
  source 1..19: mol_type = other RNA
tatgtaccaaggatgttac

SEQ ID NO: 1426 - RNA, 19 nt, synthetic construct
  misc_feature 1..19: note = Description of Artificial Sequence: Synthetic oligonucleotide
  source 1..19: mol_type = other RNA
atgtaccaaggatgttaca

SEQ ID NO: 1427 - RNA, 19 nt, synthetic construct
  misc_feature 1..19: note = Description of Artificial Sequence: Synthetic oligonucleotide
  source 1..19: mol_type = other RNA
tgtaccaaggatgttacag

SEQ ID NO: 1428 - RNA, 19 nt, synthetic construct
  misc_feature 1..19: note = Description of Artificial Sequence: Synthetic oligonucleotide
  source 1..19: mol_type = other RNA
gtaccaaggatgttacagt

SEQ ID NO: 1429 - RNA, 19 nt, synthetic construct
  misc_feature 1..19: note = Description of Artificial Sequence: Synthetic oligonucleotide
  source 1..19: mol_type = other RNA
taccaaggatgttacagta

SEQ ID NO: 1430 - RNA, 19 nt, synthetic construct
  misc_feature 1..19: note = Description of Artificial Sequence: Synthetic oligonucleotide
  source 1..19: mol_type = other RNA
accaaggatgttacagtaa

SEQ ID NO: 1431 - RNA, 19 nt, synthetic construct
  misc_feature 1..19: note = Description of Artificial Sequence: Synthetic oligonucleotide
  source 1..19: mol_type = other RNA
ccaaggatgttacagtaaa

SEQ ID NO: 1432 - RNA, 19 nt, synthetic construct
  misc_feature 1..19: note = Description of Artificial Sequence: Synthetic oligonucleotide
  source 1..19: mol_type = other RNA
caaggatgttacagtaaac

SEQ ID NO: 1433 - RNA, 19 nt, synthetic construct
  misc_feature 1..19: note = Description of Artificial Sequence: Synthetic oligonucleotide
  source 1..19: mol_type = other RNA
aaggatgttacagtaaaca

SEQ ID NO: 1434 - RNA, 19 nt, synthetic construct
  misc_feature 1..19: note = Description of Artificial Sequence: Synthetic oligonucleotide
  source 1..19: mol_type = other RNA
aggatgttacagtaaacag

SEQ ID NO: 1435 - RNA, 19 nt, synthetic construct
  misc_feature 1..19: note = Description of Artificial Sequence: Synthetic oligonucleotide
  source 1..19: mol_type = other RNA
ggatgttacagtaaacagg

SEQ ID NO: 1436 - RNA, 19 nt, synthetic construct
  misc_feature 1..19: note = Description of Artificial Sequence: Synthetic oligonucleotide
  source 1..19: mol_type = other RNA
gatgttacagtaaacagga

SEQ ID NO: 1437 - RNA, 19 nt, synthetic construct
  misc_feature 1..19: note = Description of Artificial Sequence: Synthetic oligonucleotide
  source 1..19: mol_type = other RNA
atgttacagtaaacaggat

SEQ ID NO: 1438 - RNA, 19 nt, synthetic construct
  misc_feature 1..19: note = Description of Artificial Sequence: Synthetic oligonucleotide
  source 1..19: mol_type = other RNA
tgttacagtaaacaggatg

SEQ ID NO: 1439 - RNA, 19 nt, synthetic construct
  misc_feature 1..19: note = Description of Artificial Sequence: Synthetic oligonucleotide
  source 1..19: mol_type = other RNA
gttacagtaaacaggatga

SEQ ID NO: 1440 - RNA, 19 nt, synthetic construct
  misc_feature 1..19: note = Description of Artificial Sequence: Synthetic oligonucleotide
  source 1..19: mol_type = other RNA
ttacagtaaacaggatgaa

SEQ ID NO: 1441 - RNA, 19 nt, synthetic construct
  misc_feature 1..19: note = Description of Artificial Sequence: Synthetic oligonucleotide
  source 1..19: mol_type = other RNA
tacagtaaacaggatgaac

SEQ ID NO: 1442 - RNA, 19 nt, synthetic construct
  misc_feature 1..19: note = Description of Artificial Sequence: Synthetic oligonucleotide
  source 1..19: mol_type = other RNA
acagtaaacaggatgaact

SEQ ID NO: 1443 - RNA, 19 nt, synthetic construct
  misc_feature 1..19: note = Description of Artificial Sequence: Synthetic oligonucleotide
  source 1..19: mol_type = other RNA
cagtaaacaggatgaacta

SEQ ID NO: 1444 - RNA, 19 nt, synthetic construct
  misc_feature 1..19: note = Description of Artificial Sequence: Synthetic oligonucleotide
  source 1..19: mol_type = other RNA
agtaaacaggatgaactat

SEQ ID NO: 1445 - RNA, 19 nt, synthetic construct
  misc_feature 1..19: note = Description of Artificial Sequence: Synthetic oligonucleotide
  source 1..19: mol_type = other RNA
gtaaacaggatgaactatt

SEQ ID NO: 1446 - RNA, 19 nt, synthetic construct
  misc_feature 1..19: note = Description of Artificial Sequence: Synthetic oligonucleotide
  source 1..19: mol_type = other RNA
taaacaggatgaactattt

SEQ ID NO: 1447 - RNA, 19 nt, synthetic construct
  misc_feature 1..19: note = Description of Artificial Sequence: Synthetic oligonucleotide
  source 1..19: mol_type = other RNA
aaacaggatgaactattta

SEQ ID NO: 1448 - RNA, 19 nt, synthetic construct
  misc_feature 1..19: note = Description of Artificial Sequence: Synthetic oligonucleotide
  source 1..19: mol_type = other RNA
aacaggatgaactatttaa

SEQ ID NO: 1449 - RNA, 19 nt, synthetic construct
  misc_feature 1..19: note = Description of Artificial Sequence: Synthetic oligonucleotide
  source 1..19: mol_type = other RNA
acaggatgaactatttaaa

SEQ ID NO: 1450 - RNA, 19 nt, synthetic construct
  misc_feature 1..19: note = Description of Artificial Sequence: Synthetic oligonucleotide
  source 1..19: mol_type = other RNA
caggatgaactatttaaac

SEQ ID NO: 1451 - RNA, 19 nt, synthetic construct
  misc_feature 1..19: note = Description of Artificial Sequence: Synthetic oligonucleotide
  source 1..19: mol_type = other RNA
aggatgaactatttaaacc

SEQ ID NO: 1452 - RNA, 19 nt, synthetic construct
  misc_feature 1..19: note = Description of Artificial Sequence: Synthetic oligonucleotide
  source 1..19: mol_type = other RNA
ggatgaactatttaaaccc

SEQ ID NO: 1453 - RNA, 19 nt, synthetic construct
  misc_feature 1..19: note = Description of Artificial Sequence: Synthetic oligonucleotide
  source 1..19: mol_type = other RNA
gatgaactatttaaaccca

SEQ ID NO: 1454 - RNA, 19 nt, synthetic construct
  misc_feature 1..19: note = Description of Artificial Sequence: Synthetic oligonucleotide
  source 1..19: mol_type = other RNA
atgaactatttaaacccac

SEQ ID NO: 1455 - RNA, 19 nt, synthetic construct
  misc_feature 1..19: note = Description of Artificial Sequence: Synthetic oligonucleotide
  source 1..19: mol_type = other RNA
tgaactatttaaacccact

SEQ ID NO: 1456 - RNA, 19 nt, synthetic construct
  misc_feature 1..19: note = Description of Artificial Sequence: Synthetic oligonucleotide
  source 1..19: mol_type = other RNA
gaactatttaaacccactg

SEQ ID NO: 1457 - RNA, 19 nt, synthetic construct
  misc_feature 1..19: note = Description of Artificial Sequence: Synthetic oligonucleotide
  source 1..19: mol_type = other RNA
aactatttaaacccactgg

SEQ ID NO: 1458 - RNA, 19 nt, synthetic construct
  misc_feature 1..19: note = Description of Artificial Sequence: Synthetic oligonucleotide
  source 1..19: mol_type = other RNA
actatttaaacccactggg

SEQ ID NO: 1459 - RNA, 19 nt, synthetic construct
  misc_feature 1..19: note = Description of Artificial Sequence: Synthetic oligonucleotide
  source 1..19: mol_type = other RNA
ctatttaaacccactgggt

SEQ ID NO: 1460 - RNA, 19 nt, synthetic construct
  misc_feature 1..19: note = Description of Artificial Sequence: Synthetic oligonucleotide
  source 1..19: mol_type = other RNA
tatttaaacccactgggtc

SEQ ID NO: 1461 - RNA, 19 nt, synthetic construct
  misc_feature 1..19: note = Description of Artificial Sequence: Synthetic oligonucleotide
  source 1..19: mol_type = other RNA
atttaaacccactgggtcc

SEQ ID NO: 1462 - RNA, 19 nt, synthetic construct
  misc_feature 1..19: note = Description of Artificial Sequence: Synthetic oligonucleotide
  source 1..19: mol_type = other RNA
tttaaacccactgggtcct

SEQ ID NO: 1463 - RNA, 19 nt, synthetic construct
  misc_feature 1..19: note = Description of Artificial Sequence: Synthetic oligonucleotide
  source 1..19: mol_type = other RNA
ttaaacccactgggtcctg

SEQ ID NO: 1464 - RNA, 19 nt, synthetic construct
  misc_feature 1..19: note = Description of Artificial Sequence: Synthetic oligonucleotide
  source 1..19: mol_type = other RNA
taaacccactgggtcctgc

SEQ ID NO: 1465 - RNA, 19 nt, synthetic construct
  misc_feature 1..19: note = Description of Artificial Sequence: Synthetic oligonucleotide
  source 1..19: mol_type = other RNA
aaacccactgggtcctgcc

SEQ ID NO: 1466 - RNA, 19 nt, synthetic construct
  misc_feature 1..19: note = Description of Artificial Sequence: Synthetic oligonucleotide
  source 1..19: mol_type = other RNA
aacccactgggtcctgcca

SEQ ID NO: 1467 - RNA, 19 nt, synthetic construct
  misc_feature 1..19: note = Description of Artificial Sequence: Synthetic oligonucleotide
  source 1..19: mol_type = other RNA
acccactgggtcctgccac

SEQ ID NO: 1468 - RNA, 19 nt, synthetic construct
  misc_feature 1..19: note = Description of Artificial Sequence: Synthetic oligonucleotide
  source 1..19: mol_type = other RNA
cccactgggtcctgccaca

SEQ ID NO: 1469 - RNA, 19 nt, synthetic construct
  misc_feature 1..19: note = Description of Artificial Sequence: Synthetic oligonucleotide
  source 1..19: mol_type = other RNA
ccactgggtcctgccacat

SEQ ID NO: 1470 - RNA, 19 nt, synthetic construct
  misc_feature 1..19: note = Description of Artificial Sequence: Synthetic oligonucleotide
  source 1..19: mol_type = other RNA
cactgggtcctgccacatc

SEQ ID NO: 1471 - RNA, 19 nt, synthetic construct
  misc_feature 1..19: note = Description of Artificial Sequence: Synthetic oligonucleotide
  source 1..19: mol_type = other RNA
actgggtcctgccacatcc

SEQ ID NO: 1472 - RNA, 19 nt, synthetic construct
  misc_feature 1..19: note = Description of Artificial Sequence: Synthetic oligonucleotide
  source 1..19: mol_type = other RNA
ctgggtcctgccacatcct

SEQ ID NO: 1473 - RNA, 19 nt, synthetic construct
  misc_feature 1..19: note = Description of Artificial Sequence: Synthetic oligonucleotide
  source 1..19: mol_type = other RNA
tgggtcctgccacatcctt

SEQ ID NO: 1474 - RNA, 19 nt, synthetic construct
  misc_feature 1..19: note = Description of Artificial Sequence: Synthetic oligonucleotide
  source 1..19: mol_type = other RNA
gggtcctgccacatccttc

SEQ ID NO: 1475 - RNA, 19 nt, synthetic construct
  misc_feature 1..19: note = Description of Artificial Sequence: Synthetic oligonucleotide
  source 1..19: mol_type = other RNA
ggtcctgccacatccttct

SEQ ID NO: 1476 - RNA, 19 nt, synthetic construct
  misc_feature 1..19: note = Description of Artificial Sequence: Synthetic oligonucleotide
  source 1..19: mol_type = other RNA
gtcctgccacatccttctc

SEQ ID NO: 1477 - RNA, 19 nt, synthetic construct
  misc_feature 1..19: note = Description of Artificial Sequence: Synthetic oligonucleotide
  source 1..19: mol_type = other RNA
tcctgccacatccttctca

SEQ ID NO: 1478 - RNA, 19 nt, synthetic construct
  misc_feature 1..19: note = Description of Artificial Sequence: Synthetic oligonucleotide
  source 1..19: mol_type = other RNA
cctgccacatccttctcaa

SEQ ID NO: 1479 - RNA, 19 nt, synthetic construct
  misc_feature 1..19: note = Description of Artificial Sequence: Synthetic oligonucleotide
  source 1..19: mol_type = other RNA
ctgccacatccttctcaag

SEQ ID NO: 1480 - RNA, 19 nt, synthetic construct
  misc_feature 1..19: note = Description of Artificial Sequence: Synthetic oligonucleotide
  source 1..19: mol_type = other RNA
tgccacatccttctcaagg

SEQ ID NO: 1481 - RNA, 19 nt, synthetic construct
  misc_feature 1..19: note = Description of Artificial Sequence: Synthetic oligonucleotide
  source 1..19: mol_type = other RNA
gccacatccttctcaaggt

SEQ ID NO: 1482 - RNA, 19 nt, synthetic construct
  misc_feature 1..19: note = Description of Artificial Sequence: Synthetic oligonucleotide
  source 1..19: mol_type = other RNA
ccacatccttctcaaggtg

SEQ ID NO: 1483 - RNA, 19 nt, synthetic construct
  misc_feature 1..19: note = Description of Artificial Sequence: Synthetic oligonucleotide
  source 1..19: mol_type = other RNA
cacatccttctcaaggtgg

SEQ ID NO: 1484 - RNA, 19 nt, synthetic construct
  misc_feature 1..19: note = Description of Artificial Sequence: Synthetic oligonucleotide
  source 1..19: mol_type = other RNA
acatccttctcaaggtggt

SEQ ID NO: 1485 - RNA, 19 nt, synthetic construct
  misc_feature 1..19: note = Description of Artificial Sequence: Synthetic oligonucleotide
  source 1..19: mol_type = other RNA
catccttctcaaggtggta

SEQ ID NO: 1486 - RNA, 19 nt, synthetic construct
  misc_feature 1..19: note = Description of Artificial Sequence: Synthetic oligonucleotide
  source 1..19: mol_type = other RNA
atccttctcaaggtggtag

SEQ ID NO: 1487 - RNA, 19 nt, synthetic construct
  misc_feature 1..19: note = Description of Artificial Sequence: Synthetic oligonucleotide
  source 1..19: mol_type = other RNA
tccttctcaaggtggtaga

SEQ ID NO: 1488 - RNA, 19 nt, synthetic construct
  misc_feature 1..19: note = Description of Artificial Sequence: Synthetic oligonucleotide
  source 1..19: mol_type = other RNA
ccttctcaaggtggtagac

SEQ ID NO: 1489 - RNA, 19 nt, synthetic construct
  misc_feature 1..19: note = Description of Artificial Sequence: Synthetic oligonucleotide
  source 1..19: mol_type = other RNA
cttctcaaggtggtagact

SEQ ID NO: 1490 - RNA, 19 nt, synthetic construct
  misc_feature 1..19: note = Description of Artificial Sequence: Synthetic oligonucleotide
  source 1..19: mol_type = other RNA
ttctcaaggtggtagactg

SEQ ID NO: 1491 - RNA, 19 nt, synthetic construct
  misc_feature 1..19: note = Description of Artificial Sequence: Synthetic oligonucleotide
  source 1..19: mol_type = other RNA
tctcaaggtggtagactga

SEQ ID NO: 1492 - RNA, 19 nt, synthetic construct
  misc_feature 1..19: note = Description of Artificial Sequence: Synthetic oligonucleotide
  source 1..19: mol_type = other RNA
ctcaaggtggtagactgag

SEQ ID NO: 1493 - RNA, 19 nt, synthetic construct
  misc_feature 1..19: note = Description of Artificial Sequence: Synthetic oligonucleotide
  source 1..19: mol_type = other RNA
tcaaggtggtagactgagt

SEQ ID NO: 1494 - RNA, 19 nt, synthetic construct
  misc_feature 1..19: note = Description of Artificial Sequence: Synthetic oligonucleotide
  source 1..19: mol_type = other RNA
caaggtggtagactgagtg

SEQ ID NO: 1495 - RNA, 19 nt, synthetic construct
  misc_feature 1..19: note = Description of Artificial Sequence: Synthetic oligonucleotide
  source 1..19: mol_type = other RNA
aaggtggtagactgagtgg

SEQ ID NO: 1496 - RNA, 19 nt, synthetic construct
  misc_feature 1..19: note = Description of Artificial Sequence: Synthetic oligonucleotide
  source 1..19: mol_type = other RNA
aggtggtagactgagtggg

SEQ ID NO: 1497 - RNA, 19 nt, synthetic construct
  misc_feature 1..19: note = Description of Artificial Sequence: Synthetic oligonucleotide
  source 1..19: mol_type = other RNA
ggtggtagactgagtgggg

SEQ ID NO: 1498 - RNA, 19 nt, synthetic construct
  misc_feature 1..19: note = Description of Artificial Sequence: Synthetic oligonucleotide
  source 1..19: mol_type = other RNA
gtggtagactgagtggggt

SEQ ID NO: 1499 - RNA, 19 nt, synthetic construct
  misc_feature 1..19: note = Description of Artificial Sequence: Synthetic oligonucleotide
  source 1..19: mol_type = other RNA
tggtagactgagtggggtc

SEQ ID NO: 1500 - RNA, 19 nt, synthetic construct
  misc_feature 1..19: note = Description of Artificial Sequence: Synthetic oligonucleotide
  source 1..19: mol_type = other RNA
ggtagactgagtggggtct

SEQ ID NO: 1501 - RNA, 19 nt, synthetic construct
  misc_feature 1..19: note = Description of Artificial Sequence: Synthetic oligonucleotide
  source 1..19: mol_type = other RNA
gtagactgagtggggtctc

SEQ ID NO: 1502 - RNA, 19 nt, synthetic construct
  misc_feature 1..19: note = Description of Artificial Sequence: Synthetic oligonucleotide
  source 1..19: mol_type = other RNA
tagactgagtggggtctct

SEQ ID NO: 1503 - RNA, 19 nt, synthetic construct
  misc_feature 1..19: note = Description of Artificial Sequence: Synthetic oligonucleotide
  source 1..19: mol_type = other RNA
agactgagtggggtctctc

SEQ ID NO: 1504 - RNA, 19 nt, synthetic construct
  misc_feature 1..19: note = Description of Artificial Sequence: Synthetic oligonucleotide
  source 1..19: mol_type = other RNA
gactgagtggggtctctct

SEQ ID NO: 1505 - RNA, 19 nt, synthetic construct
  misc_feature 1..19: note = Description of Artificial Sequence: Synthetic oligonucleotide
  source 1..19: mol_type = other RNA
actgagtggggtctctctg

SEQ ID NO: 1506 - RNA, 19 nt, synthetic construct
  misc_feature 1..19: note = Description of Artificial Sequence: Synthetic oligonucleotide
  source 1..19: mol_type = other RNA
ctgagtggggtctctctgc

SEQ ID NO: 1507 - RNA, 19 nt, synthetic construct
  misc_feature 1..19: note = Description of Artificial Sequence: Synthetic oligonucleotide
  source 1..19: mol_type = other RNA
tgagtggggtctctctgcc

SEQ ID NO: 1508 - RNA, 19 nt, synthetic construct
  misc_feature 1..19: note = Description of Artificial Sequence: Synthetic oligonucleotide
  source 1..19: mol_type = other RNA
gagtggggtctctctgccc

SEQ ID NO: 1509 - RNA, 19 nt, synthetic construct
  misc_feature 1..19: note = Description of Artificial Sequence: Synthetic oligonucleotide
  source 1..19: mol_type = other RNA
agtggggtctctctgccca

SEQ ID NO: 1510 - RNA, 19 nt, synthetic construct
  misc_feature 1..19: note = Description of Artificial Sequence: Synthetic oligonucleotide
  source 1..19: mol_type = other RNA
gtggggtctctctgcccaa

SEQ ID NO: 1511 - RNA, 19 nt, synthetic construct
  misc_feature 1..19: note = Description of Artificial Sequence: Synthetic oligonucleotide
  source 1..19: mol_type = other RNA
tggggtctctctgcccaag

SEQ ID NO: 1512 - RNA, 19 nt, synthetic construct
  misc_feature 1..19: note = Description of Artificial Sequence: Synthetic oligonucleotide
  source 1..19: mol_type = other RNA
ggggtctctctgcccaaga

SEQ ID NO: 1513 - RNA, 19 nt, synthetic construct
  misc_feature 1..19: note = Description of Artificial Sequence: Synthetic oligonucleotide
  source 1..19: mol_type = other RNA
gggtctctctgcccaagat

SEQ ID NO: 1514 - RNA, 19 nt, synthetic construct
  misc_feature 1..19: note = Description of Artificial Sequence: Synthetic oligonucleotide
  source 1..19: mol_type = other RNA
ggtctctctgcccaagatc

SEQ ID NO: 1515 - RNA, 19 nt, synthetic construct
  misc_feature 1..19: note = Description of Artificial Sequence: Synthetic oligonucleotide
  source 1..19: mol_type = other RNA
gtctctctgcccaagatcc

SEQ ID NO: 1516 - RNA, 19 nt, synthetic construct
  misc_feature 1..19: note = Description of Artificial Sequence: Synthetic oligonucleotide
  source 1..19: mol_type = other RNA
tctctctgcccaagatccc

SEQ ID NO: 1517 - RNA, 19 nt, synthetic construct
  misc_feature 1..19: note = Description of Artificial Sequence: Synthetic oligonucleotide
  source 1..19: mol_type = other RNA
ctctctgcccaagatccct

SEQ ID NO: 1518 - RNA, 19 nt, synthetic construct
  misc_feature 1..19: note = Description of Artificial Sequence: Synthetic oligonucleotide
  source 1..19: mol_type = other RNA
tctctgcccaagatccctg

SEQ ID NO: 1519 - RNA, 19 nt, synthetic construct
  misc_feature 1..19: note = Description of Artificial Sequence: Synthetic oligonucleotide
  source 1..19: mol_type = other RNA
ctctgcccaagatccctga

SEQ ID NO: 1520 - RNA, 19 nt, synthetic construct
  misc_feature 1..19: note = Description of Artificial Sequence: Synthetic oligonucleotide
  source 1..19: mol_type = other RNA
tctgcccaagatccctgac

SEQ ID NO: 1521 - RNA, 19 nt, synthetic construct
  misc_feature 1..19: note = Description of Artificial Sequence: Synthetic oligonucleotide
  source 1..19: mol_type = other RNA
ctgcccaagatccctgaca

SEQ ID NO: 1522 - RNA, 19 nt, synthetic construct
  misc_feature 1..19: note = Description of Artificial Sequence: Synthetic oligonucleotide
  source 1..19: mol_type = other RNA
tgcccaagatccctgacat

SEQ ID NO: 1523 - RNA, 19 nt, synthetic construct
  misc_feature 1..19: note = Description of Artificial Sequence: Synthetic oligonucleotide
  source 1..19: mol_type = other RNA
gcccaagatccctgacata

SEQ ID NO: 1524 - RNA, 19 nt, synthetic construct
  misc_feature 1..19: note = Description of Artificial Sequence: Synthetic oligonucleotide
  source 1..19: mol_type = other RNA
cccaagatccctgacatag

SEQ ID NO: 1525 - RNA, 19 nt, synthetic construct
  misc_feature 1..19: note = Description of Artificial Sequence: Synthetic oligonucleotide
  source 1..19: mol_type = other RNA
ccaagatccctgacatagc

SEQ ID NO: 1526 - RNA, 19 nt, synthetic construct
  misc_feature 1..19: note = Description of Artificial Sequence: Synthetic oligonucleotide
  source 1..19: mol_type = other RNA
caagatccctgacatagca

SEQ ID NO: 1527 - RNA, 19 nt, synthetic construct
  misc_feature 1..19: note = Description of Artificial Sequence: Synthetic oligonucleotide
  source 1..19: mol_type = other RNA
aagatccctgacatagcag

SEQ ID NO: 1528 - RNA, 19 nt, synthetic construct
  misc_feature 1..19: note = Description of Artificial Sequence: Synthetic oligonucleotide
  source 1..19: mol_type = other RNA
agatccctgacatagcagt

SEQ ID NO: 1529 - RNA, 19 nt, synthetic construct
  misc_feature 1..19: note = Description of Artificial Sequence: Synthetic oligonucleotide
  source 1..19: mol_type = other RNA
gatccctgacatagcagta

SEQ ID NO: 1530 - RNA, 19 nt, synthetic construct
  misc_feature 1..19: note = Description of Artificial Sequence: Synthetic oligonucleotide
  source 1..19: mol_type = other RNA
atccctgacatagcagtag

SEQ ID NO: 1531 - RNA, 19 nt, synthetic construct
  misc_feature 1..19: note = Description of Artificial Sequence: Synthetic oligonucleotide
  source 1..19: mol_type = other RNA
tccctgacatagcagtagc

SEQ ID NO: 1532 - RNA, 19 nt, synthetic construct
  misc_feature 1..19: note = Description of Artificial Sequence: Synthetic oligonucleotide
  source 1..19: mol_type = other RNA
ccctgacatagcagtagct

SEQ ID NO: 1533 - RNA, 19 nt, synthetic construct
  misc_feature 1..19: note = Description of Artificial Sequence: Synthetic oligonucleotide
  source 1..19: mol_type = other RNA
cctgacatagcagtagctt

SEQ ID NO: 1534 - RNA, 19 nt, synthetic construct
  misc_feature 1..19: note = Description of Artificial Sequence: Synthetic oligonucleotide
  source 1..19: mol_type = other RNA
ctgacatagcagtagcttg

SEQ ID NO: 1535 - RNA, 19 nt, synthetic construct
  misc_feature 1..19: note = Description of Artificial Sequence: Synthetic oligonucleotide
  source 1..19: mol_type = other RNA
tgacatagcagtagcttgt

SEQ ID NO: 1536 - RNA, 19 nt, synthetic construct
  misc_feature 1..19: note = Description of Artificial Sequence: Synthetic oligonucleotide
  source 1..19: mol_type = other RNA
gacatagcagtagcttgtc

SEQ ID NO: 1537 - RNA, 19 nt, synthetic construct
  misc_feature 1..19: note = Description of Artificial Sequence: Synthetic oligonucleotide
  source 1..19: mol_type = other RNA
acatagcagtagcttgtct

SEQ ID NO: 1538 - RNA, 19 nt, synthetic construct
  misc_feature 1..19: note = Description of Artificial Sequence: Synthetic oligonucleotide
  source 1..19: mol_type = other RNA
catagcagtagcttgtctt

SEQ ID NO: 1539 - RNA, 19 nt, synthetic construct
  misc_feature 1..19: note = Description of Artificial Sequence: Synthetic oligonucleotide
  source 1..19: mol_type = other RNA
atagcagtagcttgtcttt

SEQ ID NO: 1540 - RNA, 19 nt, synthetic construct
  misc_feature 1..19: note = Description of Artificial Sequence: Synthetic oligonucleotide
  source 1..19: mol_type = other RNA
tagcagtagcttgtctttt

SEQ ID NO: 1541 - RNA, 19 nt, synthetic construct
  misc_feature 1..19: note = Description of Artificial Sequence: Synthetic oligonucleotide
  source 1..19: mol_type = other RNA
agcagtagcttgtcttttc

SEQ ID NO: 1542 - RNA, 19 nt, synthetic construct
  misc_feature 1..19: note = Description of Artificial Sequence: Synthetic oligonucleotide
  source 1..19: mol_type = other RNA
gcagtagcttgtcttttcc

SEQ ID NO: 1543 - RNA, 19 nt, synthetic construct
  misc_feature 1..19: note = Description of Artificial Sequence: Synthetic oligonucleotide
  source 1..19: mol_type = other RNA
cagtagcttgtcttttcca

SEQ ID NO: 1544 - RNA, 19 nt, synthetic construct
  misc_feature 1..19: note = Description of Artificial Sequence: Synthetic oligonucleotide
  source 1..19: mol_type = other RNA
agtagcttgtcttttccac

SEQ ID NO: 1545 - RNA, 19 nt, synthetic construct
  misc_feature 1..19: note = Description of Artificial Sequence: Synthetic oligonucleotide
  source 1..19: mol_type = other RNA
gtagcttgtcttttccaca

SEQ ID NO: 1546 - RNA, 19 nt, synthetic construct
  misc_feature 1..19: note = Description of Artificial Sequence: Synthetic oligonucleotide
  source 1..19: mol_type = other RNA
tagcttgtcttttccacat

SEQ ID NO: 1547 - RNA, 19 nt, synthetic construct
  misc_feature 1..19: note = Description of Artificial Sequence: Synthetic oligonucleotide
  source 1..19: mol_type = other RNA
agcttgtcttttccacatg

SEQ ID NO: 1548 - RNA, 19 nt, synthetic construct
  misc_feature 1..19: note = Description of Artificial Sequence: Synthetic oligonucleotide
  source 1..19: mol_type = other RNA
gcttgtcttttccacatga

SEQ ID NO: 1549 - RNA, 19 nt, synthetic construct
  misc_feature 1..19: note = Description of Artificial Sequence: Synthetic oligonucleotide
  source 1..19: mol_type = other RNA
cttgtcttttccacatgat

SEQ ID NO: 1550 - RNA, 19 nt, synthetic construct
  misc_feature 1..19: note = Description of Artificial Sequence: Synthetic oligonucleotide
  source 1..19: mol_type = other RNA
ttgtcttttccacatgatt

SEQ ID NO: 1551 - RNA, 19 nt, synthetic construct
  misc_feature 1..19: note = Description of Artificial Sequence: Synthetic oligonucleotide
  source 1..19: mol_type = other RNA
tgtcttttccacatgattt

SEQ ID NO: 1552 - RNA, 19 nt, synthetic construct
  misc_feature 1..19: note = Description of Artificial Sequence: Synthetic oligonucleotide
  source 1..19: mol_type = other RNA
gtcttttccacatgatttg

SEQ ID NO: 1553 - RNA, 19 nt, synthetic construct
  misc_feature 1..19: note = Description of Artificial Sequence: Synthetic oligonucleotide
  source 1..19: mol_type = other RNA
tcttttccacatgatttgt

SEQ ID NO: 1554 - RNA, 19 nt, synthetic construct
  misc_feature 1..19: note = Description of Artificial Sequence: Synthetic oligonucleotide
  source 1..19: mol_type = other RNA
cttttccacatgatttgtc

SEQ ID NO: 1555 - RNA, 19 nt, synthetic construct
  misc_feature 1..19: note = Description of Artificial Sequence: Synthetic oligonucleotide
  source 1..19: mol_type = other RNA
ttttccacatgatttgtct

SEQ ID NO: 1556 - RNA, 19 nt, synthetic construct
  misc_feature 1..19: note = Description of Artificial Sequence: Synthetic oligonucleotide
  source 1..19: mol_type = other RNA
tttccacatgatttgtctg

SEQ ID NO: 1557 - RNA, 19 nt, synthetic construct
  misc_feature 1..19: note = Description of Artificial Sequence: Synthetic oligonucleotide
  source 1..19: mol_type = other RNA
ttccacatgatttgtctgt

SEQ ID NO: 1558 - RNA, 19 nt, synthetic construct
  misc_feature 1..19: note = Description of Artificial Sequence: Synthetic oligonucleotide
  source 1..19: mol_type = other RNA
tccacatgatttgtctgtg

SEQ ID NO: 1559 - RNA, 19 nt, synthetic construct
  misc_feature 1..19: note = Description of Artificial Sequence: Synthetic oligonucleotide
  source 1..19: mol_type = other RNA
ccacatgatttgtctgtga

SEQ ID NO: 1560 - RNA, 19 nt, synthetic construct
  misc_feature 1..19: note = Description of Artificial Sequence: Synthetic oligonucleotide
  source 1..19: mol_type = other RNA
cacatgatttgtctgtgaa

SEQ ID NO: 1561 - RNA, 19 nt, synthetic construct
  misc_feature 1..19: note = Description of Artificial Sequence: Synthetic oligonucleotide
  source 1..19: mol_type = other RNA
acatgatttgtctgtgaaa

SEQ ID NO: 1562 - RNA, 19 nt, synthetic construct
  misc_feature 1..19: note = Description of Artificial Sequence: Synthetic oligonucleotide
  source 1..19: mol_type = other RNA
catgatttgtctgtgaaag

SEQ ID NO: 1563 - RNA, 19 nt, synthetic construct
  misc_feature 1..19: note = Description of Artificial Sequence: Synthetic oligonucleotide
  source 1..19: mol_type = other RNA
atgatttgtctgtgaaaga

SEQ ID NO: 1564 - RNA, 19 nt, synthetic construct
  misc_feature 1..19: note = Description of Artificial Sequence: Synthetic oligonucleotide
  source 1..19: mol_type = other RNA
tgatttgtctgtgaaagaa

SEQ ID NO: 1565 - RNA, 19 nt, synthetic construct
  misc_feature 1..19: note = Description of Artificial Sequence: Synthetic oligonucleotide
  source 1..19: mol_type = other RNA
gatttgtctgtgaaagaaa

SEQ ID NO: 1566 - RNA, 19 nt, synthetic construct
  misc_feature 1..19: note = Description of Artificial Sequence: Synthetic oligonucleotide
  source 1..19: mol_type = other RNA
atttgtctgtgaaagaaaa

SEQ ID NO: 1567 - RNA, 19 nt, synthetic construct
  misc_feature 1..19: note = Description of Artificial Sequence: Synthetic oligonucleotide
  source 1..19: mol_type = other RNA
tttgtctgtgaaagaaaat

SEQ ID NO: 1568 - RNA, 19 nt, synthetic construct
  misc_feature 1..19: note = Description of Artificial Sequence: Synthetic oligonucleotide
  source 1..19: mol_type = other RNA
ttgtctgtgaaagaaaata

SEQ ID NO: 1569 - RNA, 19 nt, synthetic construct
  misc_feature 1..19: note = Description of Artificial Sequence: Synthetic oligonucleotide
  source 1..19: mol_type = other RNA
tgtctgtgaaagaaaataa

SEQ ID NO: 1570 - RNA, 19 nt, synthetic construct
  misc_feature 1..19: note = Description of Artificial Sequence: Synthetic oligonucleotide
  source 1..19: mol_type = other RNA
gtctgtgaaagaaaataat

SEQ ID NO: 1571 - RNA, 19 nt, synthetic construct
  misc_feature 1..19: note = Description of Artificial Sequence: Synthetic oligonucleotide
  source 1..19: mol_type = other RNA
tctgtgaaagaaaataatt

SEQ ID NO: 1572 - RNA, 19 nt, synthetic construct
  misc_feature 1..19: note = Description of Artificial Sequence: Synthetic oligonucleotide
  source 1..19: mol_type = other RNA
ctgtgaaagaaaataattt

SEQ ID NO: 1573 - RNA, 19 nt, synthetic construct
  misc_feature 1..19: note = Description of Artificial Sequence: Synthetic oligonucleotide
  source 1..19: mol_type = other RNA
tgtgaaagaaaataatttt

SEQ ID NO: 1574 - RNA, 19 nt, synthetic construct
  misc_feature 1..19: note = Description of Artificial Sequence: Synthetic oligonucleotide
  source 1..19: mol_type = other RNA
gtgaaagaaaataattttg

SEQ ID NO: 1575 - RNA, 19 nt, synthetic construct
  misc_feature 1..19: note = Description of Artificial Sequence: Synthetic oligonucleotide
  source 1..19: mol_type = other RNA
tgaaagaaaataattttga

SEQ ID NO: 1576 - RNA, 19 nt, synthetic construct
  misc_feature 1..19: note = Description of Artificial Sequence: Synthetic oligonucleotide
  source 1..19: mol_type = other RNA
gaaagaaaataattttgag

SEQ ID NO: 1577 - RNA, 19 nt, synthetic construct
  misc_feature 1..19: note = Description of Artificial Sequence: Synthetic oligonucleotide
  source 1..19: mol_type = other RNA
aaagaaaataattttgaga

SEQ ID NO: 1578 - RNA, 19 nt, synthetic construct
  misc_feature 1..19: note = Description of Artificial Sequence: Synthetic oligonucleotide
  source 1..19: mol_type = other RNA
aagaaaataattttgagat

SEQ ID NO: 1579 - RNA, 19 nt, synthetic construct
  misc_feature 1..19: note = Description of Artificial Sequence: Synthetic oligonucleotide
  source 1..19: mol_type = other RNA
agaaaataattttgagatc

SEQ ID NO: 1580 - RNA, 19 nt, synthetic construct
  misc_feature 1..19: note = Description of Artificial Sequence: Synthetic oligonucleotide
  source 1..19: mol_type = other RNA
gaaaataattttgagatcg

SEQ ID NO: 1581 - RNA, 19 nt, synthetic construct
  misc_feature 1..19: note = Description of Artificial Sequence: Synthetic oligonucleotide
  source 1..19: mol_type = other RNA
aaaataattttgagatcgt

SEQ ID NO: 1582 - RNA, 19 nt, synthetic construct
  misc_feature 1..19: note = Description of Artificial Sequence: Synthetic oligonucleotide
  source 1..19: mol_type = other RNA
aaataattttgagatcgtt

SEQ ID NO: 1583 - RNA, 19 nt, synthetic construct
  misc_feature 1..19: note = Description of Artificial Sequence: Synthetic oligonucleotide
  source 1..19: mol_type = other RNA
aataattttgagatcgttt

SEQ ID NO: 1584 - RNA, 19 nt, synthetic construct
  misc_feature 1..19: note = Description of Artificial Sequence: Synthetic oligonucleotide
  source 1..19: mol_type = other RNA
ataattttgagatcgtttt

SEQ ID NO: 1585 - RNA, 19 nt, synthetic construct
  misc_feature 1..19: note = Description of Artificial Sequence: Synthetic oligonucleotide
  source 1..19: mol_type = other RNA
taattttgagatcgtttta

SEQ ID NO: 1586 - RNA, 19 nt, synthetic construct
  misc_feature 1..19: note = Description of Artificial Sequence: Synthetic oligonucleotide
  source 1..19: mol_type = other RNA
aattttgagatcgttttat

SEQ ID NO: 1587 - RNA, 19 nt, synthetic construct
  misc_feature 1..19: note = Description of Artificial Sequence: Synthetic oligonucleotide
  source 1..19: mol_type = other RNA
attttgagatcgttttatc

SEQ ID NO: 1588 - RNA, 19 nt, synthetic construct
  misc_feature 1..19: note = Description of Artificial Sequence: Synthetic oligonucleotide
  source 1..19: mol_type = other RNA
ttttgagatcgttttatct

SEQ ID NO: 1589 - RNA, 19 nt, synthetic construct
  misc_feature 1..19: note = Description of Artificial Sequence: Synthetic oligonucleotide
  source 1..19: mol_type = other RNA
tttgagatcgttttatcta

SEQ ID NO: 1590 - RNA, 19 nt, synthetic construct
  misc_feature 1..19: note = Description of Artificial Sequence: Synthetic oligonucleotide
  source 1..19: mol_type = other RNA
ttgagatcgttttatctat

SEQ ID NO: 1591 - RNA, 19 nt, synthetic construct
  misc_feature 1..19: note = Description of Artificial Sequence: Synthetic oligonucleotide
  source 1..19: mol_type = other RNA
tgagatcgttttatctatt

SEQ ID NO: 1592 - RNA, 19 nt, synthetic construct
  misc_feature 1..19: note = Description of Artificial Sequence: Synthetic oligonucleotide
  source 1..19: mol_type = other RNA
gagatcgttttatctattt

SEQ ID NO: 1593 - RNA, 19 nt, synthetic construct
  misc_feature 1..19: note = Description of Artificial Sequence: Synthetic oligonucleotide
  source 1..19: mol_type = other RNA
agatcgttttatctatttt

SEQ ID NO: 1594 - RNA, 19 nt, synthetic construct
  misc_feature 1..19: note = Description of Artificial Sequence: Synthetic oligonucleotide
  source 1..19: mol_type = other RNA
gatcgttttatctattttc

SEQ ID NO: 1595 - RNA, 19 nt, synthetic construct
  misc_feature 1..19: note = Description of Artificial Sequence: Synthetic oligonucleotide
  source 1..19: mol_type = other RNA
atcgttttatctattttct

SEQ ID NO: 1596 - RNA, 19 nt, synthetic construct
  misc_feature 1..19: note = Description of Artificial Sequence: Synthetic oligonucleotide
  source 1..19: mol_type = other RNA
tcgttttatctattttctc

SEQ ID NO: 1597 - RNA, 19 nt, synthetic construct
  misc_feature 1..19: note = Description of Artificial Sequence: Synthetic oligonucleotide
  source 1..19: mol_type = other RNA
cgttttatctattttctct

SEQ ID NO: 1598 - RNA, 19 nt, synthetic construct
  misc_feature 1..19: note = Description of Artificial Sequence: Synthetic oligonucleotide
  source 1..19: mol_type = other RNA
gttttatctattttctcta

SEQ ID NO: 1599 - RNA, 19 nt, synthetic construct
  misc_feature 1..19: note = Description of Artificial Sequence: Synthetic oligonucleotide
  source 1..19: mol_type = other RNA
ttttatctattttctctac

SEQ ID NO: 1600 - RNA, 19 nt, synthetic construct
  misc_feature 1..19: note = Description of Artificial Sequence: Synthetic oligonucleotide
  source 1..19: mol_type = other RNA
tttatctattttctctacg

SEQ ID NO: 1601 - RNA, 19 nt, synthetic construct
  misc_feature 1..19: note = Description of Artificial Sequence: Synthetic oligonucleotide
  source 1..19: mol_type = other RNA
ttatctattttctctacgg

SEQ ID NO: 1602 - RNA, 19 nt, synthetic construct
  misc_feature 1..19: note = Description of Artificial Sequence: Synthetic oligonucleotide
  source 1..19: mol_type = other RNA
tatctattttctctacggc

SEQ ID NO: 1603 - RNA, 19 nt, synthetic construct
  misc_feature 1..19: note = Description of Artificial Sequence: Synthetic oligonucleotide
  source 1..19: mol_type = other RNA
atctattttctctacggct

SEQ ID NO: 1604 - RNA, 19 nt, synthetic construct
  misc_feature 1..19: note = Description of Artificial Sequence: Synthetic oligonucleotide
  source 1..19: mol_type = other RNA
tctattttctctacggctt

SEQ ID NO: 1605 - RNA, 19 nt, synthetic construct
  misc_feature 1..19: note = Description of Artificial Sequence: Synthetic oligonucleotide
  source 1..19: mol_type = other RNA
ctattttctctacggctta

SEQ ID NO: 1606 - RNA, 19 nt, synthetic construct
  misc_feature 1..19: note = Description of Artificial Sequence: Synthetic oligonucleotide
  source 1..19: mol_type = other RNA
tattttctctacggcttag

SEQ ID NO: 1607 - RNA, 19 nt, synthetic construct
  misc_feature 1..19: note = Description of Artificial Sequence: Synthetic oligonucleotide
  source 1..19: mol_type = other RNA
attttctctacggcttagg

SEQ ID NO: 1608 - RNA, 19 nt, synthetic construct
  misc_feature 1..19: note = Description of Artificial Sequence: Synthetic oligonucleotide
  source 1..19: mol_type = other RNA
ttttctctacggcttaggc

SEQ ID NO: 1609 - RNA, 19 nt, synthetic construct
  misc_feature 1..19: note = Description of Artificial Sequence: Synthetic oligonucleotide
  source 1..19: mol_type = other RNA
tttctctacggcttaggct

SEQ ID NO: 1610 - RNA, 19 nt, synthetic construct
  misc_feature 1..19: note = Description of Artificial Sequence: Synthetic oligonucleotide
  source 1..19: mol_type = other RNA
ttctctacggcttaggcta

SEQ ID NO: 1611 - RNA, 19 nt, synthetic construct
  misc_feature 1..19: note = Description of Artificial Sequence: Synthetic oligonucleotide
  source 1..19: mol_type = other RNA
tctctacggcttaggctat

SEQ ID NO: 1612 - RNA, 19 nt, synthetic construct
  misc_feature 1..19: note = Description of Artificial Sequence: Synthetic oligonucleotide
  source 1..19: mol_type = other RNA
ctctacggcttaggctatg

SEQ ID NO: 1613 - RNA, 19 nt, synthetic construct
  misc_feature 1..19: note = Description of Artificial Sequence: Synthetic oligonucleotide
  source 1..19: mol_type = other RNA
tctacggcttaggctatgt

SEQ ID NO: 1614 - RNA, 19 nt, synthetic construct
  misc_feature 1..19: note = Description of Artificial Sequence: Synthetic oligonucleotide
  source 1..19: mol_type = other RNA
ctacggcttaggctatgtg

SEQ ID NO: 1615 - RNA, 19 nt, synthetic construct
  misc_feature 1..19: note = Description of Artificial Sequence: Synthetic oligonucleotide
  source 1..19: mol_type = other RNA
tacggcttaggctatgtga

SEQ ID NO: 1616 - RNA, 19 nt, synthetic construct
  misc_feature 1..19: note = Description of Artificial Sequence: Synthetic oligonucleotide
  source 1..19: mol_type = other RNA
acggcttaggctatgtgag

SEQ ID NO: 1617 - RNA, 19 nt, synthetic construct
  misc_feature 1..19: note = Description of Artificial Sequence: Synthetic oligonucleotide
  source 1..19: mol_type = other RNA
cggcttaggctatgtgagg

SEQ ID NO: 1618 - RNA, 19 nt, synthetic construct
  misc_feature 1..19: note = Description of Artificial Sequence: Synthetic oligonucleotide
  source 1..19: mol_type = other RNA
ggcttaggctatgtgaggg

SEQ ID NO: 1619 - RNA, 19 nt, synthetic construct
  misc_feature 1..19: note = Description of Artificial Sequence: Synthetic oligonucleotide
  source 1..19: mol_type = other RNA
gcttaggctatgtgagggc

SEQ ID NO: 1620 - RNA, 19 nt, synthetic construct
  misc_feature 1..19: note = Description of Artificial Sequence: Synthetic oligonucleotide
  source 1..19: mol_type = other RNA
cttaggctatgtgagggca

SEQ ID NO: 1621 - RNA, 19 nt, synthetic construct
  misc_feature 1..19: note = Description of Artificial Sequence: Synthetic oligonucleotide
  source 1..19: mol_type = other RNA
ttaggctatgtgagggcaa

SEQ ID NO: 1622 - RNA, 19 nt, synthetic construct
  misc_feature 1..19: note = Description of Artificial Sequence: Synthetic oligonucleotide
  source 1..19: mol_type = other RNA
taggctatgtgagggcaaa

SEQ ID NO: 1623 - RNA, 19 nt, synthetic construct
  misc_feature 1..19: note = Description of Artificial Sequence: Synthetic oligonucleotide
  source 1..19: mol_type = other RNA
aggctatgtgagggcaaaa

SEQ ID NO: 1624 - RNA, 19 nt, synthetic construct
  misc_feature 1..19: note = Description of Artificial Sequence: Synthetic oligonucleotide
  source 1..19: mol_type = other RNA
ggctatgtgagggcaaaac

SEQ ID NO: 1625 - RNA, 19 nt, synthetic construct
  misc_feature 1..19: note = Description of Artificial Sequence: Synthetic oligonucleotide
  source 1..19: mol_type = other RNA
gctatgtgagggcaaaaca

SEQ ID NO: 1626 - RNA, 19 nt, synthetic construct
  misc_feature 1..19: note = Description of Artificial Sequence: Synthetic oligonucleotide
  source 1..19: mol_type = other RNA
ctatgtgagggcaaaacac

SEQ ID NO: 1627 - RNA, 19 nt, synthetic construct
  misc_feature 1..19: note = Description of Artificial Sequence: Synthetic oligonucleotide
  source 1..19: mol_type = other RNA
tatgtgagggcaaaacaca

SEQ ID NO: 1628 - RNA, 19 nt, synthetic construct
  misc_feature 1..19: note = Description of Artificial Sequence: Synthetic oligonucleotide
  source 1..19: mol_type = other RNA
atgtgagggcaaaacacaa

SEQ ID NO: 1629 - RNA, 19 nt, synthetic construct
  misc_feature 1..19: note = Description of Artificial Sequence: Synthetic oligonucleotide
  source 1..19: mol_type = other RNA
tgtgagggcaaaacacaaa

SEQ ID NO: 1630 - RNA, 19 nt, synthetic construct
  misc_feature 1..19: note = Description of Artificial Sequence: Synthetic oligonucleotide
  source 1..19: mol_type = other RNA
gtgagggcaaaacacaaat

SEQ ID NO: 1631 - RNA, 19 nt, synthetic construct
  misc_feature 1..19: note = Description of Artificial Sequence: Synthetic oligonucleotide
  source 1..19: mol_type = other RNA
tgagggcaaaacacaaatc

SEQ ID NO: 1632 - RNA, 19 nt, synthetic construct
  misc_feature 1..19: note = Description of Artificial Sequence: Synthetic oligonucleotide
  source 1..19: mol_type = other RNA
gagggcaaaacacaaatcc

SEQ ID NO: 1633 - RNA, 19 nt, synthetic construct
  misc_feature 1..19: note = Description of Artificial Sequence: Synthetic oligonucleotide
  source 1..19: mol_type = other RNA
agggcaaaacacaaatccc

SEQ ID NO: 1634 - RNA, 19 nt, synthetic construct
  misc_feature 1..19: note = Description of Artificial Sequence: Synthetic oligonucleotide
  source 1..19: mol_type = other RNA
gggcaaaacacaaatccct

SEQ ID NO: 1635 - RNA, 19 nt, synthetic construct
  misc_feature 1..19: note = Description of Artificial Sequence: Synthetic oligonucleotide
  source 1..19: mol_type = other RNA
ggcaaaacacaaatccctt

SEQ ID NO: 1636 - RNA, 19 nt, synthetic construct
  misc_feature 1..19: note = Description of Artificial Sequence: Synthetic oligonucleotide
  source 1..19: mol_type = other RNA
gcaaaacacaaatcccttt

SEQ ID NO: 1637 - RNA, 19 nt, synthetic construct
  misc_feature 1..19: note = Description of Artificial Sequence: Synthetic oligonucleotide
  source 1..19: mol_type = other RNA
caaaacacaaatccctttg

SEQ ID NO: 1638 - RNA, 19 nt, synthetic construct
  misc_feature 1..19: note = Description of Artificial Sequence: Synthetic oligonucleotide
  source 1..19: mol_type = other RNA
aaaacacaaatccctttgc

SEQ ID NO: 1639 - RNA, 19 nt, synthetic construct
  misc_feature 1..19: note = Description of Artificial Sequence: Synthetic oligonucleotide
  source 1..19: mol_type = other RNA
aaacacaaatccctttgct

SEQ ID NO: 1640 - RNA, 19 nt, synthetic construct
  misc_feature 1..19: note = Description of Artificial Sequence: Synthetic oligonucleotide
  source 1..19: mol_type = other RNA
aacacaaatccctttgcta

SEQ ID NO: 1641 - RNA, 19 nt, synthetic construct
  misc_feature 1..19: note = Description of Artificial Sequence: Synthetic oligonucleotide
  source 1..19: mol_type = other RNA
acacaaatccctttgctaa

SEQ ID NO: 1642 - RNA, 19 nt, synthetic construct
  misc_feature 1..19: note = Description of Artificial Sequence: Synthetic oligonucleotide
  source 1..19: mol_type = other RNA
cacaaatccctttgctaaa

SEQ ID NO: 1643 - RNA, 19 nt, synthetic construct
  misc_feature 1..19: note = Description of Artificial Sequence: Synthetic oligonucleotide
  source 1..19: mol_type = other RNA
acaaatccctttgctaaaa

SEQ ID NO: 1644 - RNA, 19 nt, synthetic construct
  misc_feature 1..19: note = Description of Artificial Sequence: Synthetic oligonucleotide
  source 1..19: mol_type = other RNA
caaatccctttgctaaaaa

SEQ ID NO: 1645 - RNA, 19 nt, synthetic construct
  misc_feature 1..19: note = Description of Artificial Sequence: Synthetic oligonucleotide
  source 1..19: mol_type = other RNA
aaatccctttgctaaaaag

SEQ ID NO: 1646 - RNA, 19 nt, synthetic construct
  misc_feature 1..19: note = Description of Artificial Sequence: Synthetic oligonucleotide
  source 1..19: mol_type = other RNA
aatccctttgctaaaaaga

SEQ ID NO: 1647 - RNA, 19 nt, synthetic construct
  misc_feature 1..19: note = Description of Artificial Sequence: Synthetic oligonucleotide
  source 1..19: mol_type = other RNA
atccctttgctaaaaagaa

SEQ ID NO: 1648 - RNA, 19 nt, synthetic construct
  misc_feature 1..19: note = Description of Artificial Sequence: Synthetic oligonucleotide
  source 1..19: mol_type = other RNA
tccctttgctaaaaagaac

SEQ ID NO: 1649 - RNA, 19 nt, synthetic construct
  misc_feature 1..19: note = Description of Artificial Sequence: Synthetic oligonucleotide
  source 1..19: mol_type = other RNA
ccctttgctaaaaagaacc

SEQ ID NO: 1650 - RNA, 19 nt, synthetic construct
  misc_feature 1..19: note = Description of Artificial Sequence: Synthetic oligonucleotide
  source 1..19: mol_type = other RNA
cctttgctaaaaagaacca

SEQ ID NO: 1651 - RNA, 19 nt, synthetic construct
  misc_feature 1..19: note = Description of Artificial Sequence: Synthetic oligonucleotide
  source 1..19: mol_type = other RNA
ctttgctaaaaagaaccat

SEQ ID NO: 1652 - RNA, 19 nt, synthetic construct
  misc_feature 1..19: note = Description of Artificial Sequence: Synthetic oligonucleotide
  source 1..19: mol_type = other RNA
tttgctaaaaagaaccata

SEQ ID NO: 1653 - RNA, 19 nt, synthetic construct
  misc_feature 1..19: note = Description of Artificial Sequence: Synthetic oligonucleotide
  source 1..19: mol_type = other RNA
ttgctaaaaagaaccatat

SEQ ID NO: 1654 - RNA, 19 nt, synthetic construct
  misc_feature 1..19: note = Description of Artificial Sequence: Synthetic oligonucleotide
  source 1..19: mol_type = other RNA
tgctaaaaagaaccatatt

SEQ ID NO: 1655 - RNA, 19 nt, synthetic construct
  misc_feature 1..19: note = Description of Artificial Sequence: Synthetic oligonucleotide
  source 1..19: mol_type = other RNA
gctaaaaagaaccatatta

SEQ ID NO: 1656 - RNA, 19 nt, synthetic construct
  misc_feature 1..19: note = Description of Artificial Sequence: Synthetic oligonucleotide
  source 1..19: mol_type = other RNA
ctaaaaagaaccatattat

SEQ ID NO: 1657 - RNA, 19 nt, synthetic construct
  misc_feature 1..19: note = Description of Artificial Sequence: Synthetic oligonucleotide
  source 1..19: mol_type = other RNA
taaaaagaaccatattatt

SEQ ID NO: 1658 - RNA, 19 nt, synthetic construct
  misc_feature 1..19: note = Description of Artificial Sequence: Synthetic oligonucleotide
  source 1..19: mol_type = other RNA
aaaaagaaccatattattt

SEQ ID NO: 1659 - RNA, 19 nt, synthetic construct
  misc_feature 1..19: note = Description of Artificial Sequence: Synthetic oligonucleotide
  source 1..19: mol_type = other RNA
aaaagaaccatattatttt

SEQ ID NO: 1660 - RNA, 19 nt, synthetic construct
  misc_feature 1..19: note = Description of Artificial Sequence: Synthetic oligonucleotide
  source 1..19: mol_type = other RNA
aaagaaccatattattttg

SEQ ID NO: 1661 - RNA, 19 nt, synthetic construct
  misc_feature 1..19: note = Description of Artificial Sequence: Synthetic oligonucleotide
  source 1..19: mol_type = other RNA
aagaaccatattattttga

SEQ ID NO: 1662 - RNA, 19 nt, synthetic construct
  misc_feature 1..19: note = Description of Artificial Sequence: Synthetic oligonucleotide
  source 1..19: mol_type = other RNA
agaaccatattattttgat

SEQ ID NO: 1663 - RNA, 19 nt, synthetic construct
  misc_feature 1..19: note = Description of Artificial Sequence: Synthetic oligonucleotide
  source 1..19: mol_type = other RNA
gaaccatattattttgatt

SEQ ID NO: 1664 - RNA, 19 nt, synthetic construct
  misc_feature 1..19: note = Description of Artificial Sequence: Synthetic oligonucleotide
  source 1..19: mol_type = other RNA
aaccatattattttgattc

SEQ ID NO: 1665 - RNA, 19 nt, synthetic construct
  misc_feature 1..19: note = Description of Artificial Sequence: Synthetic oligonucleotide
  source 1..19: mol_type = other RNA
accatattattttgattct

SEQ ID NO: 1666 - RNA, 19 nt, synthetic construct
  misc_feature 1..19: note = Description of Artificial Sequence: Synthetic oligonucleotide
  source 1..19: mol_type = other RNA
ccatattattttgattctc

SEQ ID NO: 1667 - RNA, 19 nt, synthetic construct
  misc_feature 1..19: note = Description of Artificial Sequence: Synthetic oligonucleotide
  source 1..19: mol_type = other RNA
catattattttgattctca

SEQ ID NO: 1668 - RNA, 19 nt, synthetic construct
  misc_feature 1..19: note = Description of Artificial Sequence: Synthetic oligonucleotide
  source 1..19: mol_type = other RNA
atattattttgattctcaa

SEQ ID NO: 1669 - RNA, 19 nt, synthetic construct
  misc_feature 1..19: note = Description of Artificial Sequence: Synthetic oligonucleotide
  source 1..19: mol_type = other RNA
tattattttgattctcaaa

SEQ ID NO: 1670 - RNA, 19 nt, synthetic construct
  misc_feature 1..19: note = Description of Artificial Sequence: Synthetic oligonucleotide
  source 1..19: mol_type = other RNA
attattttgattctcaaag

SEQ ID NO: 1671 - RNA, 19 nt, synthetic construct
  misc_feature 1..19: note = Description of Artificial Sequence: Synthetic oligonucleotide
  source 1..19: mol_type = other RNA
ttattttgattctcaaagg

SEQ ID NO: 1672 - RNA, 19 nt, synthetic construct
  misc_feature 1..19: note = Description of Artificial Sequence: Synthetic oligonucleotide
  source 1..19: mol_type = other RNA
tattttgattctcaaagga

SEQ ID NO: 1673 - RNA, 19 nt, synthetic construct
  misc_feature 1..19: note = Description of Artificial Sequence: Synthetic oligonucleotide
  source 1..19: mol_type = other RNA
attttgattctcaaaggat

SEQ ID NO: 1674 - RNA, 19 nt, synthetic construct
  misc_feature 1..19: note = Description of Artificial Sequence: Synthetic oligonucleotide
  source 1..19: mol_type = other RNA
ttttgattctcaaaggata

SEQ ID NO: 1675 - RNA, 19 nt, synthetic construct
  misc_feature 1..19: note = Description of Artificial Sequence: Synthetic oligonucleotide
  source 1..19: mol_type = other RNA
tttgattctcaaaggatag

SEQ ID NO: 1676 - RNA, 19 nt, synthetic construct
  misc_feature 1..19: note = Description of Artificial Sequence: Synthetic oligonucleotide
  source 1..19: mol_type = other RNA
ttgattctcaaaggatagg

SEQ ID NO: 1677 - RNA, 19 nt, synthetic construct
  misc_feature 1..19: note = Description of Artificial Sequence: Synthetic oligonucleotide
  source 1..19: mol_type = other RNA
tgattctcaaaggataggc

SEQ ID NO: 1678 - RNA, 19 nt, synthetic construct
  misc_feature 1..19: note = Description of Artificial Sequence: Synthetic oligonucleotide
  source 1..19: mol_type = other RNA
gattctcaaaggataggcc

SEQ ID NO: 1679 - RNA, 19 nt, synthetic construct
  misc_feature 1..19: note = Description of Artificial Sequence: Synthetic oligonucleotide
  source 1..19: mol_type = other RNA
attctcaaaggataggcct

SEQ ID NO: 1680 - RNA, 19 nt, synthetic construct
  misc_feature 1..19: note = Description of Artificial Sequence: Synthetic oligonucleotide
  source 1..19: mol_type = other RNA
ttctcaaaggataggcctt

SEQ ID NO: 1681 - RNA, 19 nt, synthetic construct
  misc_feature 1..19: note = Description of Artificial Sequence: Synthetic oligonucleotide
  source 1..19: mol_type = other RNA
tctcaaaggataggccttt

SEQ ID NO: 1682 - RNA, 19 nt, synthetic construct
  misc_feature 1..19: note = Description of Artificial Sequence: Synthetic oligonucleotide
  source 1..19: mol_type = other RNA
ctcaaaggataggcctttg

SEQ ID NO: 1683 - RNA, 19 nt, synthetic construct
  misc_feature 1..19: note = Description of Artificial Sequence: Synthetic oligonucleotide
  source 1..19: mol_type = other RNA
tcaaaggataggcctttga

SEQ ID NO: 1684 - RNA, 19 nt, synthetic construct
  misc_feature 1..19: note = Description of Artificial Sequence: Synthetic oligonucleotide
  source 1..19: mol_type = other RNA
caaaggataggcctttgag

SEQ ID NO: 1685 - RNA, 19 nt, synthetic construct
  misc_feature 1..19: note = Description of Artificial Sequence: Synthetic oligonucleotide
  source 1..19: mol_type = other RNA
aaaggataggcctttgagt

SEQ ID NO: 1686 - RNA, 19 nt, synthetic construct
  misc_feature 1..19: note = Description of Artificial Sequence: Synthetic oligonucleotide
  source 1..19: mol_type = other RNA
aaggataggcctttgagtg

SEQ ID NO: 1687 - RNA, 19 nt, synthetic construct
  misc_feature 1..19: note = Description of Artificial Sequence: Synthetic oligonucleotide
  source 1..19: mol_type = other RNA
aggataggcctttgagtgt

SEQ ID NO: 1688 - RNA, 19 nt, synthetic construct
  misc_feature 1..19: note = Description of Artificial Sequence: Synthetic oligonucleotide
  source 1..19: mol_type = other RNA
ggataggcctttgagtgtt

SEQ ID NO: 1689 - RNA, 19 nt, synthetic construct
  misc_feature 1..19: note = Description of Artificial Sequence: Synthetic oligonucleotide
  source 1..19: mol_type = other RNA
gataggcctttgagtgtta

SEQ ID NO: 1690 - RNA, 19 nt, synthetic construct
  misc_feature 1..19: note = Description of Artificial Sequence: Synthetic oligonucleotide
  source 1..19: mol_type = other RNA
ataggcctttgagtgttag

SEQ ID NO: 1691 - RNA, 19 nt, synthetic construct
  misc_feature 1..19: note = Description of Artificial Sequence: Synthetic oligonucleotide
  source 1..19: mol_type = other RNA
taggcctttgagtgttaga

SEQ ID NO: 1692 - RNA, 19 nt, synthetic construct
  misc_feature 1..19: note = Description of Artificial Sequence: Synthetic oligonucleotide
  source 1..19: mol_type = other RNA
aggcctttgagtgttagag

SEQ ID NO: 1693 - RNA, 19 nt, synthetic construct
  misc_feature 1..19: note = Description of Artificial Sequence: Synthetic oligonucleotide
  source 1..19: mol_type = other RNA
ggcctttgagtgttagaga

SEQ ID NO: 1694 - RNA, 19 nt, synthetic construct
  misc_feature 1..19: note = Description of Artificial Sequence: Synthetic oligonucleotide
  source 1..19: mol_type = other RNA
gcctttgagtgttagagaa

SEQ ID NO: 1695 - RNA, 19 nt, synthetic construct
  misc_feature 1..19: note = Description of Artificial Sequence: Synthetic oligonucleotide
  source 1..19: mol_type = other RNA
cctttgagtgttagagaaa

SEQ ID NO: 1696 - RNA, 19 nt, synthetic construct
  misc_feature 1..19: note = Description of Artificial Sequence: Synthetic oligonucleotide
  source 1..19: mol_type = other RNA
ctttgagtgttagagaaag

SEQ ID NO: 1697 - RNA, 19 nt, synthetic construct
  misc_feature 1..19: note = Description of Artificial Sequence: Synthetic oligonucleotide
  source 1..19: mol_type = other RNA
tttgagtgttagagaaagg

SEQ ID NO: 1698 - RNA, 19 nt, synthetic construct
  misc_feature 1..19: note = Description of Artificial Sequence: Synthetic oligonucleotide
  source 1..19: mol_type = other RNA
ttgagtgttagagaaagga

SEQ ID NO: 1699 - RNA, 19 nt, synthetic construct
  misc_feature 1..19: note = Description of Artificial Sequence: Synthetic oligonucleotide
  source 1..19: mol_type = other RNA
tgagtgttagagaaaggag

SEQ ID NO: 1700 - RNA, 19 nt, synthetic construct
  misc_feature 1..19: note = Description of Artificial Sequence: Synthetic oligonucleotide
  source 1..19: mol_type = other RNA
gagtgttagagaaaggagt

SEQ ID NO: 1701 - RNA, 19 nt, synthetic construct
  misc_feature 1..19: note = Description of Artificial Sequence: Synthetic oligonucleotide
  source 1..19: mol_type = other RNA
agtgttagagaaaggagtg

SEQ ID NO: 1702 - RNA, 19 nt, synthetic construct
  misc_feature 1..19: note = Description of Artificial Sequence: Synthetic oligonucleotide
  source 1..19: mol_type = other RNA
gtgttagagaaaggagtga

SEQ ID NO: 1703 - RNA, 19 nt, synthetic construct
  misc_feature 1..19: note = Description of Artificial Sequence: Synthetic oligonucleotide
  source 1..19: mol_type = other RNA
tgttagagaaaggagtgaa

SEQ ID NO: 1704 - RNA, 19 nt, synthetic construct
  misc_feature 1..19: note = Description of Artificial Sequence: Synthetic oligonucleotide
  source 1..19: mol_type = other RNA
gttagagaaaggagtgaag

SEQ ID NO: 1705 - RNA, 19 nt, synthetic construct
  misc_feature 1..19: note = Description of Artificial Sequence: Synthetic oligonucleotide
  source 1..19: mol_type = other RNA
ttagagaaaggagtgaagg

SEQ ID NO: 1706 - RNA, 19 nt, synthetic construct
  misc_feature 1..19: note = Description of Artificial Sequence: Synthetic oligonucleotide
  source 1..19: mol_type = other RNA
tagagaaaggagtgaagga

SEQ ID NO: 1707 - RNA, 19 nt, synthetic construct
  misc_feature 1..19: note = Description of Artificial Sequence: Synthetic oligonucleotide
  source 1..19: mol_type = other RNA
agagaaaggagtgaaggag

SEQ ID NO: 1708 - RNA, 19 nt, synthetic construct
  misc_feature 1..19: note = Description of Artificial Sequence: Synthetic oligonucleotide
  source 1..19: mol_type = other RNA
gagaaaggagtgaaggagg

SEQ ID NO: 1709 - RNA, 19 nt, synthetic construct
  misc_feature 1..19: note = Description of Artificial Sequence: Synthetic oligonucleotide
  source 1..19: mol_type = other RNA
agaaaggagtgaaggaggc

SEQ ID NO: 1710 - RNA, 19 nt, synthetic construct
  misc_feature 1..19: note = Description of Artificial Sequence: Synthetic oligonucleotide
  source 1..19: mol_type = other RNA
gaaaggagtgaaggaggca

SEQ ID NO: 1711 - RNA, 19 nt, synthetic construct
  misc_feature 1..19: note = Description of Artificial Sequence: Synthetic oligonucleotide
  source 1..19: mol_type = other RNA
aaaggagtgaaggaggcag

SEQ ID NO: 1712 - RNA, 19 nt, synthetic construct
  misc_feature 1..19: note = Description of Artificial Sequence: Synthetic oligonucleotide
  source 1..19: mol_type = other RNA
aaggagtgaaggaggcagg

SEQ ID NO: 1713 - RNA, 19 nt, synthetic construct
  misc_feature 1..19: note = Description of Artificial Sequence: Synthetic oligonucleotide
  source 1..19: mol_type = other RNA
aggagtgaaggaggcaggt

SEQ ID NO: 1714 - RNA, 19 nt, synthetic construct
  misc_feature 1..19: note = Description of Artificial Sequence: Synthetic oligonucleotide
  source 1..19: mol_type = other RNA
ggagtgaaggaggcaggtg

SEQ ID NO: 1715 - RNA, 19 nt, synthetic construct
  misc_feature 1..19: note = Description of Artificial Sequence: Synthetic oligonucleotide
  source 1..19: mol_type = other RNA
gagtgaaggaggcaggtgg

SEQ ID NO: 1716 - RNA, 19 nt, synthetic construct
  misc_feature 1..19: note = Description of Artificial Sequence: Synthetic oligonucleotide
  source 1..19: mol_type = other RNA
agtgaaggaggcaggtggg

SEQ ID NO: 1717 - RNA, 19 nt, synthetic construct
  misc_feature 1..19: note = Description of Artificial Sequence: Synthetic oligonucleotide
  source 1..19: mol_type = other RNA
gtgaaggaggcaggtggga

SEQ ID NO: 1718 - RNA, 19 nt, synthetic construct
  misc_feature 1..19: note = Description of Artificial Sequence: Synthetic oligonucleotide
  source 1..19: mol_type = other RNA
tgaaggaggcaggtgggaa

SEQ ID NO: 1719 - RNA, 19 nt, synthetic construct
  misc_feature 1..19: note = Description of Artificial Sequence: Synthetic oligonucleotide
  source 1..19: mol_type = other RNA
gaaggaggcaggtgggaaa

SEQ ID NO: 1720 - RNA, 19 nt, synthetic construct
  misc_feature 1..19: note = Description of Artificial Sequence: Synthetic oligonucleotide
  source 1..19: mol_type = other RNA
aaggaggcaggtgggaaat

SEQ ID NO: 1721 - RNA, 19 nt, synthetic construct
  misc_feature 1..19: note = Description of Artificial Sequence: Synthetic oligonucleotide
  source 1..19: mol_type = other RNA
aggaggcaggtgggaaatg

SEQ ID NO: 1722 - RNA, 19 nt, synthetic construct
  misc_feature 1..19: note = Description of Artificial Sequence: Synthetic oligonucleotide
  source 1..19: mol_type = other RNA
ggaggcaggtgggaaatgg

SEQ ID NO: 1723 - RNA, 19 nt, synthetic construct
  misc_feature 1..19: note = Description of Artificial Sequence: Synthetic oligonucleotide
  source 1..19: mol_type = other RNA
gaggcaggtgggaaatggt

SEQ ID NO: 1724 - RNA, 19 nt, synthetic construct
  misc_feature 1..19: note = Description of Artificial Sequence: Synthetic oligonucleotide
  source 1..19: mol_type = other RNA
aggcaggtgggaaatggta

SEQ ID NO: 1725 - RNA, 19 nt, synthetic construct
  misc_feature 1..19: note = Description of Artificial Sequence: Synthetic oligonucleotide
  source 1..19: mol_type = other RNA
ggcaggtgggaaatggtat

SEQ ID NO: 1726 - RNA, 19 nt, synthetic construct
  misc_feature 1..19: note = Description of Artificial Sequence: Synthetic oligonucleotide
  source 1..19: mol_type = other RNA
gcaggtgggaaatggtatt

SEQ ID NO: 1727 - RNA, 19 nt, synthetic construct
  misc_feature 1..19: note = Description of Artificial Sequence: Synthetic oligonucleotide
  source 1..19: mol_type = other RNA
caggtgggaaatggtattt

SEQ ID NO: 1728 - RNA, 19 nt, synthetic construct
  misc_feature 1..19: note = Description of Artificial Sequence: Synthetic oligonucleotide
  source 1..19: mol_type = other RNA
aggtgggaaatggtatttc

SEQ ID NO: 1729 - RNA, 19 nt, synthetic construct
  misc_feature 1..19: note = Description of Artificial Sequence: Synthetic oligonucleotide
  source 1..19: mol_type = other RNA
ggtgggaaatggtatttct

SEQ ID NO: 1730 - RNA, 19 nt, synthetic construct
  misc_feature 1..19: note = Description of Artificial Sequence: Synthetic oligonucleotide
  source 1..19: mol_type = other RNA
gtgggaaatggtatttcta

SEQ ID NO: 1731 - RNA, 19 nt, synthetic construct
  misc_feature 1..19: note = Description of Artificial Sequence: Synthetic oligonucleotide
  source 1..19: mol_type = other RNA
tgggaaatggtatttctat

SEQ ID NO: 1732 - RNA, 19 nt, synthetic construct
  misc_feature 1..19: note = Description of Artificial Sequence: Synthetic oligonucleotide
  source 1..19: mol_type = other RNA
gggaaatggtatttctatt

SEQ ID NO: 1733 - RNA, 19 nt, synthetic construct
  misc_feature 1..19: note = Description of Artificial Sequence: Synthetic oligonucleotide
  source 1..19: mol_type = other RNA
ggaaatggtatttctattt

SEQ ID NO: 1734 - RNA, 19 nt, synthetic construct
  misc_feature 1..19: note = Description of Artificial Sequence: Synthetic oligonucleotide
  source 1..19: mol_type = other RNA
gaaatggtatttctatttt

SEQ ID NO: 1735 - RNA, 19 nt, synthetic construct
  misc_feature 1..19: note = Description of Artificial Sequence: Synthetic oligonucleotide
  source 1..19: mol_type = other RNA
aaatggtatttctattttt

SEQ ID NO: 1736 - RNA, 19 nt, synthetic construct
  misc_feature 1..19: note = Description of Artificial Sequence: Synthetic oligonucleotide
  source 1..19: mol_type = other RNA
aatggtatttctattttta

SEQ ID NO: 1737 - RNA, 19 nt, synthetic construct
  misc_feature 1..19: note = Description of Artificial Sequence: Synthetic oligonucleotide
  source 1..19: mol_type = other RNA
atggtatttctatttttaa

SEQ ID NO: 1738 - RNA, 19 nt, synthetic construct
  misc_feature 1..19: note = Description of Artificial Sequence: Synthetic oligonucleotide
  source 1..19: mol_type = other RNA
tggtatttctatttttaaa

SEQ ID NO: 1739 - RNA, 19 nt, synthetic construct
  misc_feature 1..19: note = Description of Artificial Sequence: Synthetic oligonucleotide
  source 1..19: mol_type = other RNA
ggtatttctatttttaaat

SEQ ID NO: 1740 - RNA, 19 nt, synthetic construct
  misc_feature 1..19: note = Description of Artificial Sequence: Synthetic oligonucleotide
  source 1..19: mol_type = other RNA
gtatttctatttttaaatc

SEQ ID NO: 1741 - RNA, 19 nt, synthetic construct
  misc_feature 1..19: note = Description of Artificial Sequence: Synthetic oligonucleotide
  source 1..19: mol_type = other RNA
tatttctatttttaaatcc

SEQ ID NO: 1742 - RNA, 19 nt, synthetic construct
  misc_feature 1..19: note = Description of Artificial Sequence: Synthetic oligonucleotide
  source 1..19: mol_type = other RNA
atttctatttttaaatcca

SEQ ID NO: 1743 - RNA, 19 nt, synthetic construct
  misc_feature 1..19: note = Description of Artificial Sequence: Synthetic oligonucleotide
  source 1..19: mol_type = other RNA
tttctatttttaaatccag

SEQ ID NO: 1744 - RNA, 19 nt, synthetic construct
  misc_feature 1..19: note = Description of Artificial Sequence: Synthetic oligonucleotide
  source 1..19: mol_type = other RNA
ttctatttttaaatccagt

SEQ ID NO: 1745 - RNA, 19 nt, synthetic construct
  misc_feature 1..19: note = Description of Artificial Sequence: Synthetic oligonucleotide
  source 1..19: mol_type = other RNA
tctatttttaaatccagtg

SEQ ID NO: 1746 - RNA, 19 nt, synthetic construct
  misc_feature 1..19: note = Description of Artificial Sequence: Synthetic oligonucleotide
  source 1..19: mol_type = other RNA
ctatttttaaatccagtga

SEQ ID NO: 1747 - RNA, 19 nt, synthetic construct
  misc_feature 1..19: note = Description of Artificial Sequence: Synthetic oligonucleotide
  source 1..19: mol_type = other RNA
tatttttaaatccagtgaa

SEQ ID NO: 1748 - RNA, 19 nt, synthetic construct
  misc_feature 1..19: note = Description of Artificial Sequence: Synthetic oligonucleotide
  source 1..19: mol_type = other RNA
atttttaaatccagtgaaa

SEQ ID NO: 1749 - RNA, 19 nt, synthetic construct
  misc_feature 1..19: note = Description of Artificial Sequence: Synthetic oligonucleotide
  source 1..19: mol_type = other RNA
tttttaaatccagtgaaat

SEQ ID NO: 1750 - RNA, 19 nt, synthetic construct
  misc_feature 1..19: note = Description of Artificial Sequence: Synthetic oligonucleotide
  source 1..19: mol_type = other RNA
ttttaaatccagtgaaatt

SEQ ID NO: 1751 - RNA, 19 nt, synthetic construct
  misc_feature 1..19: note = Description of Artificial Sequence: Synthetic oligonucleotide
  source 1..19: mol_type = other RNA
tttaaatccagtgaaatta

SEQ ID NO: 1752 - RNA, 19 nt, synthetic construct
  misc_feature 1..19: note = Description of Artificial Sequence: Synthetic oligonucleotide
  source 1..19: mol_type = other RNA
ttaaatccagtgaaattat

SEQ ID NO: 1753 - RNA, 19 nt, synthetic construct
  misc_feature 1..19: note = Description of Artificial Sequence: Synthetic oligonucleotide
  source 1..19: mol_type = other RNA
taaatccagtgaaattatc

SEQ ID NO: 1754 - RNA, 19 nt, synthetic construct
  misc_feature 1..19: note = Description of Artificial Sequence: Synthetic oligonucleotide
  source 1..19: mol_type = other RNA
aaatccagtgaaattatct

SEQ ID NO: 1755 - RNA, 19 nt, synthetic construct
  misc_feature 1..19: note = Description of Artificial Sequence: Synthetic oligonucleotide
  source 1..19: mol_type = other RNA
aatccagtgaaattatctt

SEQ ID NO: 1756 - RNA, 19 nt, synthetic construct
  misc_feature 1..19: note = Description of Artificial Sequence: Synthetic oligonucleotide
  source 1..19: mol_type = other RNA
atccagtgaaattatcttg

SEQ ID NO: 1757 - RNA, 19 nt, synthetic construct
  misc_feature 1..19: note = Description of Artificial Sequence: Synthetic oligonucleotide
  source 1..19: mol_type = other RNA
tccagtgaaattatcttga

SEQ ID NO: 1758 - RNA, 19 nt, synthetic construct
  misc_feature 1..19: note = Description of Artificial Sequence: Synthetic oligonucleotide
  source 1..19: mol_type = other RNA
ccagtgaaattatcttgag

SEQ ID NO: 1759 - RNA, 19 nt, synthetic construct
  misc_feature 1..19: note = Description of Artificial Sequence: Synthetic oligonucleotide
  source 1..19: mol_type = other RNA
cagtgaaattatcttgagt

SEQ ID NO: 1760 - RNA, 19 nt, synthetic construct
  misc_feature 1..19: note = Description of Artificial Sequence: Synthetic oligonucleotide
  source 1..19: mol_type = other RNA
agtgaaattatcttgagtc

SEQ ID NO: 1761 - RNA, 19 nt, synthetic construct
  misc_feature 1..19: note = Description of Artificial Sequence: Synthetic oligonucleotide
  source 1..19: mol_type = other RNA
gtgaaattatcttgagtct

SEQ ID NO: 1762 - RNA, 19 nt, synthetic construct
  misc_feature 1..19: note = Description of Artificial Sequence: Synthetic oligonucleotide
  source 1..19: mol_type = other RNA
tgaaattatcttgagtcta

SEQ ID NO: 1763 - RNA, 19 nt, synthetic construct
  misc_feature 1..19: note = Description of Artificial Sequence: Synthetic oligonucleotide
  source 1..19: mol_type = other RNA
gaaattatcttgagtctac

SEQ ID NO: 1764 - RNA, 19 nt, synthetic construct
  misc_feature 1..19: note = Description of Artificial Sequence: Synthetic oligonucleotide
  source 1..19: mol_type = other RNA
aaattatcttgagtctaca

SEQ ID NO: 1765 - RNA, 19 nt, synthetic construct
  misc_feature 1..19: note = Description of Artificial Sequence: Synthetic oligonucleotide
  source 1..19: mol_type = other RNA
aattatcttgagtctacac

SEQ ID NO: 1766 - RNA, 19 nt, synthetic construct
  misc_feature 1..19: note = Description of Artificial Sequence: Synthetic oligonucleotide
  source 1..19: mol_type = other RNA
attatcttgagtctacaca

SEQ ID NO: 1767 - RNA, 19 nt, synthetic construct
  misc_feature 1..19: note = Description of Artificial Sequence: Synthetic oligonucleotide
  source 1..19: mol_type = other RNA
ttatcttgagtctacacat

SEQ ID NO: 1768 - RNA, 19 nt, synthetic construct
  misc_feature 1..19: note = Description of Artificial Sequence: Synthetic oligonucleotide
  source 1..19: mol_type = other RNA
tatcttgagtctacacatt

SEQ ID NO: 1769 - RNA, 19 nt, synthetic construct
  misc_feature 1..19: note = Description of Artificial Sequence: Synthetic oligonucleotide
  source 1..19: mol_type = other RNA
atcttgagtctacacatta

SEQ ID NO: 1770 - RNA, 19 nt, synthetic construct
  misc_feature 1..19: note = Description of Artificial Sequence: Synthetic oligonucleotide
  source 1..19: mol_type = other RNA
tcttgagtctacacattat

SEQ ID NO: 1771 - RNA, 19 nt, synthetic construct
  misc_feature 1..19: note = Description of Artificial Sequence: Synthetic oligonucleotide
  source 1..19: mol_type = other RNA
cttgagtctacacattatt

SEQ ID NO: 1772 - RNA, 19 nt, synthetic construct
  misc_feature 1..19: note = Description of Artificial Sequence: Synthetic oligonucleotide
  source 1..19: mol_type = other RNA
ttgagtctacacattattt

SEQ ID NO: 1773 - RNA, 19 nt, synthetic construct
  misc_feature 1..19: note = Description of Artificial Sequence: Synthetic oligonucleotide
  source 1..19: mol_type = other RNA
tgagtctacacattatttt

SEQ ID NO: 1774 - RNA, 19 nt, synthetic construct
  misc_feature 1..19: note = Description of Artificial Sequence: Synthetic oligonucleotide
  source 1..19: mol_type = other RNA
gagtctacacattattttt

SEQ ID NO: 1775 - RNA, 19 nt, synthetic construct
  misc_feature 1..19: note = Description of Artificial Sequence: Synthetic oligonucleotide
  source 1..19: mol_type = other RNA
agtctacacattattttta

SEQ ID NO: 1776 - RNA, 19 nt, synthetic construct
  misc_feature 1..19: note = Description of Artificial Sequence: Synthetic oligonucleotide
  source 1..19: mol_type = other RNA
gtctacacattatttttaa

SEQ ID NO: 1777 - RNA, 19 nt, synthetic construct
  misc_feature 1..19: note = Description of Artificial Sequence: Synthetic oligonucleotide
  source 1..19: mol_type = other RNA
tctacacattatttttaaa

SEQ ID NO: 1778 - RNA, 19 nt, synthetic construct
  misc_feature 1..19: note = Description of Artificial Sequence: Synthetic oligonucleotide
  source 1..19: mol_type = other RNA
ctacacattatttttaaaa

SEQ ID NO: 1779 - RNA, 19 nt, synthetic construct
  misc_feature 1..19: note = Description of Artificial Sequence: Synthetic oligonucleotide
  source 1..19: mol_type = other RNA
tacacattatttttaaaac

SEQ ID NO: 1780 - RNA, 19 nt, synthetic construct
  misc_feature 1..19: note = Description of Artificial Sequence: Synthetic oligonucleotide
  source 1..19: mol_type = other RNA
acacattatttttaaaaca

SEQ ID NO: 1781 - RNA, 19 nt, synthetic construct
  misc_feature 1..19: note = Description of Artificial Sequence: Synthetic oligonucleotide
  source 1..19: mol_type = other RNA
cacattatttttaaaacac

SEQ ID NO: 1782 - RNA, 19 nt, synthetic construct
  misc_feature 1..19: note = Description of Artificial Sequence: Synthetic oligonucleotide
  source 1..19: mol_type = other RNA
acattatttttaaaacaca

SEQ ID NO: 1783 - RNA, 19 nt, synthetic construct
  misc_feature 1..19: note = Description of Artificial Sequence: Synthetic oligonucleotide
  source 1..19: mol_type = other RNA
cattatttttaaaacacaa

SEQ ID NO: 1784 - RNA, 19 nt, synthetic construct
  misc_feature 1..19: note = Description of Artificial Sequence: Synthetic oligonucleotide
  source 1..19: mol_type = other RNA
attatttttaaaacacaaa

SEQ ID NO: 1785 - RNA, 19 nt, synthetic construct
  misc_feature 1..19: note = Description of Artificial Sequence: Synthetic oligonucleotide
  source 1..19: mol_type = other RNA
ttatttttaaaacacaaaa

SEQ ID NO: 1786 - RNA, 19 nt, synthetic construct
  misc_feature 1..19: note = Description of Artificial Sequence: Synthetic oligonucleotide
  source 1..19: mol_type = other RNA
tatttttaaaacacaaaaa

SEQ ID NO: 1787 - RNA, 19 nt, synthetic construct
  misc_feature 1..19: note = Description of Artificial Sequence: Synthetic oligonucleotide
  source 1..19: mol_type = other RNA
atttttaaaacacaaaaat

SEQ ID NO: 1788 - RNA, 19 nt, synthetic construct
  misc_feature 1..19: note = Description of Artificial Sequence: Synthetic oligonucleotide
  source 1..19: mol_type = other RNA
tttttaaaacacaaaaatt

SEQ ID NO: 1789 - RNA, 19 nt, synthetic construct
  misc_feature 1..19: note = Description of Artificial Sequence: Synthetic oligonucleotide
  source 1..19: mol_type = other RNA
ttttaaaacacaaaaattg

SEQ ID NO: 1790 - RNA, 19 nt, synthetic construct
  misc_feature 1..19: note = Description of Artificial Sequence: Synthetic oligonucleotide
  source 1..19: mol_type = other RNA
tttaaaacacaaaaattgt

SEQ ID NO: 1791 - RNA, 19 nt, synthetic construct
  misc_feature 1..19: note = Description of Artificial Sequence: Synthetic oligonucleotide
  source 1..19: mol_type = other RNA
ttaaaacacaaaaattgtt

SEQ ID NO: 1792 - RNA, 19 nt, synthetic construct
  misc_feature 1..19: note = Description of Artificial Sequence: Synthetic oligonucleotide
  source 1..19: mol_type = other RNA
taaaacacaaaaattgttc

SEQ ID NO: 1793 - RNA, 19 nt, synthetic construct
  misc_feature 1..19: note = Description of Artificial Sequence: Synthetic oligonucleotide
  source 1..19: mol_type = other RNA
aaaacacaaaaattgttcg

SEQ ID NO: 1794 - RNA, 19 nt, synthetic construct
  misc_feature 1..19: note = Description of Artificial Sequence: Synthetic oligonucleotide
  source 1..19: mol_type = other RNA
aaacacaaaaattgttcgg

SEQ ID NO: 1795 - RNA, 19 nt, synthetic construct
  misc_feature 1..19: note = Description of Artificial Sequence: Synthetic oligonucleotide
  source 1..19: mol_type = other RNA
aacacaaaaattgttcggc

SEQ ID NO: 1796 - RNA, 19 nt, synthetic construct
  misc_feature 1..19: note = Description of Artificial Sequence: Synthetic oligonucleotide
  source 1..19: mol_type = other RNA
acacaaaaattgttcggct

SEQ ID NO: 1797 - RNA, 19 nt, synthetic construct
  misc_feature 1..19: note = Description of Artificial Sequence: Synthetic oligonucleotide
  source 1..19: mol_type = other RNA
cacaaaaattgttcggctg

SEQ ID NO: 1798 - RNA, 19 nt, synthetic construct
  misc_feature 1..19: note = Description of Artificial Sequence: Synthetic oligonucleotide
  source 1..19: mol_type = other RNA
acaaaaattgttcggctgg

SEQ ID NO: 1799 - RNA, 19 nt, synthetic construct
  misc_feature 1..19: note = Description of Artificial Sequence: Synthetic oligonucleotide
  source 1..19: mol_type = other RNA
caaaaattgttcggctgga

SEQ ID NO: 1800 - RNA, 19 nt, synthetic construct
  misc_feature 1..19: note = Description of Artificial Sequence: Synthetic oligonucleotide
  source 1..19: mol_type = other RNA
aaaaattgttcggctggaa

SEQ ID NO: 1801 - RNA, 19 nt, synthetic construct
  misc_feature 1..19: note = Description of Artificial Sequence: Synthetic oligonucleotide
  source 1..19: mol_type = other RNA
aaaattgttcggctggaac

SEQ ID NO: 1802 - RNA, 19 nt, synthetic construct
  misc_feature 1..19: note = Description of Artificial Sequence: Synthetic oligonucleotide
  source 1..19: mol_type = other RNA
aaattgttcggctggaact

SEQ ID NO: 1803 - RNA, 19 nt, synthetic construct
  misc_feature 1..19: note = Description of Artificial Sequence: Synthetic oligonucleotide
  source 1..19: mol_type = other RNA
aattgttcggctggaactg

SEQ ID NO: 1804 - RNA, 19 nt, synthetic construct
  misc_feature 1..19: note = Description of Artificial Sequence: Synthetic oligonucleotide
  source 1..19: mol_type = other RNA
attgttcggctggaactga

SEQ ID NO: 1805 - RNA, 19 nt, synthetic construct
  misc_feature 1..19: note = Description of Artificial Sequence: Synthetic oligonucleotide
  source 1..19: mol_type = other RNA
ttgttcggctggaactgac

SEQ ID NO: 1806 - RNA, 19 nt, synthetic construct
  misc_feature 1..19: note = Description of Artificial Sequence: Synthetic oligonucleotide
  source 1..19: mol_type = other RNA
tgttcggctggaactgacc

SEQ ID NO: 1807 - RNA, 19 nt, synthetic construct
  misc_feature 1..19: note = Description of Artificial Sequence: Synthetic oligonucleotide
  source 1..19: mol_type = other RNA
gttcggctggaactgaccc

SEQ ID NO: 1808 - RNA, 19 nt, synthetic construct
  misc_feature 1..19: note = Description of Artificial Sequence: Synthetic oligonucleotide
  source 1..19: mol_type = other RNA
ttcggctggaactgaccca

SEQ ID NO: 1809 - RNA, 19 nt, synthetic construct
  misc_feature 1..19: note = Description of Artificial Sequence: Synthetic oligonucleotide
  source 1..19: mol_type = other RNA
tcggctggaactgacccag

SEQ ID NO: 1810 - RNA, 19 nt, synthetic construct
  misc_feature 1..19: note = Description of Artificial Sequence: Synthetic oligonucleotide
  source 1..19: mol_type = other RNA
cggctggaactgacccagg

SEQ ID NO: 1811 - RNA, 19 nt, synthetic construct
  misc_feature 1..19: note = Description of Artificial Sequence: Synthetic oligonucleotide
  source 1..19: mol_type = other RNA
ggctggaactgacccaggc

SEQ ID NO: 1812 - RNA, 19 nt, synthetic construct
  misc_feature 1..19: note = Description of Artificial Sequence: Synthetic oligonucleotide
  source 1..19: mol_type = other RNA
gctggaactgacccaggct

SEQ ID NO: 1813 - RNA, 19 nt, synthetic construct
  misc_feature 1..19: note = Description of Artificial Sequence: Synthetic oligonucleotide
  source 1..19: mol_type = other RNA
ctggaactgacccaggctg

SEQ ID NO: 1814 - RNA, 19 nt, synthetic construct
  misc_feature 1..19: note = Description of Artificial Sequence: Synthetic oligonucleotide
  source 1..19: mol_type = other RNA
tggaactgacccaggctgg

SEQ ID NO: 1815 - RNA, 19 nt, synthetic construct
  misc_feature 1..19: note = Description of Artificial Sequence: Synthetic oligonucleotide
  source 1..19: mol_type = other RNA
ggaactgacccaggctgga

SEQ ID NO: 1816 - RNA, 19 nt, synthetic construct
  misc_feature 1..19: note = Description of Artificial Sequence: Synthetic oligonucleotide
  source 1..19: mol_type = other RNA
gaactgacccaggctggac

SEQ ID NO: 1817 - RNA, 19 nt, synthetic construct
  misc_feature 1..19: note = Description of Artificial Sequence: Synthetic oligonucleotide
  source 1..19: mol_type = other RNA
aactgacccaggctggact

SEQ ID NO: 1818 - RNA, 19 nt, synthetic construct
  misc_feature 1..19: note = Description of Artificial Sequence: Synthetic oligonucleotide
  source 1..19: mol_type = other RNA
actgacccaggctggactt

SEQ ID NO: 1819 - RNA, 19 nt, synthetic construct
  misc_feature 1..19: note = Description of Artificial Sequence: Synthetic oligonucleotide
  source 1..19: mol_type = other RNA
ctgacccaggctggacttg

SEQ ID NO: 1820 - RNA, 19 nt, synthetic construct
  misc_feature 1..19: note = Description of Artificial Sequence: Synthetic oligonucleotide
  source 1..19: mol_type = other RNA
tgacccaggctggacttgc

SEQ ID NO: 1821 - RNA, 19 nt, synthetic construct
  misc_feature 1..19: note = Description of Artificial Sequence: Synthetic oligonucleotide
  source 1..19: mol_type = other RNA
gacccaggctggacttgcg

SEQ ID NO: 1822 - RNA, 19 nt, synthetic construct
  misc_feature 1..19: note = Description of Artificial Sequence: Synthetic oligonucleotide
  source 1..19: mol_type = other RNA
acccaggctggacttgcgg

SEQ ID NO: 1823 - RNA, 19 nt, synthetic construct
  misc_feature 1..19: note = Description of Artificial Sequence: Synthetic oligonucleotide
  source 1..19: mol_type = other RNA
cccaggctggacttgcggg

SEQ ID NO: 1824 - RNA, 19 nt, synthetic construct
  misc_feature 1..19: note = Description of Artificial Sequence: Synthetic oligonucleotide
  source 1..19: mol_type = other RNA
ccaggctggacttgcgggg

SEQ ID NO: 1825 - RNA, 19 nt, synthetic construct
  misc_feature 1..19: note = Description of Artificial Sequence: Synthetic oligonucleotide
  source 1..19: mol_type = other RNA
caggctggacttgcgggga

SEQ ID NO: 1826 - RNA, 19 nt, synthetic construct
  misc_feature 1..19: note = Description of Artificial Sequence: Synthetic oligonucleotide
  source 1..19: mol_type = other RNA
aggctggacttgcggggag

SEQ ID NO: 1827 - RNA, 19 nt, synthetic construct
  misc_feature 1..19: note = Description of Artificial Sequence: Synthetic oligonucleotide
  source 1..19: mol_type = other RNA
ggctggacttgcggggagg

SEQ ID NO: 1828 - RNA, 19 nt, synthetic construct
  misc_feature 1..19: note = Description of Artificial Sequence: Synthetic oligonucleotide
  source 1..19: mol_type = other RNA
gctggacttgcggggagga

SEQ ID NO: 1829 - RNA, 19 nt, synthetic construct
  misc_feature 1..19: note = Description of Artificial Sequence: Synthetic oligonucleotide
  source 1..19: mol_type = other RNA
ctggacttgcggggaggaa

SEQ ID NO: 1830 - RNA, 19 nt, synthetic construct
  misc_feature 1..19: note = Description of Artificial Sequence: Synthetic oligonucleotide
  source 1..19: mol_type = other RNA
tggacttgcggggaggaaa

SEQ ID NO: 1831 - RNA, 19 nt, synthetic construct
  misc_feature 1..19: note = Description of Artificial Sequence: Synthetic oligonucleotide
  source 1..19: mol_type = other RNA
ggacttgcggggaggaaac

SEQ ID NO: 1832 - RNA, 19 nt, synthetic construct
  misc_feature 1..19: note = Description of Artificial Sequence: Synthetic oligonucleotide
  source 1..19: mol_type = other RNA
gacttgcggggaggaaact

SEQ ID NO: 1833 - RNA, 19 nt, synthetic construct
  misc_feature 1..19: note = Description of Artificial Sequence: Synthetic oligonucleotide
  source 1..19: mol_type = other RNA
acttgcggggaggaaactc

SEQ ID NO: 1834 - RNA, 19 nt, synthetic construct
  misc_feature 1..19: note = Description of Artificial Sequence: Synthetic oligonucleotide
  source 1..19: mol_type = other RNA
cttgcggggaggaaactcc

SEQ ID NO: 1835 - RNA, 19 nt, synthetic construct
  misc_feature 1..19: note = Description of Artificial Sequence: Synthetic oligonucleotide
  source 1..19: mol_type = other RNA
ttgcggggaggaaactcca

SEQ ID NO: 1836 - RNA, 19 nt, synthetic construct
  misc_feature 1..19: note = Description of Artificial Sequence: Synthetic oligonucleotide
  source 1..19: mol_type = other RNA
tgcggggaggaaactccag

SEQ ID NO: 1837 - RNA, 19 nt, synthetic construct
  misc_feature 1..19: note = Description of Artificial Sequence: Synthetic oligonucleotide
  source 1..19: mol_type = other RNA
gcggggaggaaactccagg

SEQ ID NO: 1838 - RNA, 19 nt, synthetic construct
  misc_feature 1..19: note = Description of Artificial Sequence: Synthetic oligonucleotide
  source 1..19: mol_type = other RNA
cggggaggaaactccaggg

SEQ ID NO: 1839 - RNA, 19 nt, synthetic construct
  misc_feature 1..19: note = Description of Artificial Sequence: Synthetic oligonucleotide
  source 1..19: mol_type = other RNA
ggggaggaaactccagggc

SEQ ID NO: 1840 - RNA, 19 nt, synthetic construct
  misc_feature 1..19: note = Description of Artificial Sequence: Synthetic oligonucleotide
  source 1..19: mol_type = other RNA
gggaggaaactccagggca

SEQ ID NO: 1841 - RNA, 19 nt, synthetic construct
  misc_feature 1..19: note = Description of Artificial Sequence: Synthetic oligonucleotide
  source 1..19: mol_type = other RNA
ggaggaaactccagggcac

SEQ ID NO: 1842 - RNA, 19 nt, synthetic construct
  misc_feature 1..19: note = Description of Artificial Sequence: Synthetic oligonucleotide
  source 1..19: mol_type = other RNA
gaggaaactccagggcact

SEQ ID NO: 1843 - RNA, 19 nt, synthetic construct
  misc_feature 1..19: note = Description of Artificial Sequence: Synthetic oligonucleotide
  source 1..19: mol_type = other RNA
aggaaactccagggcactg

SEQ ID NO: 1844 - RNA, 19 nt, synthetic construct
  misc_feature 1..19: note = Description of Artificial Sequence: Synthetic oligonucleotide
  source 1..19: mol_type = other RNA
ggaaactccagggcactgc

SEQ ID NO: 1845 - RNA, 19 nt, synthetic construct
  misc_feature 1..19: note = Description of Artificial Sequence: Synthetic oligonucleotide
  source 1..19: mol_type = other RNA
gaaactccagggcactgca

SEQ ID NO: 1846 - RNA, 19 nt, synthetic construct
  misc_feature 1..19: note = Description of Artificial Sequence: Synthetic oligonucleotide
  source 1..19: mol_type = other RNA
aaactccagggcactgcat

SEQ ID NO: 1847 - RNA, 19 nt, synthetic construct
  misc_feature 1..19: note = Description of Artificial Sequence: Synthetic oligonucleotide
  source 1..19: mol_type = other RNA
aactccagggcactgcatc

SEQ ID NO: 1848 - RNA, 19 nt, synthetic construct
  misc_feature 1..19: note = Description of Artificial Sequence: Synthetic oligonucleotide
  source 1..19: mol_type = other RNA
actccagggcactgcatct

SEQ ID NO: 1849 - RNA, 19 nt, synthetic construct
  misc_feature 1..19: note = Description of Artificial Sequence: Synthetic oligonucleotide
  source 1..19: mol_type = other RNA
ctccagggcactgcatctg

SEQ ID NO: 1850 - RNA, 19 nt, synthetic construct
  misc_feature 1..19: note = Description of Artificial Sequence: Synthetic oligonucleotide
  source 1..19: mol_type = other RNA
tccagggcactgcatctgg

SEQ ID NO: 1851 - RNA, 19 nt, synthetic construct
  misc_feature 1..19: note = Description of Artificial Sequence: Synthetic oligonucleotide
  source 1..19: mol_type = other RNA
ccagggcactgcatctggc

SEQ ID NO: 1852 - RNA, 19 nt, synthetic construct
  misc_feature 1..19: note = Description of Artificial Sequence: Synthetic oligonucleotide
  source 1..19: mol_type = other RNA
cagggcactgcatctggcg

SEQ ID NO: 1853 - RNA, 19 nt, synthetic construct
  misc_feature 1..19: note = Description of Artificial Sequence: Synthetic oligonucleotide
  source 1..19: mol_type = other RNA
agggcactgcatctggcga

SEQ ID NO: 1854 - RNA, 19 nt, synthetic construct
  misc_feature 1..19: note = Description of Artificial Sequence: Synthetic oligonucleotide
  source 1..19: mol_type = other RNA
gggcactgcatctggcgat

SEQ ID NO: 1855 - RNA, 19 nt, synthetic construct
  misc_feature 1..19: note = Description of Artificial Sequence: Synthetic oligonucleotide
  source 1..19: mol_type = other RNA
ggcactgcatctggcgatc

SEQ ID NO: 1856 - RNA, 19 nt, synthetic construct
  misc_feature 1..19: note = Description of Artificial Sequence: Synthetic oligonucleotide
  source 1..19: mol_type = other RNA
gcactgcatctggcgatca

SEQ ID NO: 1857 - RNA, 19 nt, synthetic construct
  misc_feature 1..19: note = Description of Artificial Sequence: Synthetic oligonucleotide
  source 1..19: mol_type = other RNA
cactgcatctggcgatcag

SEQ ID NO: 1858 - RNA, 19 nt, synthetic construct
  misc_feature 1..19: note = Description of Artificial Sequence: Synthetic oligonucleotide
  source 1..19: mol_type = other RNA
actgcatctggcgatcaga

SEQ ID NO: 1859 - RNA, 19 nt, synthetic construct
  misc_feature 1..19: note = Description of Artificial Sequence: Synthetic oligonucleotide
  source 1..19: mol_type = other RNA
ctgcatctggcgatcagac

SEQ ID NO: 1860 - RNA, 19 nt, synthetic construct
  misc_feature 1..19: note = Description of Artificial Sequence: Synthetic oligonucleotide
  source 1..19: mol_type = other RNA
tgcatctggcgatcagact

SEQ ID NO: 1861 - RNA, 19 nt, synthetic construct
  misc_feature 1..19: note = Description of Artificial Sequence: Synthetic oligonucleotide
  source 1..19: mol_type = other RNA
gcatctggcgatcagactc

SEQ ID NO: 1862 - RNA, 19 nt, synthetic construct
  misc_feature 1..19: note = Description of Artificial Sequence: Synthetic oligonucleotide
  source 1..19: mol_type = other RNA
catctggcgatcagactct

SEQ ID NO: 1863 - RNA, 19 nt, synthetic construct
  misc_feature 1..19: note = Description of Artificial Sequence: Synthetic oligonucleotide
  source 1..19: mol_type = other RNA
atctggcgatcagactctg

SEQ ID NO: 1864 - RNA, 19 nt, synthetic construct
  misc_feature 1..19: note = Description of Artificial Sequence: Synthetic oligonucleotide
  source 1..19: mol_type = other RNA
tctggcgatcagactctga

SEQ ID NO: 1865 - RNA, 19 nt, synthetic construct
  misc_feature 1..19: note = Description of Artificial Sequence: Synthetic oligonucleotide
  source 1..19: mol_type = other RNA
ctggcgatcagactctgag

SEQ ID NO: 1866 - RNA, 19 nt, synthetic construct
  misc_feature 1..19: note = Description of Artificial Sequence: Synthetic oligonucleotide
  source 1..19: mol_type = other RNA
tggcgatcagactctgagc

SEQ ID NO: 1867 - RNA, 19 nt, synthetic construct
  misc_feature 1..19: note = Description of Artificial Sequence: Synthetic oligonucleotide
  source 1..19: mol_type = other RNA
ggcgatcagactctgagca

SEQ ID NO: 1868 - RNA, 19 nt, synthetic construct
  misc_feature 1..19: note = Description of Artificial Sequence: Synthetic oligonucleotide
  source 1..19: mol_type = other RNA
gcgatcagactctgagcac

SEQ ID NO: 1869 - RNA, 19 nt, synthetic construct
  misc_feature 1..19: note = Description of Artificial Sequence: Synthetic oligonucleotide
  source 1..19: mol_type = other RNA
cgatcagactctgagcact

SEQ ID NO: 1870 - RNA, 19 nt, synthetic construct
  misc_feature 1..19: note = Description of Artificial Sequence: Synthetic oligonucleotide
  source 1..19: mol_type = other RNA
gatcagactctgagcactg

SEQ ID NO: 1871 - RNA, 19 nt, synthetic construct
  misc_feature 1..19: note = Description of Artificial Sequence: Synthetic oligonucleotide
  source 1..19: mol_type = other RNA
atcagactctgagcactgc

SEQ ID NO: 1872 - RNA, 19 nt, synthetic construct
  misc_feature 1..19: note = Description of Artificial Sequence: Synthetic oligonucleotide
  source 1..19: mol_type = other RNA
tcagactctgagcactgcc

SEQ ID NO: 1873 - RNA, 19 nt, synthetic construct
  misc_feature 1..19: note = Description of Artificial Sequence: Synthetic oligonucleotide
  source 1..19: mol_type = other RNA
cagactctgagcactgccc

SEQ ID NO: 1874 - RNA, 19 nt, synthetic construct
  misc_feature 1..19: note = Description of Artificial Sequence: Synthetic oligonucleotide
  source 1..19: mol_type = other RNA
agactctgagcactgcccc

SEQ ID NO: 1875 - RNA, 19 nt, synthetic construct
  misc_feature 1..19: note = Description of Artificial Sequence: Synthetic oligonucleotide
  source 1..19: mol_type = other RNA
gactctgagcactgcccct

SEQ ID NO: 1876 - RNA, 19 nt, synthetic construct
  misc_feature 1..19: note = Description of Artificial Sequence: Synthetic oligonucleotide
  source 1..19: mol_type = other RNA
actctgagcactgcccctg

SEQ ID NO: 1877 - RNA, 19 nt, synthetic construct
  misc_feature 1..19: note = Description of Artificial Sequence: Synthetic oligonucleotide
  source 1..19: mol_type = other RNA
ctctgagcactgcccctgc

SEQ ID NO: 1878 - RNA, 19 nt, synthetic construct
  misc_feature 1..19: note = Description of Artificial Sequence: Synthetic oligonucleotide
  source 1..19: mol_type = other RNA
tctgagcactgcccctgct

SEQ ID NO: 1879 - RNA, 19 nt, synthetic construct
  misc_feature 1..19: note = Description of Artificial Sequence: Synthetic oligonucleotide
  source 1..19: mol_type = other RNA
ctgagcactgcccctgctc

SEQ ID NO: 1880 - RNA, 19 nt, synthetic construct
  misc_feature 1..19: note = Description of Artificial Sequence: Synthetic oligonucleotide
  source 1..19: mol_type = other RNA
tgagcactgcccctgctcg

SEQ ID NO: 1881 - RNA, 19 nt, synthetic construct
  misc_feature 1..19: note = Description of Artificial Sequence: Synthetic oligonucleotide
  source 1..19: mol_type = other RNA
gagcactgcccctgctcgc

SEQ ID NO: 1882 - RNA, 19 nt, synthetic construct
  misc_feature 1..19: note = Description of Artificial Sequence: Synthetic oligonucleotide
  source 1..19: mol_type = other RNA
agcactgcccctgctcgcc

SEQ ID NO: 1883 - RNA, 19 nt, synthetic construct
  misc_feature 1..19: note = Description of Artificial Sequence: Synthetic oligonucleotide
  source 1..19: mol_type = other RNA
gcactgcccctgctcgcct

SEQ ID NO: 1884 - RNA, 19 nt, synthetic construct
  misc_feature 1..19: note = Description of Artificial Sequence: Synthetic oligonucleotide
  source 1..19: mol_type = other RNA
cactgcccctgctcgcctt

SEQ ID NO: 1885 - RNA, 19 nt, synthetic construct
  misc_feature 1..19: note = Description of Artificial Sequence: Synthetic oligonucleotide
  source 1..19: mol_type = other RNA
actgcccctgctcgccttg

SEQ ID NO: 1886 - RNA, 19 nt, synthetic construct
  misc_feature 1..19: note = Description of Artificial Sequence: Synthetic oligonucleotide
  source 1..19: mol_type = other RNA
ctgcccctgctcgccttgg

SEQ ID NO: 1887 - RNA, 19 nt, synthetic construct
  misc_feature 1..19: note = Description of Artificial Sequence: Synthetic oligonucleotide
  source 1..19: mol_type = other RNA
tgcccctgctcgccttggt

SEQ ID NO: 1888 - RNA, 19 nt, synthetic construct
  misc_feature 1..19: note = Description of Artificial Sequence: Synthetic oligonucleotide
  source 1..19: mol_type = other RNA
gcccctgctcgccttggtc

SEQ ID NO: 1889 - RNA, 19 nt, synthetic construct
  misc_feature 1..19: note = Description of Artificial Sequence: Synthetic oligonucleotide
  source 1..19: mol_type = other RNA
cccctgctcgccttggtca

SEQ ID NO: 1890 - RNA, 19 nt, synthetic construct
  misc_feature 1..19: note = Description of Artificial Sequence: Synthetic oligonucleotide
  source 1..19: mol_type = other RNA
ccctgctcgccttggtcat

SEQ ID NO: 1891 - RNA, 19 nt, synthetic construct
  misc_feature 1..19: note = Description of Artificial Sequence: Synthetic oligonucleotide
  source 1..19: mol_type = other RNA
cctgctcgccttggtcatg

SEQ ID NO: 1892 - RNA, 19 nt, synthetic construct
  misc_feature 1..19: note = Description of Artificial Sequence: Synthetic oligonucleotide
  source 1..19: mol_type = other RNA
ctgctcgccttggtcatgt

SEQ ID NO: 1893 - RNA, 19 nt, synthetic construct
  misc_feature 1..19: note = Description of Artificial Sequence: Synthetic oligonucleotide
  source 1..19: mol_type = other RNA
tgctcgccttggtcatgta

SEQ ID NO: 1894 - RNA, 19 nt, synthetic construct
  misc_feature 1..19: note = Description of Artificial Sequence: Synthetic oligonucleotide
  source 1..19: mol_type = other RNA
gctcgccttggtcatgtac

SEQ ID NO: 1895 - RNA, 19 nt, synthetic construct
  misc_feature 1..19: note = Description of Artificial Sequence: Synthetic oligonucleotide
  source 1..19: mol_type = other RNA
ctcgccttggtcatgtaca

SEQ ID NO: 1896 - RNA, 19 nt, synthetic construct
  misc_feature 1..19: note = Description of Artificial Sequence: Synthetic oligonucleotide
  source 1..19: mol_type = other RNA
tcgccttggtcatgtacag

SEQ ID NO: 1897 - RNA, 19 nt, synthetic construct
  misc_feature 1..19: note = Description of Artificial Sequence: Synthetic oligonucleotide
  source 1..19: mol_type = other RNA
cgccttggtcatgtacagc

SEQ ID NO: 1898 - RNA, 19 nt, synthetic construct
  misc_feature 1..19: note = Description of Artificial Sequence: Synthetic oligonucleotide
  source 1..19: mol_type = other RNA
gccttggtcatgtacagca

SEQ ID NO: 1899 - RNA, 19 nt, synthetic construct
  misc_feature 1..19: note = Description of Artificial Sequence: Synthetic oligonucleotide
  source 1..19: mol_type = other RNA
ccttggtcatgtacagcac

SEQ ID NO: 1900 - RNA, 19 nt, synthetic construct
  misc_feature 1..19: note = Description of Artificial Sequence: Synthetic oligonucleotide
  source 1..19: mol_type = other RNA
cttggtcatgtacagcact

SEQ ID NO: 1901 - RNA, 19 nt, synthetic construct
  misc_feature 1..19: note = Description of Artificial Sequence: Synthetic oligonucleotide
  source 1..19: mol_type = other RNA
ttggtcatgtacagcactg

SEQ ID NO: 1902 - RNA, 19 nt, synthetic construct
  misc_feature 1..19: note = Description of Artificial Sequence: Synthetic oligonucleotide
  source 1..19: mol_type = other RNA
tggtcatgtacagcactga

SEQ ID NO: 1903 - RNA, 19 nt, synthetic construct
  misc_feature 1..19: note = Description of Artificial Sequence: Synthetic oligonucleotide
  source 1..19: mol_type = other RNA
ggtcatgtacagcactgaa

SEQ ID NO: 1904 - RNA, 19 nt, synthetic construct
  misc_feature 1..19: note = Description of Artificial Sequence: Synthetic oligonucleotide
  source 1..19: mol_type = other RNA
gtcatgtacagcactgaaa

SEQ ID NO: 1905 - RNA, 19 nt, synthetic construct
  misc_feature 1..19: note = Description of Artificial Sequence: Synthetic oligonucleotide
  source 1..19: mol_type = other RNA
tcatgtacagcactgaaag

SEQ ID NO: 1906 - RNA, 19 nt, synthetic construct
  misc_feature 1..19: note = Description of Artificial Sequence: Synthetic oligonucleotide
  source 1..19: mol_type = other RNA
catgtacagcactgaaagg

SEQ ID NO: 1907 - RNA, 19 nt, synthetic construct
  misc_feature 1..19: note = Description of Artificial Sequence: Synthetic oligonucleotide
  source 1..19: mol_type = other RNA
atgtacagcactgaaagga

SEQ ID NO: 1908 - RNA, 19 nt, synthetic construct
  misc_feature 1..19: note = Description of Artificial Sequence: Synthetic oligonucleotide
  source 1..19: mol_type = other RNA
tgtacagcactgaaaggaa

SEQ ID NO: 1909 - RNA, 19 nt, synthetic construct
  misc_feature 1..19: note = Description of Artificial Sequence: Synthetic oligonucleotide
  source 1..19: mol_type = other RNA
gtacagcactgaaaggaat

SEQ ID NO: 1910 - RNA, 19 nt, synthetic construct
  misc_feature 1..19: note = Description of Artificial Sequence: Synthetic oligonucleotide
  source 1..19: mol_type = other RNA
tacagcactgaaaggaatg

SEQ ID NO: 1911 - RNA, 19 nt, synthetic construct
  misc_feature 1..19: note = Description of Artificial Sequence: Synthetic oligonucleotide
  source 1..19: mol_type = other RNA
acagcactgaaaggaatga

SEQ ID NO: 1912 - RNA, 19 nt, synthetic construct
  misc_feature 1..19: note = Description of Artificial Sequence: Synthetic oligonucleotide
  source 1..19: mol_type = other RNA
cagcactgaaaggaatgaa

SEQ ID NO: 1913 - RNA, 19 nt, synthetic construct
  misc_feature 1..19: note = Description of Artificial Sequence: Synthetic oligonucleotide
  source 1..19: mol_type = other RNA
agcactgaaaggaatgaag

SEQ ID NO: 1914 - RNA, 19 nt, synthetic construct
  misc_feature 1..19: note = Description of Artificial Sequence: Synthetic oligonucleotide
  source 1..19: mol_type = other RNA
gcactgaaaggaatgaagc

SEQ ID NO: 1915 - RNA, 19 nt, synthetic construct
  misc_feature 1..19: note = Description of Artificial Sequence: Synthetic oligonucleotide
  source 1..19: mol_type = other RNA
cactgaaaggaatgaagca

SEQ ID NO: 1916 - RNA, 19 nt, synthetic construct
  misc_feature 1..19: note = Description of Artificial Sequence: Synthetic oligonucleotide
  source 1..19: mol_type = other RNA
actgaaaggaatgaagcac

SEQ ID NO: 1917 - RNA, 19 nt, synthetic construct
  misc_feature 1..19: note = Description of Artificial Sequence: Synthetic oligonucleotide
  source 1..19: mol_type = other RNA
ctgaaaggaatgaagcacc

SEQ ID NO: 1918 - RNA, 19 nt, synthetic construct
  misc_feature 1..19: note = Description of Artificial Sequence: Synthetic oligonucleotide
  source 1..19: mol_type = other RNA
tgaaaggaatgaagcacca

SEQ ID NO: 1919 - RNA, 19 nt, synthetic construct
  misc_feature 1..19: note = Description of Artificial Sequence: Synthetic oligonucleotide
  source 1..19: mol_type = other RNA
gaaaggaatgaagcaccag

SEQ ID NO: 1920 - RNA, 19 nt, synthetic construct
  misc_feature 1..19: note = Description of Artificial Sequence: Synthetic oligonucleotide
  source 1..19: mol_type = other RNA
aaaggaatgaagcaccagc

SEQ ID NO: 1921 - RNA, 19 nt, synthetic construct
  misc_feature 1..19: note = Description of Artificial Sequence: Synthetic oligonucleotide
  source 1..19: mol_type = other RNA
aaggaatgaagcaccagca

SEQ ID NO: 1922 - RNA, 19 nt, synthetic construct
  misc_feature 1..19: note = Description of Artificial Sequence: Synthetic oligonucleotide
  source 1..19: mol_type = other RNA
aggaatgaagcaccagcag

SEQ ID NO: 1923 - RNA, 19 nt, synthetic construct
  misc_feature 1..19: note = Description of Artificial Sequence: Synthetic oligonucleotide
  source 1..19: mol_type = other RNA
ggaatgaagcaccagcagg

SEQ ID NO: 1924 - RNA, 19 nt, synthetic construct
  misc_feature 1..19: note = Description of Artificial Sequence: Synthetic oligonucleotide
  source 1..19: mol_type = other RNA
gaatgaagcaccagcagga

SEQ ID NO: 1925 - RNA, 19 nt, synthetic construct
  misc_feature 1..19: note = Description of Artificial Sequence: Synthetic oligonucleotide
  source 1..19: mol_type = other RNA
aatgaagcaccagcaggag

SEQ ID NO: 1926 - RNA, 19 nt, synthetic construct
  misc_feature 1..19: note = Description of Artificial Sequence: Synthetic oligonucleotide
  source 1..19: mol_type = other RNA
atgaagcaccagcaggagg

SEQ ID NO: 1927 - RNA, 19 nt, synthetic construct
  misc_feature 1..19: note = Description of Artificial Sequence: Synthetic oligonucleotide
  source 1..19: mol_type = other RNA
tgaagcaccagcaggaggt

SEQ ID NO: 1928 - RNA, 19 nt, synthetic construct
  misc_feature 1..19: note = Description of Artificial Sequence: Synthetic oligonucleotide
  source 1..19: mol_type = other RNA
gaagcaccagcaggaggtg

SEQ ID NO: 1929 - RNA, 19 nt, synthetic construct
  misc_feature 1..19: note = Description of Artificial Sequence: Synthetic oligonucleotide
  source 1..19: mol_type = other RNA
aagcaccagcaggaggtgg

SEQ ID NO: 1930 - RNA, 19 nt, synthetic construct
  misc_feature 1..19: note = Description of Artificial Sequence: Synthetic oligonucleotide
  source 1..19: mol_type = other RNA
agcaccagcaggaggtgga

SEQ ID NO: 1931 - RNA, 19 nt, synthetic construct
  misc_feature 1..19: note = Description of Artificial Sequence: Synthetic oligonucleotide
  source 1..19: mol_type = other RNA
gcaccagcaggaggtggac

SEQ ID NO: 1932 - RNA, 19 nt, synthetic construct
  misc_feature 1..19: note = Description of Artificial Sequence: Synthetic oligonucleotide
  source 1..19: mol_type = other RNA
caccagcaggaggtggaca

SEQ ID NO: 1933 - RNA, 19 nt, synthetic construct
  misc_feature 1..19: note = Description of Artificial Sequence: Synthetic oligonucleotide
  source 1..19: mol_type = other RNA
accagcaggaggtggacag

SEQ ID NO: 1934 - RNA, 19 nt, synthetic construct
  misc_feature 1..19: note = Description of Artificial Sequence: Synthetic oligonucleotide
  source 1..19: mol_type = other RNA
ccagcaggaggtggacaga

SEQ ID NO: 1935 - RNA, 19 nt, synthetic construct
  misc_feature 1..19: note = Description of Artificial Sequence: Synthetic oligonucleotide
  source 1..19: mol_type = other RNA
cagcaggaggtggacagag

SEQ ID NO: 1936 - RNA, 19 nt, synthetic construct
  misc_feature 1..19: note = Description of Artificial Sequence: Synthetic oligonucleotide
  source 1..19: mol_type = other RNA
agcaggaggtggacagagt

SEQ ID NO: 1937 - RNA, 19 nt, synthetic construct
  misc_feature 1..19: note = Description of Artificial Sequence: Synthetic oligonucleotide
  source 1..19: mol_type = other RNA
gcaggaggtggacagagtc

SEQ ID NO: 1938 - RNA, 19 nt, synthetic construct
  misc_feature 1..19: note = Description of Artificial Sequence: Synthetic oligonucleotide
  source 1..19: mol_type = other RNA
caggaggtggacagagtct

SEQ ID NO: 1939 - RNA, 19 nt, synthetic construct
  misc_feature 1..19: note = Description of Artificial Sequence: Synthetic oligonucleotide
  source 1..19: mol_type = other RNA
aggaggtggacagagtctc

SEQ ID NO: 1940 - RNA, 19 nt, synthetic construct
  misc_feature 1..19: note = Description of Artificial Sequence: Synthetic oligonucleotide
  source 1..19: mol_type = other RNA
ggaggtggacagagtctct

SEQ ID NO: 1941 - RNA, 19 nt, synthetic construct
  misc_feature 1..19: note = Description of Artificial Sequence: Synthetic oligonucleotide
  source 1..19: mol_type = other RNA
gaggtggacagagtctctc

SEQ ID NO: 1942 - RNA, 19 nt, synthetic construct
  misc_feature 1..19: note = Description of Artificial Sequence: Synthetic oligonucleotide
  source 1..19: mol_type = other RNA
aggtggacagagtctctca

SEQ ID NO: 1943 - RNA, 19 nt, synthetic construct
  misc_feature 1..19: note = Description of Artificial Sequence: Synthetic oligonucleotide
  source 1..19: mol_type = other RNA
ggtggacagagtctctcat

SEQ ID NO: 1944 - RNA, 19 nt, synthetic construct
  misc_feature 1..19: note = Description of Artificial Sequence: Synthetic oligonucleotide
  source 1..19: mol_type = other RNA
gtggacagagtctctcatg

SEQ ID NO: 1945 - RNA, 19 nt, synthetic construct
  misc_feature 1..19: note = Description of Artificial Sequence: Synthetic oligonucleotide
  source 1..19: mol_type = other RNA
tggacagagtctctcatgg

SEQ ID NO: 1946 - RNA, 19 nt, synthetic construct
  misc_feature 1..19: note = Description of Artificial Sequence: Synthetic oligonucleotide
  source 1..19: mol_type = other RNA
ggacagagtctctcatgga

SEQ ID NO: 1947 - RNA, 19 nt, synthetic construct
  misc_feature 1..19: note = Description of Artificial Sequence: Synthetic oligonucleotide
  source 1..19: mol_type = other RNA
gacagagtctctcatggat

SEQ ID NO: 1948 - RNA, 19 nt, synthetic construct
  misc_feature 1..19: note = Description of Artificial Sequence: Synthetic oligonucleotide
  source 1..19: mol_type = other RNA
acagagtctctcatggatg

SEQ ID NO: 1949 - RNA, 19 nt, synthetic construct
  misc_feature 1..19: note = Description of Artificial Sequence: Synthetic oligonucleotide
  source 1..19: mol_type = other RNA
cagagtctctcatggatgc

SEQ ID NO: 1950 - RNA, 19 nt, synthetic construct
  misc_feature 1..19: note = Description of Artificial Sequence: Synthetic oligonucleotide
  source 1..19: mol_type = other RNA
agagtctctcatggatgcc

SEQ ID NO: 1951 - RNA, 19 nt, synthetic construct
  misc_feature 1..19: note = Description of Artificial Sequence: Synthetic oligonucleotide
  source 1..19: mol_type = other RNA
gagtctctcatggatgccg

SEQ ID NO: 1952 - RNA, 19 nt, synthetic construct
  misc_feature 1..19: note = Description of Artificial Sequence: Synthetic oligonucleotide
  source 1..19: mol_type = other RNA
agtctctcatggatgccgg

SEQ ID NO: 1953 - RNA, 19 nt, synthetic construct
  misc_feature 1..19: note = Description of Artificial Sequence: Synthetic oligonucleotide
  source 1..19: mol_type = other RNA
gtctctcatggatgccggc

SEQ ID NO: 1954 - RNA, 19 nt, synthetic construct
  misc_feature 1..19: note = Description of Artificial Sequence: Synthetic oligonucleotide
  source 1..19: mol_type = other RNA
tctctcatggatgccggca

SEQ ID NO: 1955 - RNA, 19 nt, synthetic construct
  misc_feature 1..19: note = Description of Artificial Sequence: Synthetic oligonucleotide
  source 1..19: mol_type = other RNA
ctctcatggatgccggcac

SEQ ID NO: 1956 - RNA, 19 nt, synthetic construct
  misc_feature 1..19: note = Description of Artificial Sequence: Synthetic oligonucleotide
  source 1..19: mol_type = other RNA
tctcatggatgccggcaca

SEQ ID NO: 1957 - RNA, 19 nt, synthetic construct
  misc_feature 1..19: note = Description of Artificial Sequence: Synthetic oligonucleotide
  source 1..19: mol_type = other RNA
ctcatggatgccggcacaa

SEQ ID NO: 1958 - RNA, 19 nt, synthetic construct
  misc_feature 1..19: note = Description of Artificial Sequence: Synthetic oligonucleotide
  source 1..19: mol_type = other RNA
tcatggatgccggcacaaa

SEQ ID NO: 1959 - RNA, 19 nt, synthetic construct
  misc_feature 1..19: note = Description of Artificial Sequence: Synthetic oligonucleotide
  source 1..19: mol_type = other RNA
catggatgccggcacaaaa

SEQ ID NO: 1960 - RNA, 19 nt, synthetic construct
  misc_feature 1..19: note = Description of Artificial Sequence: Synthetic oligonucleotide
  source 1..19: mol_type = other RNA
atggatgccggcacaaaac

SEQ ID NO: 1961 - RNA, 19 nt, synthetic construct
  misc_feature 1..19: note = Description of Artificial Sequence: Synthetic oligonucleotide
  source 1..19: mol_type = other RNA
tggatgccggcacaaaact

SEQ ID NO: 1962 - RNA, 19 nt, synthetic construct
  misc_feature 1..19: note = Description of Artificial Sequence: Synthetic oligonucleotide
  source 1..19: mol_type = other RNA
ggatgccggcacaaaactg

SEQ ID NO: 1963 - RNA, 19 nt, synthetic construct
  misc_feature 1..19: note = Description of Artificial Sequence: Synthetic oligonucleotide
  source 1..19: mol_type = other RNA
gatgccggcacaaaactgc

SEQ ID NO: 1964 - RNA, 19 nt, synthetic construct
  misc_feature 1..19: note = Description of Artificial Sequence: Synthetic oligonucleotide
  source 1..19: mol_type = other RNA
atgccggcacaaaactgcc

SEQ ID NO: 1965 - RNA, 19 nt, synthetic construct
  misc_feature 1..19: note = Description of Artificial Sequence: Synthetic oligonucleotide
  source 1..19: mol_type = other RNA
tgccggcacaaaactgcct

SEQ ID NO: 1966 - RNA, 19 nt, synthetic construct
  misc_feature 1..19: note = Description of Artificial Sequence: Synthetic oligonucleotide
  source 1..19: mol_type = other RNA
gccggcacaaaactgcctt

SEQ ID NO: 1967 - RNA, 19 nt, synthetic construct
  misc_feature 1..19: note = Description of Artificial Sequence: Synthetic oligonucleotide
  source 1..19: mol_type = other RNA
ccggcacaaaactgcctta

SEQ ID NO: 1968 - RNA, 19 nt, synthetic construct
  misc_feature 1..19: note = Description of Artificial Sequence: Synthetic oligonucleotide
  source 1..19: mol_type = other RNA
cggcacaaaactgccttaa

SEQ ID NO: 1969 - RNA, 19 nt, synthetic construct
  misc_feature 1..19: note = Description of Artificial Sequence: Synthetic oligonucleotide
  source 1..19: mol_type = other RNA
ggcacaaaactgccttaaa

SEQ ID NO: 1970 - RNA, 19 nt, synthetic construct
  misc_feature 1..19: note = Description of Artificial Sequence: Synthetic oligonucleotide
  source 1..19: mol_type = other RNA
gcacaaaactgccttaaaa

SEQ ID NO: 1971 - RNA, 19 nt, synthetic construct
  misc_feature 1..19: note = Description of Artificial Sequence: Synthetic oligonucleotide
  source 1..19: mol_type = other RNA
cacaaaactgccttaaaat

SEQ ID NO: 1972 - RNA, 19 nt, synthetic construct
  misc_feature 1..19: note = Description of Artificial Sequence: Synthetic oligonucleotide
  source 1..19: mol_type = other RNA
acaaaactgccttaaaata

SEQ ID NO: 1973 - RNA, 19 nt, synthetic construct
  misc_feature 1..19: note = Description of Artificial Sequence: Synthetic oligonucleotide
  source 1..19: mol_type = other RNA
caaaactgccttaaaatat

SEQ ID NO: 1974 - RNA, 19 nt, synthetic construct
  misc_feature 1..19: note = Description of Artificial Sequence: Synthetic oligonucleotide
  source 1..19: mol_type = other RNA
aaaactgccttaaaatatt

SEQ ID NO: 1975 - RNA, 19 nt, synthetic construct
  misc_feature 1..19: note = Description of Artificial Sequence: Synthetic oligonucleotide
  source 1..19: mol_type = other RNA
aaactgccttaaaatattc

SEQ ID NO: 1976 - RNA, 19 nt, synthetic construct
  misc_feature 1..19: note = Description of Artificial Sequence: Synthetic oligonucleotide
  source 1..19: mol_type = other RNA
aactgccttaaaatattca

SEQ ID NO: 1977 - RNA, 19 nt, synthetic construct
  misc_feature 1..19: note = Description of Artificial Sequence: Synthetic oligonucleotide
  source 1..19: mol_type = other RNA
actgccttaaaatattcat

SEQ ID NO: 1978 - RNA, 19 nt, synthetic construct
  misc_feature 1..19: note = Description of Artificial Sequence: Synthetic oligonucleotide
  source 1..19: mol_type = other RNA
ctgccttaaaatattcata

SEQ ID NO: 1979 - RNA, 19 nt, synthetic construct
  misc_feature 1..19: note = Description of Artificial Sequence: Synthetic oligonucleotide
  source 1..19: mol_type = other RNA
tgccttaaaatattcatag

SEQ ID NO: 1980 - RNA, 19 nt, synthetic construct
  misc_feature 1..19: note = Description of Artificial Sequence: Synthetic oligonucleotide
  source 1..19: mol_type = other RNA
gccttaaaatattcatagt

SEQ ID NO: 1981 - RNA, 19 nt, synthetic construct
  misc_feature 1..19: note = Description of Artificial Sequence: Synthetic oligonucleotide
  source 1..19: mol_type = other RNA
ccttaaaatattcatagtt

SEQ ID NO: 1982 - RNA, 19 nt, synthetic construct
  misc_feature 1..19: note = Description of Artificial Sequence: Synthetic oligonucleotide
  source 1..19: mol_type = other RNA
cttaaaatattcatagtta

SEQ ID NO: 1983 - RNA, 19 nt, synthetic construct
  misc_feature 1..19: note = Description of Artificial Sequence: Synthetic oligonucleotide
  source 1..19: mol_type = other RNA
ttaaaatattcatagttaa

SEQ ID NO: 1984 - RNA, 19 nt, synthetic construct
  misc_feature 1..19: note = Description of Artificial Sequence: Synthetic oligonucleotide
  source 1..19: mol_type = other RNA
taaaatattcatagttaat

SEQ ID NO: 1985 - RNA, 19 nt, synthetic construct
  misc_feature 1..19: note = Description of Artificial Sequence: Synthetic oligonucleotide
  source 1..19: mol_type = other RNA
aaaatattcatagttaata

SEQ ID NO: 1986 - RNA, 19 nt, synthetic construct
  misc_feature 1..19: note = Description of Artificial Sequence: Synthetic oligonucleotide
  source 1..19: mol_type = other RNA
aaatattcatagttaatac

SEQ ID NO: 1987 - RNA, 19 nt, synthetic construct
  misc_feature 1..19: note = Description of Artificial Sequence: Synthetic oligonucleotide
  source 1..19: mol_type = other RNA
aatattcatagttaataca

SEQ ID NO: 1988 - RNA, 19 nt, synthetic construct
  misc_feature 1..19: note = Description of Artificial Sequence: Synthetic oligonucleotide
  source 1..19: mol_type = other RNA
atattcatagttaatacag

SEQ ID NO: 1989 - RNA, 19 nt, synthetic construct
  misc_feature 1..19: note = Description of Artificial Sequence: Synthetic oligonucleotide
  source 1..19: mol_type = other RNA
tattcatagttaatacagg

SEQ ID NO: 1990 - RNA, 19 nt, synthetic construct
  misc_feature 1..19: note = Description of Artificial Sequence: Synthetic oligonucleotide
  source 1..19: mol_type = other RNA
attcatagttaatacaggt

SEQ ID NO: 1991 - RNA, 19 nt, synthetic construct
  misc_feature 1..19: note = Description of Artificial Sequence: Synthetic oligonucleotide
  source 1..19: mol_type = other RNA
ttcatagttaatacaggta

SEQ ID NO: 1992 - RNA, 19 nt, synthetic construct
  misc_feature 1..19: note = Description of Artificial Sequence: Synthetic oligonucleotide
  source 1..19: mol_type = other RNA
tcatagttaatacaggtat

SEQ ID NO: 1993 - RNA, 19 nt, synthetic construct
  misc_feature 1..19: note = Description of Artificial Sequence: Synthetic oligonucleotide
  source 1..19: mol_type = other RNA
catagttaatacaggtata

SEQ ID NO: 1994 - RNA, 19 nt, synthetic construct
  misc_feature 1..19: note = Description of Artificial Sequence: Synthetic oligonucleotide
  source 1..19: mol_type = other RNA
atagttaatacaggtatat

SEQ ID NO: 1995 - RNA, 19 nt, synthetic construct
  misc_feature 1..19: note = Description of Artificial Sequence: Synthetic oligonucleotide
  source 1..19: mol_type = other RNA
tagttaatacaggtatatc

SEQ ID NO: 1996 - RNA, 19 nt, synthetic construct
  misc_feature 1..19: note = Description of Artificial Sequence: Synthetic oligonucleotide
  source 1..19: mol_type = other RNA
agttaatacaggtatatct

SEQ ID NO: 1997 - RNA, 19 nt, synthetic construct
  misc_feature 1..19: note = Description of Artificial Sequence: Synthetic oligonucleotide
  source 1..19: mol_type = other RNA
gttaatacaggtatatcta

SEQ ID NO: 1998 - RNA, 19 nt, synthetic construct
  misc_feature 1..19: note = Description of Artificial Sequence: Synthetic oligonucleotide
  source 1..19: mol_type = other RNA
ttaatacaggtatatctat

SEQ ID NO: 1999 - RNA, 19 nt, synthetic construct
  misc_feature 1..19: note = Description of Artificial Sequence: Synthetic oligonucleotide
  source 1..19: mol_type = other RNA
taatacaggtatatctatt

SEQ ID NO: 2000 - RNA, 19 nt, synthetic construct
  misc_feature 1..19: note = Description of Artificial Sequence: Synthetic oligonucleotide
  source 1..19: mol_type = other RNA
aatacaggtatatctattt

SEQ ID NO: 2001 - RNA, 19 nt, synthetic construct
  misc_feature 1..19: note = Description of Artificial Sequence: Synthetic oligonucleotide
  source 1..19: mol_type = other RNA
atacaggtatatctatttt

SEQ ID NO: 2002 - RNA, 19 nt, synthetic construct
  misc_feature 1..19: note = Description of Artificial Sequence: Synthetic oligonucleotide
  source 1..19: mol_type = other RNA
tacaggtatatctattttt

SEQ ID NO: 2003 - RNA, 19 nt, synthetic construct
  misc_feature 1..19: note = Description of Artificial Sequence: Synthetic oligonucleotide
  source 1..19: mol_type = other RNA
acaggtatatctattttta

SEQ ID NO: 2004 - RNA, 19 nt, synthetic construct
  misc_feature 1..19: note = Description of Artificial Sequence: Synthetic oligonucleotide
  source 1..19: mol_type = other RNA
caggtatatctatttttat

SEQ ID NO: 2005 - RNA, 19 nt, synthetic construct
  misc_feature 1..19: note = Description of Artificial Sequence: Synthetic oligonucleotide
  source 1..19: mol_type = other RNA
aggtatatctatttttatt

SEQ ID NO: 2006 - RNA, 19 nt, synthetic construct
  misc_feature 1..19: note = Description of Artificial Sequence: Synthetic oligonucleotide
  source 1..19: mol_type = other RNA
ggtatatctatttttattt

SEQ ID NO: 2007 - RNA, 19 nt, synthetic construct
  misc_feature 1..19: note = Description of Artificial Sequence: Synthetic oligonucleotide
  source 1..19: mol_type = other RNA
gtatatctatttttattta

SEQ ID NO: 2008 - RNA, 19 nt, synthetic construct
  misc_feature 1..19: note = Description of Artificial Sequence: Synthetic oligonucleotide
  source 1..19: mol_type = other RNA
tatatctatttttatttac

SEQ ID NO: 2009 - RNA, 19 nt, synthetic construct
  misc_feature 1..19: note = Description of Artificial Sequence: Synthetic oligonucleotide
  source 1..19: mol_type = other RNA
atatctatttttatttact

SEQ ID NO: 2010 - RNA, 19 nt, synthetic construct
  misc_feature 1..19: note = Description of Artificial Sequence: Synthetic oligonucleotide
  source 1..19: mol_type = other RNA
tatctatttttatttactt

SEQ ID NO: 2011 - RNA, 19 nt, synthetic construct
  misc_feature 1..19: note = Description of Artificial Sequence: Synthetic oligonucleotide
  source 1..19: mol_type = other RNA
atctatttttatttacttt

SEQ ID NO: 2012 - RNA, 19 nt, synthetic construct
  misc_feature 1..19: note = Description of Artificial Sequence: Synthetic oligonucleotide
  source 1..19: mol_type = other RNA
tctatttttatttactttg

SEQ ID NO: 2013 - RNA, 19 nt, synthetic construct
  misc_feature 1..19: note = Description of Artificial Sequence: Synthetic oligonucleotide
  source 1..19: mol_type = other RNA
ctatttttatttactttgt

SEQ ID NO: 2014 - RNA, 19 nt, synthetic construct
  misc_feature 1..19: note = Description of Artificial Sequence: Synthetic oligonucleotide
  source 1..19: mol_type = other RNA
tatttttatttactttgta

SEQ ID NO: 2015 - RNA, 19 nt, synthetic construct
  misc_feature 1..19: note = Description of Artificial Sequence: Synthetic oligonucleotide
  source 1..19: mol_type = other RNA
atttttatttactttgtaa

SEQ ID NO: 2016 - RNA, 19 nt, synthetic construct
  misc_feature 1..19: note = Description of Artificial Sequence: Synthetic oligonucleotide
  source 1..19: mol_type = other RNA
tttttatttactttgtaag

SEQ ID NO: 2017 - RNA, 19 nt, synthetic construct
  misc_feature 1..19: note = Description of Artificial Sequence: Synthetic oligonucleotide
  source 1..19: mol_type = other RNA
ttttatttactttgtaaga

SEQ ID NO: 2018 - RNA, 19 nt, synthetic construct
  misc_feature 1..19: note = Description of Artificial Sequence: Synthetic oligonucleotide
  source 1..19: mol_type = other RNA
tttatttactttgtaagaa

SEQ ID NO: 2019 - RNA, 19 nt, synthetic construct
  misc_feature 1..19: note = Description of Artificial Sequence: Synthetic oligonucleotide
  source 1..19: mol_type = other RNA
ttatttactttgtaagaaa

SEQ ID NO: 2020 - RNA, 19 nt, synthetic construct
  misc_feature 1..19: note = Description of Artificial Sequence: Synthetic oligonucleotide
  source 1..19: mol_type = other RNA
tatttactttgtaagaaac

SEQ ID NO: 2021 - RNA, 19 nt, synthetic construct
  misc_feature 1..19: note = Description of Artificial Sequence: Synthetic oligonucleotide
  source 1..19: mol_type = other RNA
atttactttgtaagaaaca

SEQ ID NO: 2022 - RNA, 19 nt, synthetic construct
  misc_feature 1..19: note = Description of Artificial Sequence: Synthetic oligonucleotide
  source 1..19: mol_type = other RNA
tttactttgtaagaaacaa

SEQ ID NO: 2023 - RNA, 19 nt, synthetic construct
  misc_feature 1..19: note = Description of Artificial Sequence: Synthetic oligonucleotide
  source 1..19: mol_type = other RNA
ttactttgtaagaaacaag

SEQ ID NO: 2024 - RNA, 19 nt, synthetic construct
  misc_feature 1..19: note = Description of Artificial Sequence: Synthetic oligonucleotide
  source 1..19: mol_type = other RNA
tactttgtaagaaacaagc

SEQ ID NO: 2025 - RNA, 19 nt, synthetic construct
  misc_feature 1..19: note = Description of Artificial Sequence: Synthetic oligonucleotide
  source 1..19: mol_type = other RNA
actttgtaagaaacaagct

SEQ ID NO: 2026 - RNA, 19 nt, synthetic construct
  misc_feature 1..19: note = Description of Artificial Sequence: Synthetic oligonucleotide
  source 1..19: mol_type = other RNA
ctttgtaagaaacaagctc

SEQ ID NO: 2027 - RNA, 19 nt, synthetic construct
  misc_feature 1..19: note = Description of Artificial Sequence: Synthetic oligonucleotide
  source 1..19: mol_type = other RNA
tttgtaagaaacaagctca

SEQ ID NO: 2028 - RNA, 19 nt, synthetic construct
  misc_feature 1..19: note = Description of Artificial Sequence: Synthetic oligonucleotide
  source 1..19: mol_type = other RNA
ttgtaagaaacaagctcaa

SEQ ID NO: 2029 - RNA, 19 nt, synthetic construct
  misc_feature 1..19: note = Description of Artificial Sequence: Synthetic oligonucleotide
  source 1..19: mol_type = other RNA
tgtaagaaacaagctcaag

SEQ ID NO: 2030 - RNA, 19 nt, synthetic construct
  misc_feature 1..19: note = Description of Artificial Sequence: Synthetic oligonucleotide
  source 1..19: mol_type = other RNA
gtaagaaacaagctcaagg

SEQ ID NO: 2031 - RNA, 19 nt, synthetic construct
  misc_feature 1..19: note = Description of Artificial Sequence: Synthetic oligonucleotide
  source 1..19: mol_type = other RNA
taagaaacaagctcaagga

SEQ ID NO: 2032 - RNA, 19 nt, synthetic construct
  misc_feature 1..19: note = Description of Artificial Sequence: Synthetic oligonucleotide
  source 1..19: mol_type = other RNA
aagaaacaagctcaaggag

SEQ ID NO: 2033 - RNA, 19 nt, synthetic construct
  misc_feature 1..19: note = Description of Artificial Sequence: Synthetic oligonucleotide
  source 1..19: mol_type = other RNA
agaaacaagctcaaggagc

SEQ ID NO: 2034 - RNA, 19 nt, synthetic construct
  misc_feature 1..19: note = Description of Artificial Sequence: Synthetic oligonucleotide
  source 1..19: mol_type = other RNA
gaaacaagctcaaggagct

SEQ ID NO: 2035 - RNA, 19 nt, synthetic construct
  misc_feature 1..19: note = Description of Artificial Sequence: Synthetic oligonucleotide
  source 1..19: mol_type = other RNA
aaacaagctcaaggagctt

SEQ ID NO: 2036 - RNA, 19 nt, synthetic construct
  misc_feature 1..19: note = Description of Artificial Sequence: Synthetic oligonucleotide
  source 1..19: mol_type = other RNA
aacaagctcaaggagcttc

SEQ ID NO: 2037 - RNA, 19 nt, synthetic construct
  misc_feature 1..19: note = Description of Artificial Sequence: Synthetic oligonucleotide
  source 1..19: mol_type = other RNA
acaagctcaaggagcttcc

SEQ ID NO: 2038 - RNA, 19 nt, synthetic construct
  misc_feature 1..19: note = Description of Artificial Sequence: Synthetic oligonucleotide
  source 1..19: mol_type = other RNA
caagctcaaggagcttcct

SEQ ID NO: 2039 - RNA, 19 nt, synthetic construct
  misc_feature 1..19: note = Description of Artificial Sequence: Synthetic oligonucleotide
  source 1..19: mol_type = other RNA
aagctcaaggagcttcctt

SEQ ID NO: 2040 - RNA, 19 nt, synthetic construct
  misc_feature 1..19: note = Description of Artificial Sequence: Synthetic oligonucleotide
  source 1..19: mol_type = other RNA
agctcaaggagcttccttt

SEQ ID NO: 2041 - RNA, 19 nt, synthetic construct
  misc_feature 1..19: note = Description of Artificial Sequence: Synthetic oligonucleotide
  source 1..19: mol_type = other RNA
gctcaaggagcttcctttt

SEQ ID NO: 2042 - RNA, 19 nt, synthetic construct
  misc_feature 1..19: note = Description of Artificial Sequence: Synthetic oligonucleotide
  source 1..19: mol_type = other RNA
ctcaaggagcttcctttta

SEQ ID NO: 2043 - RNA, 19 nt, synthetic construct
  misc_feature 1..19: note = Description of Artificial Sequence: Synthetic oligonucleotide
  source 1..19: mol_type = other RNA
tcaaggagcttccttttaa

SEQ ID NO: 2044 - RNA, 19 nt, synthetic construct
  misc_feature 1..19: note = Description of Artificial Sequence: Synthetic oligonucleotide
  source 1..19: mol_type = other RNA
caaggagcttccttttaaa

SEQ ID NO: 2045 - RNA, 19 nt, synthetic construct
  misc_feature 1..19: note = Description of Artificial Sequence: Synthetic oligonucleotide
  source 1..19: mol_type = other RNA
aaggagcttccttttaaat

SEQ ID NO: 2046 - RNA, 19 nt, synthetic construct
  misc_feature 1..19: note = Description of Artificial Sequence: Synthetic oligonucleotide
  source 1..19: mol_type = other RNA
aggagcttccttttaaatt

SEQ ID NO: 2047 - RNA, 19 nt, synthetic construct
  misc_feature 1..19: note = Description of Artificial Sequence: Synthetic oligonucleotide
  source 1..19: mol_type = other RNA
ggagcttccttttaaattt

SEQ ID NO: 2048 - RNA, 19 nt, synthetic construct
  misc_feature 1..19: note = Description of Artificial Sequence: Synthetic oligonucleotide
  source 1..19: mol_type = other RNA
gagcttccttttaaatttt

SEQ ID NO: 2049 - RNA, 19 nt, synthetic construct
  misc_feature 1..19: note = Description of Artificial Sequence: Synthetic oligonucleotide
  source 1..19: mol_type = other RNA
agcttccttttaaattttg

SEQ ID NO: 2050 - RNA, 19 nt, synthetic construct
  misc_feature 1..19: note = Description of Artificial Sequence: Synthetic oligonucleotide
  source 1..19: mol_type = other RNA
gcttccttttaaattttgt

SEQ ID NO: 2051 - RNA, 19 nt, synthetic construct
  misc_feature 1..19: note = Description of Artificial Sequence: Synthetic oligonucleotide
  source 1..19: mol_type = other RNA
cttccttttaaattttgtc

SEQ ID NO: 2052 - RNA, 19 nt, synthetic construct
  misc_feature 1..19: note = Description of Artificial Sequence: Synthetic oligonucleotide
  source 1..19: mol_type = other RNA
ttccttttaaattttgtct

SEQ ID NO: 2053 - RNA, 19 nt, synthetic construct
  misc_feature 1..19: note = Description of Artificial Sequence: Synthetic oligonucleotide
  source 1..19: mol_type = other RNA
tccttttaaattttgtctg

SEQ ID NO: 2054 - RNA, 19 nt, synthetic construct
  misc_feature 1..19: note = Description of Artificial Sequence: Synthetic oligonucleotide
  source 1..19: mol_type = other RNA
ccttttaaattttgtctgt

SEQ ID NO: 2055 - RNA, 19 nt, synthetic construct
  misc_feature 1..19: note = Description of Artificial Sequence: Synthetic oligonucleotide
  source 1..19: mol_type = other RNA
cttttaaattttgtctgta

SEQ ID NO: 2056 - RNA, 19 nt, synthetic construct
  misc_feature 1..19: note = Description of Artificial Sequence: Synthetic oligonucleotide
  source 1..19: mol_type = other RNA
ttttaaattttgtctgtag

SEQ ID NO: 2057 - RNA, 19 nt, synthetic construct
  misc_feature 1..19: note = Description of Artificial Sequence: Synthetic oligonucleotide
  source 1..19: mol_type = other RNA
tttaaattttgtctgtagg

SEQ ID NO: 2058 - RNA, 19 nt, synthetic construct
  misc_feature 1..19: note = Description of Artificial Sequence: Synthetic oligonucleotide
  source 1..19: mol_type = other RNA
ttaaattttgtctgtagga

SEQ ID NO: 2059 - RNA, 19 nt, synthetic construct
  misc_feature 1..19: note = Description of Artificial Sequence: Synthetic oligonucleotide
  source 1..19: mol_type = other RNA
taaattttgtctgtaggaa

SEQ ID NO: 2060 - RNA, 19 nt, synthetic construct
  misc_feature 1..19: note = Description of Artificial Sequence: Synthetic oligonucleotide
  source 1..19: mol_type = other RNA
aaattttgtctgtaggaaa

SEQ ID NO: 2061 - RNA, 19 nt, synthetic construct
  misc_feature 1..19: note = Description of Artificial Sequence: Synthetic oligonucleotide
  source 1..19: mol_type = other RNA
aattttgtctgtaggaaat

SEQ ID NO: 2062 - RNA, 19 nt, synthetic construct
  misc_feature 1..19: note = Description of Artificial Sequence: Synthetic oligonucleotide
  source 1..19: mol_type = other RNA
attttgtctgtaggaaatg

SEQ ID NO: 2063 - RNA, 19 nt, synthetic construct
  misc_feature 1..19: note = Description of Artificial Sequence: Synthetic oligonucleotide
  source 1..19: mol_type = other RNA
ttttgtctgtaggaaatgg

SEQ ID NO: 2064 - RNA, 19 nt, synthetic construct
  misc_feature 1..19: note = Description of Artificial Sequence: Synthetic oligonucleotide
  source 1..19: mol_type = other RNA
tttgtctgtaggaaatggt

SEQ ID NO: 2065 - RNA, 19 nt, synthetic construct
  misc_feature 1..19: note = Description of Artificial Sequence: Synthetic oligonucleotide
  source 1..19: mol_type = other RNA
ttgtctgtaggaaatggtt

SEQ ID NO: 2066 - RNA, 19 nt, synthetic construct
  misc_feature 1..19: note = Description of Artificial Sequence: Synthetic oligonucleotide
  source 1..19: mol_type = other RNA
tgtctgtaggaaatggttg

SEQ ID NO: 2067 - RNA, 19 nt, synthetic construct
  misc_feature 1..19: note = Description of Artificial Sequence: Synthetic oligonucleotide
  source 1..19: mol_type = other RNA
gtctgtaggaaatggttga

SEQ ID NO: 2068 - RNA, 19 nt, synthetic construct
  misc_feature 1..19: note = Description of Artificial Sequence: Synthetic oligonucleotide
  source 1..19: mol_type = other RNA
tctgtaggaaatggttgaa

SEQ ID NO: 2069 - RNA, 19 nt, synthetic construct
  misc_feature 1..19: note = Description of Artificial Sequence: Synthetic oligonucleotide
  source 1..19: mol_type = other RNA
ctgtaggaaatggttgaaa

SEQ ID NO: 2070 - RNA, 19 nt, synthetic construct
  misc_feature 1..19: note = Description of Artificial Sequence: Synthetic oligonucleotide
  source 1..19: mol_type = other RNA
tgtaggaaatggttgaaaa

SEQ ID NO: 2071 - RNA, 19 nt, synthetic construct
  misc_feature 1..19: note = Description of Artificial Sequence: Synthetic oligonucleotide
  source 1..19: mol_type = other RNA
gtaggaaatggttgaaaac

SEQ ID NO: 2072 - RNA, 19 nt, synthetic construct
  misc_feature 1..19: note = Description of Artificial Sequence: Synthetic oligonucleotide
  source 1..19: mol_type = other RNA
taggaaatggttgaaaact

SEQ ID NO: 2073 - RNA, 19 nt, synthetic construct
  misc_feature 1..19: note = Description of Artificial Sequence: Synthetic oligonucleotide
  source 1..19: mol_type = other RNA
aggaaatggttgaaaactg

SEQ ID NO: 2074 - RNA, 19 nt, synthetic construct
  misc_feature 1..19: note = Description of Artificial Sequence: Synthetic oligonucleotide
  source 1..19: mol_type = other RNA
ggaaatggttgaaaactga

SEQ ID NO: 2075 - RNA, 19 nt, synthetic construct
  misc_feature 1..19: note = Description of Artificial Sequence: Synthetic oligonucleotide
  source 1..19: mol_type = other RNA
gaaatggttgaaaactgaa

SEQ ID NO: 2076 - RNA, 19 nt, synthetic construct
  misc_feature 1..19: note = Description of Artificial Sequence: Synthetic oligonucleotide
  source 1..19: mol_type = other RNA
aaatggttgaaaactgaag

SEQ ID NO: 2077 - RNA, 19 nt, synthetic construct
  misc_feature 1..19: note = Description of Artificial Sequence: Synthetic oligonucleotide
  source 1..19: mol_type = other RNA
aatggttgaaaactgaagg

SEQ ID NO: 2078 - RNA, 19 nt, synthetic construct
  misc_feature 1..19: note = Description of Artificial Sequence: Synthetic oligonucleotide
  source 1..19: mol_type = other RNA
atggttgaaaactgaaggt

SEQ ID NO: 2079 - RNA, 19 nt, synthetic construct
  misc_feature 1..19: note = Description of Artificial Sequence: Synthetic oligonucleotide
  source 1..19: mol_type = other RNA
tggttgaaaactgaaggta

SEQ ID NO: 2080 - RNA, 19 nt, synthetic construct
  misc_feature 1..19: note = Description of Artificial Sequence: Synthetic oligonucleotide
  source 1..19: mol_type = other RNA
ggttgaaaactgaaggtag

SEQ ID NO: 2081 - RNA, 19 nt, synthetic construct
  misc_feature 1..19: note = Description of Artificial Sequence: Synthetic oligonucleotide
  source 1..19: mol_type = other RNA
gttgaaaactgaaggtaga

SEQ ID NO: 2082 - RNA, 19 nt, synthetic construct
  misc_feature 1..19: note = Description of Artificial Sequence: Synthetic oligonucleotide
  source 1..19: mol_type = other RNA
ttgaaaactgaaggtagat

SEQ ID NO: 2083 - RNA, 19 nt, synthetic construct
  misc_feature 1..19: note = Description of Artificial Sequence: Synthetic oligonucleotide
  source 1..19: mol_type = other RNA
tgaaaactgaaggtagatg

SEQ ID NO: 2084 - RNA, 19 nt, synthetic construct
  misc_feature 1..19: note = Description of Artificial Sequence: Synthetic oligonucleotide
  source 1..19: mol_type = other RNA
gaaaactgaaggtagatgg

SEQ ID NO: 2085 - RNA, 19 nt, synthetic construct
  misc_feature 1..19: note = Description of Artificial Sequence: Synthetic oligonucleotide
  source 1..19: mol_type = other RNA
aaaactgaaggtagatggt

SEQ ID NO: 2086 - RNA, 19 nt, synthetic construct
  misc_feature 1..19: note = Description of Artificial Sequence: Synthetic oligonucleotide
  source 1..19: mol_type = other RNA
aaactgaaggtagatggtg

SEQ ID NO: 2087 - RNA, 19 nt, synthetic construct
  misc_feature 1..19: note = Description of Artificial Sequence: Synthetic oligonucleotide
  source 1..19: mol_type = other RNA
aactgaaggtagatggtgt

SEQ ID NO: 2088 - RNA, 19 nt, synthetic construct
  misc_feature 1..19: note = Description of Artificial Sequence: Synthetic oligonucleotide
  source 1..19: mol_type = other RNA
actgaaggtagatggtgtt

SEQ ID NO: 2089 - RNA, 19 nt, synthetic construct
  misc_feature 1..19: note = Description of Artificial Sequence: Synthetic oligonucleotide
  source 1..19: mol_type = other RNA
ctgaaggtagatggtgtta

SEQ ID NO: 2090 - RNA, 19 nt, synthetic construct
  misc_feature 1..19: note = Description of Artificial Sequence: Synthetic oligonucleotide
  source 1..19: mol_type = other RNA
tgaaggtagatggtgttat

SEQ ID NO: 2091 - RNA, 19 nt, synthetic construct
  misc_feature 1..19: note = Description of Artificial Sequence: Synthetic oligonucleotide
  source 1..19: mol_type = other RNA
gaaggtagatggtgttata

SEQ ID NO: 2092 - RNA, 19 nt, synthetic construct
  misc_feature 1..19: note = Description of Artificial Sequence: Synthetic oligonucleotide
  source 1..19: mol_type = other RNA
aaggtagatggtgttatag

SEQ ID NO: 2093 - RNA, 19 nt, synthetic construct
  misc_feature 1..19: note = Description of Artificial Sequence: Synthetic oligonucleotide
  source 1..19: mol_type = other RNA
aggtagatggtgttatagt

SEQ ID NO: 2094 - RNA, 19 nt, synthetic construct
  misc_feature 1..19: note = Description of Artificial Sequence: Synthetic oligonucleotide
  source 1..19: mol_type = other RNA
ggtagatggtgttatagtt

SEQ ID NO: 2095 - RNA, 19 nt, synthetic construct
  misc_feature 1..19: note = Description of Artificial Sequence: Synthetic oligonucleotide
  source 1..19: mol_type = other RNA
gtagatggtgttatagtta

SEQ ID NO: 2096 - RNA, 19 nt, synthetic construct
  misc_feature 1..19: note = Description of Artificial Sequence: Synthetic oligonucleotide
  source 1..19: mol_type = other RNA
tagatggtgttatagttaa

SEQ ID NO: 2097 - RNA, 19 nt, synthetic construct
  misc_feature 1..19: note = Description of Artificial Sequence: Synthetic oligonucleotide
  source 1..19: mol_type = other RNA
agatggtgttatagttaat

SEQ ID NO: 2098 - RNA, 19 nt, synthetic construct
  misc_feature 1..19: note = Description of Artificial Sequence: Synthetic oligonucleotide
  source 1..19: mol_type = other RNA
gatggtgttatagttaata

SEQ ID NO: 2099 - RNA, 19 nt, synthetic construct
  misc_feature 1..19: note = Description of Artificial Sequence: Synthetic oligonucleotide
  source 1..19: mol_type = other RNA
atggtgttatagttaataa

SEQ ID NO: 2100 - RNA, 19 nt, synthetic construct
  misc_feature 1..19: note = Description of Artificial Sequence: Synthetic oligonucleotide
  source 1..19: mol_type = other RNA
tggtgttatagttaataat

SEQ ID NO: 2101 - RNA, 19 nt, synthetic construct
  misc_feature 1..19: note = Description of Artificial Sequence: Synthetic oligonucleotide
  source 1..19: mol_type = other RNA
ggtgttatagttaataata

SEQ ID NO: 2102 - RNA, 19 nt, synthetic construct
  misc_feature 1..19: note = Description of Artificial Sequence: Synthetic oligonucleotide
  source 1..19: mol_type = other RNA
gtgttatagttaataataa

SEQ ID NO: 2103 - RNA, 19 nt, synthetic construct
  misc_feature 1..19: note = Description of Artificial Sequence: Synthetic oligonucleotide
  source 1..19: mol_type = other RNA
tgttatagttaataataaa

SEQ ID NO: 2104 - RNA, 19 nt, synthetic construct
  misc_feature 1..19: note = Description of Artificial Sequence: Synthetic oligonucleotide
  source 1..19: mol_type = other RNA
gttatagttaataataaat

SEQ ID NO: 2105 - RNA, 19 nt, synthetic construct
  misc_feature 1..19: note = Description of Artificial Sequence: Synthetic oligonucleotide
  source 1..19: mol_type = other RNA
ttatagttaataataaatg

SEQ ID NO: 2106 - RNA, 19 nt, synthetic construct
  misc_feature 1..19: note = Description of Artificial Sequence: Synthetic oligonucleotide
  source 1..19: mol_type = other RNA
tatagttaataataaatgc

SEQ ID NO: 2107 - RNA, 19 nt, synthetic construct
  misc_feature 1..19: note = Description of Artificial Sequence: Synthetic oligonucleotide
  source 1..19: mol_type = other RNA
atagttaataataaatgct

SEQ ID NO: 2108 - RNA, 19 nt, synthetic construct
  misc_feature 1..19: note = Description of Artificial Sequence: Synthetic oligonucleotide
  source 1..19: mol_type = other RNA
tagttaataataaatgctg

SEQ ID NO: 2109 - RNA, 19 nt, synthetic construct
  misc_feature 1..19: note = Description of Artificial Sequence: Synthetic oligonucleotide
  source 1..19: mol_type = other RNA
agttaataataaatgctgt

SEQ ID NO: 2110 - RNA, 19 nt, synthetic construct
  misc_feature 1..19: note = Description of Artificial Sequence: Synthetic oligonucleotide
  source 1..19: mol_type = other RNA
gttaataataaatgctgta

SEQ ID NO: 2111 - RNA, 19 nt, synthetic construct
  misc_feature 1..19: note = Description of Artificial Sequence: Synthetic oligonucleotide
  source 1..19: mol_type = other RNA
ttaataataaatgctgtaa

SEQ ID NO: 2112 - RNA, 19 nt, synthetic construct
  misc_feature 1..19: note = Description of Artificial Sequence: Synthetic oligonucleotide
  source 1..19: mol_type = other RNA
taataataaatgctgtaaa

SEQ ID NO: 2113 - RNA, 19 nt, synthetic construct
  misc_feature 1..19: note = Description of Artificial Sequence: Synthetic oligonucleotide
  source 1..19: mol_type = other RNA
aataataaatgctgtaaat

SEQ ID NO: 2114 - RNA, 19 nt, synthetic construct
  misc_feature 1..19: note = Description of Artificial Sequence: Synthetic oligonucleotide
  source 1..19: mol_type = other RNA
ataataaatgctgtaaata

SEQ ID NO: 2115 - RNA, 19 nt, synthetic construct
  misc_feature 1..19: note = Description of Artificial Sequence: Synthetic oligonucleotide
  source 1..19: mol_type = other RNA
taataaatgctgtaaataa

SEQ ID NO: 2116 - RNA, 19 nt, synthetic construct
  misc_feature 1..19: note = Description of Artificial Sequence: Synthetic oligonucleotide
  source 1..19: mol_type = other RNA
aataaatgctgtaaataag

SEQ ID NO: 2117 - RNA, 19 nt, synthetic construct
  misc_feature 1..19: note = Description of Artificial Sequence: Synthetic oligonucleotide
  source 1..19: mol_type = other RNA
ataaatgctgtaaataagc

SEQ ID NO: 2118 - RNA, 19 nt, synthetic construct
  misc_feature 1..19: note = Description of Artificial Sequence: Synthetic oligonucleotide
  source 1..19: mol_type = other RNA
taaatgctgtaaataagca

SEQ ID NO: 2119 - RNA, 19 nt, synthetic construct
  misc_feature 1..19: note = Description of Artificial Sequence: Synthetic oligonucleotide
  source 1..19: mol_type = other RNA
aaatgctgtaaataagcat

SEQ ID NO: 2120 - RNA, 19 nt, synthetic construct
  misc_feature 1..19: note = Description of Artificial Sequence: Synthetic oligonucleotide
  source 1..19: mol_type = other RNA
aatgctgtaaataagcatc

SEQ ID NO: 2121 - RNA, 19 nt, synthetic construct
  misc_feature 1..19: note = Description of Artificial Sequence: Synthetic oligonucleotide
  source 1..19: mol_type = other RNA
atgctgtaaataagcatct

SEQ ID NO: 2122 - RNA, 19 nt, synthetic construct
  misc_feature 1..19: note = Description of Artificial Sequence: Synthetic oligonucleotide
  source 1..19: mol_type = other RNA
tgctgtaaataagcatctc

SEQ ID NO: 2123 - RNA, 19 nt, synthetic construct
  misc_feature 1..19: note = Description of Artificial Sequence: Synthetic oligonucleotide
  source 1..19: mol_type = other RNA
gctgtaaataagcatctca

SEQ ID NO: 2124 - RNA, 19 nt, synthetic construct
  misc_feature 1..19: note = Description of Artificial Sequence: Synthetic oligonucleotide
  source 1..19: mol_type = other RNA
ctgtaaataagcatctcac

SEQ ID NO: 2125 - RNA, 19 nt, synthetic construct
  misc_feature 1..19: note = Description of Artificial Sequence: Synthetic oligonucleotide
  source 1..19: mol_type = other RNA
tgtaaataagcatctcact

SEQ ID NO: 2126 - RNA, 19 nt, synthetic construct
  misc_feature 1..19: note = Description of Artificial Sequence: Synthetic oligonucleotide
  source 1..19: mol_type = other RNA
gtaaataagcatctcactt

SEQ ID NO: 2127 - RNA, 19 nt, synthetic construct
  misc_feature 1..19: note = Description of Artificial Sequence: Synthetic oligonucleotide
  source 1..19: mol_type = other RNA
taaataagcatctcacttt

SEQ ID NO: 2128 - RNA, 19 nt, synthetic construct
  misc_feature 1..19: note = Description of Artificial Sequence: Synthetic oligonucleotide
  source 1..19: mol_type = other RNA
aaataagcatctcactttg

SEQ ID NO: 2129 - RNA, 19 nt, synthetic construct
  misc_feature 1..19: note = Description of Artificial Sequence: Synthetic oligonucleotide
  source 1..19: mol_type = other RNA
aataagcatctcactttgt

SEQ ID NO: 2130 - RNA, 19 nt, synthetic construct
  misc_feature 1..19: note = Description of Artificial Sequence: Synthetic oligonucleotide
  source 1..19: mol_type = other RNA
ataagcatctcactttgta

SEQ ID NO: 2131 - RNA, 19 nt, synthetic construct
  misc_feature 1..19: note = Description of Artificial Sequence: Synthetic oligonucleotide
  source 1..19: mol_type = other RNA
taagcatctcactttgtaa

SEQ ID NO: 2132 - RNA, 19 nt, synthetic construct
  misc_feature 1..19: note = Description of Artificial Sequence: Synthetic oligonucleotide
  source 1..19: mol_type = other RNA
aagcatctcactttgtaaa

SEQ ID NO: 2133 - RNA, 19 nt, synthetic construct
  misc_feature 1..19: note = Description of Artificial Sequence: Synthetic oligonucleotide
  source 1..19: mol_type = other RNA
agcatctcactttgtaaaa

SEQ ID NO: 2134 - RNA, 19 nt, synthetic construct
  misc_feature 1..19: note = Description of Artificial Sequence: Synthetic oligonucleotide
  source 1..19: mol_type = other RNA
gcatctcactttgtaaaaa

SEQ ID NO: 2135 - RNA, 19 nt, synthetic construct
  misc_feature 1..19: note = Description of Artificial Sequence: Synthetic oligonucleotide
  source 1..19: mol_type = other RNA
catctcactttgtaaaaat

SEQ ID NO: 2136 - RNA, 19 nt, synthetic construct
  misc_feature 1..19: note = Description of Artificial Sequence: Synthetic oligonucleotide
  source 1..19: mol_type = other RNA
atctcactttgtaaaaata

SEQ ID NO: 2137 - RNA, 19 nt, synthetic construct
  misc_feature 1..19: note = Description of Artificial Sequence: Synthetic oligonucleotide
  source 1..19: mol_type = other RNA
tctcactttgtaaaaataa

SEQ ID NO: 2138 - RNA, 19 nt, synthetic construct
  misc_feature 1..19: note = Description of Artificial Sequence: Synthetic oligonucleotide
  source 1..19: mol_type = other RNA
ctcactttgtaaaaataaa

SEQ ID NO: 2139 - RNA, 19 nt, synthetic construct
  misc_feature 1..19: note = Description of Artificial Sequence: Synthetic oligonucleotide
  source 1..19: mol_type = other RNA
tcactttgtaaaaataaaa

SEQ ID NO: 2140 - RNA, 19 nt, synthetic construct
  misc_feature 1..19: note = Description of Artificial Sequence: Synthetic oligonucleotide
  source 1..19: mol_type = other RNA
cactttgtaaaaataaaat

SEQ ID NO: 2141 - RNA, 19 nt, synthetic construct
  misc_feature 1..19: note = Description of Artificial Sequence: Synthetic oligonucleotide
  source 1..19: mol_type = other RNA
actttgtaaaaataaaata

SEQ ID NO: 2142 - RNA, 19 nt, synthetic construct
  misc_feature 1..19: note = Description of Artificial Sequence: Synthetic oligonucleotide
  source 1..19: mol_type = other RNA
ctttgtaaaaataaaatat

SEQ ID NO: 2143 - RNA, 19 nt, synthetic construct
  misc_feature 1..19: note = Description of Artificial Sequence: Synthetic oligonucleotide
  source 1..19: mol_type = other RNA
tttgtaaaaataaaatatt

SEQ ID NO: 2144 - RNA, 19 nt, synthetic construct
  misc_feature 1..19: note = Description of Artificial Sequence: Synthetic oligonucleotide
  source 1..19: mol_type = other RNA
ttgtaaaaataaaatattg

SEQ ID NO: 2145 - RNA, 19 nt, synthetic construct
  misc_feature 1..19: note = Description of Artificial Sequence: Synthetic oligonucleotide
  source 1..19: mol_type = other RNA
tgtaaaaataaaatattgt

SEQ ID NO: 2146 - RNA, 19 nt, synthetic construct
  misc_feature 1..19: note = Description of Artificial Sequence: Synthetic oligonucleotide
  source 1..19: mol_type = other RNA
gtaaaaataaaatattgtg

SEQ ID NO: 2147 - RNA, 19 nt, synthetic construct
  misc_feature 1..19: note = Description of Artificial Sequence: Synthetic oligonucleotide
  source 1..19: mol_type = other RNA
taaaaataaaatattgtgg

SEQ ID NO: 2148 - RNA, 19 nt, synthetic construct
  misc_feature 1..19: note = Description of Artificial Sequence: Synthetic oligonucleotide
  source 1..19: mol_type = other RNA
aaaaataaaatattgtggt

SEQ ID NO: 2149 - RNA, 19 nt, synthetic construct
  misc_feature 1..19: note = Description of Artificial Sequence: Synthetic oligonucleotide
  source 1..19: mol_type = other RNA
aaaataaaatattgtggtt

SEQ ID NO: 2150 - RNA, 19 nt, synthetic construct
  misc_feature 1..19: note = Description of Artificial Sequence: Synthetic oligonucleotide
  source 1..19: mol_type = other RNA
aaataaaatattgtggttt

SEQ ID NO: 2151 - RNA, 19 nt, synthetic construct
  misc_feature 1..19: note = Description of Artificial Sequence: Synthetic oligonucleotide
  source 1..19: mol_type = other RNA
aataaaatattgtggtttt

SEQ ID NO: 2152 - RNA, 19 nt, synthetic construct
  misc_feature 1..19: note = Description of Artificial Sequence: Synthetic oligonucleotide
  source 1..19: mol_type = other RNA
ataaaatattgtggttttg

SEQ ID NO: 2153 - RNA, 19 nt, synthetic construct
  misc_feature 1..19: note = Description of Artificial Sequence: Synthetic oligonucleotide
  source 1..19: mol_type = other RNA
taaaatattgtggttttgt

SEQ ID NO: 2154 - RNA, 19 nt, synthetic construct
  misc_feature 1..19: note = Description of Artificial Sequence: Synthetic oligonucleotide
  source 1..19: mol_type = other RNA
aaaatattgtggttttgtt

SEQ ID NO: 2155 - RNA, 19 nt, synthetic construct
  misc_feature 1..19: note = Description of Artificial Sequence: Synthetic oligonucleotide
  source 1..19: mol_type = other RNA
aaatattgtggttttgttt

SEQ ID NO: 2156 - RNA, 19 nt, synthetic construct
  misc_feature 1..19: note = Description of Artificial Sequence: Synthetic oligonucleotide
  source 1..19: mol_type = other RNA
aatattgtggttttgtttt

SEQ ID NO: 2157 - RNA, 19 nt, synthetic construct
  misc_feature 1..19: note = Description of Artificial Sequence: Synthetic oligonucleotide
  source 1..19: mol_type = other RNA
atattgtggttttgtttta

SEQ ID NO: 2158 - RNA, 19 nt, synthetic construct
  misc_feature 1..19: note = Description of Artificial Sequence: Synthetic oligonucleotide
  source 1..19: mol_type = other RNA
tattgtggttttgttttaa

SEQ ID NO: 2159 - RNA, 19 nt, synthetic construct
  misc_feature 1..19: note = Description of Artificial Sequence: Synthetic oligonucleotide
  source 1..19: mol_type = other RNA
attgtggttttgttttaaa

SEQ ID NO: 2160 - RNA, 19 nt, synthetic construct
  misc_feature 1..19: note = Description of Artificial Sequence: Synthetic oligonucleotide
  source 1..19: mol_type = other RNA
ttgtggttttgttttaaac

SEQ ID NO: 2161 - RNA, 19 nt, synthetic construct
  misc_feature 1..19: note = Description of Artificial Sequence: Synthetic oligonucleotide
  source 1..19: mol_type = other RNA
tgtggttttgttttaaaca

SEQ ID NO: 2162 - RNA, 19 nt, synthetic construct
  misc_feature 1..19: note = Description of Artificial Sequence: Synthetic oligonucleotide
  source 1..19: mol_type = other RNA
gtggttttgttttaaacat

SEQ ID NO: 2163 - RNA, 19 nt, synthetic construct
  misc_feature 1..19: note = Description of Artificial Sequence: Synthetic oligonucleotide
  source 1..19: mol_type = other RNA
tggttttgttttaaacatt

SEQ ID NO: 2164 - RNA, 19 nt, synthetic construct
  misc_feature 1..19: note = Description of Artificial Sequence: Synthetic oligonucleotide
  source 1..19: mol_type = other RNA
ggttttgttttaaacattc

SEQ ID NO: 2165 - RNA, 19 nt, synthetic construct
  misc_feature 1..19: note = Description of Artificial Sequence: Synthetic oligonucleotide
  source 1..19: mol_type = other RNA
gttttgttttaaacattca

SEQ ID NO: 2166 - RNA, 19 nt, synthetic construct
  misc_feature 1..19: note = Description of Artificial Sequence: Synthetic oligonucleotide
  source 1..19: mol_type = other RNA
ttttgttttaaacattcaa

SEQ ID NO: 2167 - RNA, 19 nt, synthetic construct
  misc_feature 1..19: note = Description of Artificial Sequence: Synthetic oligonucleotide
  source 1..19: mol_type = other RNA
tttgttttaaacattcaac

SEQ ID NO: 2168 - RNA, 19 nt, synthetic construct
  misc_feature 1..19: note = Description of Artificial Sequence: Synthetic oligonucleotide
  source 1..19: mol_type = other RNA
ttgttttaaacattcaacg

SEQ ID NO: 2169 - RNA, 19 nt, synthetic construct
  misc_feature 1..19: note = Description of Artificial Sequence: Synthetic oligonucleotide
  source 1..19: mol_type = other RNA
tgttttaaacattcaacgt

SEQ ID NO: 2170 - RNA, 19 nt, synthetic construct
  misc_feature 1..19: note = Description of Artificial Sequence: Synthetic oligonucleotide
  source 1..19: mol_type = other RNA
gttttaaacattcaacgtt

SEQ ID NO: 2171 - RNA, 19 nt, synthetic construct
  misc_feature 1..19: note = Description of Artificial Sequence: Synthetic oligonucleotide
  source 1..19: mol_type = other RNA
ttttaaacattcaacgttt

SEQ ID NO: 2172 - RNA, 19 nt, synthetic construct
  misc_feature 1..19: note = Description of Artificial Sequence: Synthetic oligonucleotide
  source 1..19: mol_type = other RNA
tttaaacattcaacgtttc

SEQ ID NO: 2173 - RNA, 19 nt, synthetic construct
  misc_feature 1..19: note = Description of Artificial Sequence: Synthetic oligonucleotide
  source 1..19: mol_type = other RNA
ttaaacattcaacgtttct

SEQ ID NO: 2174 - RNA, 19 nt, synthetic construct
  misc_feature 1..19: note = Description of Artificial Sequence: Synthetic oligonucleotide
  source 1..19: mol_type = other RNA
taaacattcaacgtttctt

SEQ ID NO: 2175 - RNA, 19 nt, synthetic construct
  misc_feature 1..19: note = Description of Artificial Sequence: Synthetic oligonucleotide
  source 1..19: mol_type = other RNA
aaacattcaacgtttcttt

SEQ ID NO: 2176 - RNA, 19 nt, synthetic construct
  misc_feature 1..19: note = Description of Artificial Sequence: Synthetic oligonucleotide
  source 1..19: mol_type = other RNA
aacattcaacgtttctttt

SEQ ID NO: 2177 - RNA, 19 nt, synthetic construct
  misc_feature 1..19: note = Description of Artificial Sequence: Synthetic oligonucleotide
  source 1..19: mol_type = other RNA
acattcaacgtttcttttc

SEQ ID NO: 2178 - RNA, 19 nt, synthetic construct
  misc_feature 1..19: note = Description of Artificial Sequence: Synthetic oligonucleotide
  source 1..19: mol_type = other RNA
cattcaacgtttcttttcc

SEQ ID NO: 2179 - RNA, 19 nt, synthetic construct
  misc_feature 1..19: note = Description of Artificial Sequence: Synthetic oligonucleotide
  source 1..19: mol_type = other RNA
attcaacgtttcttttcct

SEQ ID NO: 2180 - RNA, 19 nt, synthetic construct
  misc_feature 1..19: note = Description of Artificial Sequence: Synthetic oligonucleotide
  source 1..19: mol_type = other RNA
ttcaacgtttcttttcctt

SEQ ID NO: 2181 - RNA, 19 nt, synthetic construct
  misc_feature 1..19: note = Description of Artificial Sequence: Synthetic oligonucleotide
  source 1..19: mol_type = other RNA
tcaacgtttcttttccttc

SEQ ID NO: 2182 - RNA, 19 nt, synthetic construct
  misc_feature 1..19: note = Description of Artificial Sequence: Synthetic oligonucleotide
  source 1..19: mol_type = other RNA
caacgtttcttttccttct

SEQ ID NO: 2183 - RNA, 19 nt, synthetic construct
  misc_feature 1..19: note = Description of Artificial Sequence: Synthetic oligonucleotide
  source 1..19: mol_type = other RNA
aacgtttcttttccttcta

SEQ ID NO: 2184 - RNA, 19 nt, synthetic construct
  misc_feature 1..19: note = Description of Artificial Sequence: Synthetic oligonucleotide
  source 1..19: mol_type = other RNA
acgtttcttttccttctac

SEQ ID NO: 2185 - RNA, 19 nt, synthetic construct
  misc_feature 1..19: note = Description of Artificial Sequence: Synthetic oligonucleotide
  source 1..19: mol_type = other RNA
cgtttcttttccttctaca

SEQ ID NO: 2186 - RNA, 19 nt, synthetic construct
  misc_feature 1..19: note = Description of Artificial Sequence: Synthetic oligonucleotide
  source 1..19: mol_type = other RNA
gtttcttttccttctacaa

SEQ ID NO: 2187 - RNA, 19 nt, synthetic construct
  misc_feature 1..19: note = Description of Artificial Sequence: Synthetic oligonucleotide
  source 1..19: mol_type = other RNA
tttcttttccttctacaat

SEQ ID NO: 2188 - RNA, 19 nt, synthetic construct
  misc_feature 1..19: note = Description of Artificial Sequence: Synthetic oligonucleotide
  source 1..19: mol_type = other RNA
ttcttttccttctacaata

SEQ ID NO: 2189 - RNA, 19 nt, synthetic construct
  misc_feature 1..19: note = Description of Artificial Sequence: Synthetic oligonucleotide
  source 1..19: mol_type = other RNA
tcttttccttctacaataa

SEQ ID NO: 2190 - RNA, 19 nt, synthetic construct
  misc_feature 1..19: note = Description of Artificial Sequence: Synthetic oligonucleotide
  source 1..19: mol_type = other RNA
cttttccttctacaataaa

SEQ ID NO: 2191 - RNA, 19 nt, synthetic construct
  misc_feature 1..19: note = Description of Artificial Sequence: Synthetic oligonucleotide
  source 1..19: mol_type = other RNA
ttttccttctacaataaac

SEQ ID NO: 2192 - RNA, 19 nt, synthetic construct
  misc_feature 1..19: note = Description of Artificial Sequence: Synthetic oligonucleotide
  source 1..19: mol_type = other RNA
tttccttctacaataaaca

SEQ ID NO: 2193 - RNA, 19 nt, synthetic construct
  misc_feature 1..19: note = Description of Artificial Sequence: Synthetic oligonucleotide
  source 1..19: mol_type = other RNA
ttccttctacaataaacac

SEQ ID NO: 2194 - RNA, 19 nt, synthetic construct
  misc_feature 1..19: note = Description of Artificial Sequence: Synthetic oligonucleotide
  source 1..19: mol_type = other RNA
tccttctacaataaacact

SEQ ID NO: 2195 - RNA, 19 nt, synthetic construct
  misc_feature 1..19: note = Description of Artificial Sequence: Synthetic oligonucleotide
  source 1..19: mol_type = other RNA
ccttctacaataaacactt

SEQ ID NO: 2196 - RNA, 19 nt, synthetic construct
  misc_feature 1..19: note = Description of Artificial Sequence: Synthetic oligonucleotide
  source 1..19: mol_type = other RNA
cttctacaataaacacttt

SEQ ID NO: 2197 - RNA, 19 nt, synthetic construct
  misc_feature 1..19: note = Description of Artificial Sequence: Synthetic oligonucleotide
  source 1..19: mol_type = other RNA
ttctacaataaacactttc

SEQ ID NO: 2198 - RNA, 19 nt, synthetic construct
  misc_feature 1..19: note = Description of Artificial Sequence: Synthetic oligonucleotide
  source 1..19: mol_type = other RNA
tctacaataaacactttca

SEQ ID NO: 2199 - RNA, 19 nt, synthetic construct
  misc_feature 1..19: note = Description of Artificial Sequence: Synthetic oligonucleotide
  source 1..19: mol_type = other RNA
ctacaataaacactttcaa

SEQ ID NO: 2200 - RNA, 19 nt, synthetic construct
  misc_feature 1..19: note = Description of Artificial Sequence: Synthetic oligonucleotide
  source 1..19: mol_type = other RNA
tacaataaacactttcaaa

SEQ ID NO: 2201 - RNA, 19 nt, synthetic construct
  misc_feature 1..19: note = Description of Artificial Sequence: Synthetic oligonucleotide
  source 1..19: mol_type = other RNA
acaataaacactttcaaaa

SEQ ID NO: 2202 - RNA, 19 nt, synthetic construct
  misc_feature 1..19: note = Description of Artificial Sequence: Synthetic oligonucleotide
  source 1..19: mol_type = other RNA
caataaacactttcaaaat

SEQ ID NO: 2203 - RNA, 19 nt, synthetic construct
  misc_feature 1..19: note = Description of Artificial Sequence: Synthetic oligonucleotide
  source 1..19: mol_type = other RNA
aataaacactttcaaaatg

SEQ ID NO: 2204 - RNA, 19 nt, synthetic construct
  misc_feature 1..19: note = Description of Artificial Sequence: Synthetic oligonucleotide
  source 1..19: mol_type = other RNA
ataaacactttcaaaatgt

SEQ ID NO: 2205 - RNA, 19 nt, synthetic construct
  misc_feature 1..19: note = Description of Artificial Sequence: Synthetic oligonucleotide
  source 1..19: mol_type = other RNA
taaacactttcaaaatgtg

SEQ ID NO: 2206 - RNA, 19 nt, synthetic construct
  misc_feature 1..19: note = Description of Artificial Sequence: Synthetic oligonucleotide
  source 1..19: mol_type = other RNA
aaacactttcaaaatgtga

SEQ ID NO: 2207 - RNA, 19 nt, synthetic construct
  misc_feature 1..19: note = Description of Artificial Sequence: Synthetic oligonucleotide
  source 1..19: mol_type = other RNA
tagctttccttccaagccc

SEQ ID NO: 2208 - RNA, 19 nt, synthetic construct
  misc_feature 1..19: note = Description of Artificial Sequence: Synthetic oligonucleotide
  source 1..19: mol_type = other RNA
atagctttccttccaagcc

SEQ ID NO: 2209 - RNA, 19 nt, synthetic construct
  misc_feature 1..19: note = Description of Artificial Sequence: Synthetic oligonucleotide
  source 1..19: mol_type = other RNA
tatagctttccttccaagc

SEQ ID NO: 2210 - RNA, 19 nt, synthetic construct
  misc_feature 1..19: note = Description of Artificial Sequence: Synthetic oligonucleotide
  source 1..19: mol_type = other RNA
ctatagctttccttccaag

SEQ ID NO: 2211 - RNA, 19 nt, synthetic construct
  misc_feature 1..19: note = Description of Artificial Sequence: Synthetic oligonucleotide
  source 1..19: mol_type = other RNA
cctatagctttccttccaa

SEQ ID NO: 2212 - RNA, 19 nt, synthetic construct
  misc_feature 1..19: note = Description of Artificial Sequence: Synthetic oligonucleotide
  source 1..19: mol_type = other RNA
gcctatagctttccttcca

SEQ ID NO: 2213 - RNA, 19 nt, synthetic construct
  misc_feature 1..19: note = Description of Artificial Sequence: Synthetic oligonucleotide
  source 1..19: mol_type = other RNA
agcctatagctttccttcc

SEQ ID NO: 2214 - RNA, 19 nt, synthetic construct
  misc_feature 1..19: note = Description of Artificial Sequence: Synthetic oligonucleotide
  source 1..19: mol_type = other RNA
tagcctatagctttccttc

SEQ ID NO: 2215 - RNA, 19 nt, synthetic construct
  misc_feature 1..19: note = Description of Artificial Sequence: Synthetic oligonucleotide
  source 1..19: mol_type = other RNA
gtagcctatagctttcctt

SEQ ID NO: 2216 - RNA, 19 nt, synthetic construct
  misc_feature 1..19: note = Description of Artificial Sequence: Synthetic oligonucleotide
  source 1..19: mol_type = other RNA
ggtagcctatagctttcct

SEQ ID NO: 2217 - RNA, 19 nt, synthetic construct
  misc_feature 1..19: note = Description of Artificial Sequence: Synthetic oligonucleotide
  source 1..19: mol_type = other RNA
gggtagcctatagctttcc

SEQ ID NO: 2218 - RNA, 19 nt, synthetic construct
  misc_feature 1..19: note = Description of Artificial Sequence: Synthetic oligonucleotide
  source 1..19: mol_type = other RNA
tgggtagcctatagctttc

SEQ ID NO: 2219 - RNA, 19 nt, synthetic construct
  misc_feature 1..19: note = Description of Artificial Sequence: Synthetic oligonucleotide
  source 1..19: mol_type = other RNA
atgggtagcctatagcttt

SEQ ID NO: 2220 - RNA, 19 nt, synthetic construct
  misc_feature 1..19: note = Description of Artificial Sequence: Synthetic oligonucleotide
  source 1..19: mol_type = other RNA
aatgggtagcctatagctt

SEQ ID NO: 2221 - RNA, 19 nt, synthetic construct
  misc_feature 1..19: note = Description of Artificial Sequence: Synthetic oligonucleotide
  source 1..19: mol_type = other RNA
gaatgggtagcctatagct

SEQ ID NO: 2222 - RNA, 19 nt, synthetic construct
  misc_feature 1..19: note = Description of Artificial Sequence: Synthetic oligonucleotide
  source 1..19: mol_type = other RNA
tgaatgggtagcctatagc

SEQ ID NO: 2223 - RNA, 19 nt, synthetic construct
  misc_feature 1..19: note = Description of Artificial Sequence: Synthetic oligonucleotide
  source 1..19: mol_type = other RNA
ctgaatgggtagcctatag

SEQ ID NO: 2224 - RNA, 19 nt, synthetic construct
  misc_feature 1..19: note = Description of Artificial Sequence: Synthetic oligonucleotide
  source 1..19: mol_type = other RNA
gctgaatgggtagcctata

SEQ ID NO: 2225 - RNA, 19 nt, synthetic construct
  misc_feature 1..19: note = Description of Artificial Sequence: Synthetic oligonucleotide
  source 1..19: mol_type = other RNA
agctgaatgggtagcctat

SEQ ID NO: 2226 - RNA, 19 nt, synthetic construct
  misc_feature 1..19: note = Description of Artificial Sequence: Synthetic oligonucleotide
  source 1..19: mol_type = other RNA
gagctgaatgggtagccta

SEQ ID NO: 2227 - RNA, 19 nt, synthetic construct
  misc_feature 1..19: note = Description of Artificial Sequence: Synthetic oligonucleotide
  source 1..19: mol_type = other RNA
ggagctgaatgggtagcct

SEQ ID NO: 2228 - RNA, 19 nt, synthetic construct
  misc_feature 1..19: note = Description of Artificial Sequence: Synthetic oligonucleotide
  source 1..19: mol_type = other RNA
gggagctgaatgggtagcc

SEQ ID NO: 2229 - RNA, 19 nt, synthetic construct
  misc_feature 1..19: note = Description of Artificial Sequence: Synthetic oligonucleotide
  source 1..19: mol_type = other RNA
ggggagctgaatgggtagc

SEQ ID NO: 2230 - RNA, 19 nt, synthetic construct
  misc_feature 1..19: note = Description of Artificial Sequence: Synthetic oligonucleotide
  source 1..19: mol_type = other RNA
aggggagctgaatgggtag

SEQ ID NO: 2231 - RNA, 19 nt, synthetic construct
  misc_feature 1..19: note = Description of Artificial Sequence: Synthetic oligonucleotide
  source 1..19: mol_type = other RNA
caggggagctgaatgggta

SEQ ID NO: 2232 - RNA, 19 nt, synthetic construct
  misc_feature 1..19: note = Description of Artificial Sequence: Synthetic oligonucleotide
  source 1..19: mol_type = other RNA
acaggggagctgaatgggt

SEQ ID NO: 2233 - RNA, 19 nt, synthetic construct
  misc_feature 1..19: note = Description of Artificial Sequence: Synthetic oligonucleotide
  source 1..19: mol_type = other RNA
gacaggggagctgaatggg

SEQ ID NO: 2234 - RNA, 19 nt, synthetic construct
  misc_feature 1..19: note = Description of Artificial Sequence: Synthetic oligonucleotide
  source 1..19: mol_type = other RNA
tgacaggggagctgaatgg

SEQ ID NO: 2235 - RNA, 19 nt, synthetic construct
  misc_feature 1..19: note = Description of Artificial Sequence: Synthetic oligonucleotide
  source 1..19: mol_type = other RNA
ctgacaggggagctgaatg

SEQ ID NO: 2236 - RNA, 19 nt, synthetic construct
  misc_feature 1..19: note = Description of Artificial Sequence: Synthetic oligonucleotide
  source 1..19: mol_type = other RNA
tctgacaggggagctgaat

SEQ ID NO: 2237 - RNA, 19 nt, synthetic construct
  misc_feature 1..19: note = Description of Artificial Sequence: Synthetic oligonucleotide
  source 1..19: mol_type = other RNA
ctctgacaggggagctgaa

SEQ ID NO: 2238 - RNA, 19 nt, synthetic construct
  misc_feature 1..19: note = Description of Artificial Sequence: Synthetic oligonucleotide
  source 1..19: mol_type = other RNA
tctctgacaggggagctga

SEQ ID NO: 2239 - RNA, 19 nt, synthetic construct
  misc_feature 1..19: note = Description of Artificial Sequence: Synthetic oligonucleotide
  source 1..19: mol_type = other RNA
gtctctgacaggggagctg

SEQ ID NO: 2240 - RNA, 19 nt, synthetic construct
  misc_feature 1..19: note = Description of Artificial Sequence: Synthetic oligonucleotide
  source 1..19: mol_type = other RNA
agtctctgacaggggagct

SEQ ID NO: 2241 - RNA, 19 nt, synthetic construct
  misc_feature 1..19: note = Description of Artificial Sequence: Synthetic oligonucleotide
  source 1..19: mol_type = other RNA
gagtctctgacaggggagc

SEQ ID NO: 2242 - RNA, 19 nt, synthetic construct
  misc_feature 1..19: note = Description of Artificial Sequence: Synthetic oligonucleotide
  source 1..19: mol_type = other RNA
tgagtctctgacaggggag

SEQ ID NO: 2243 - RNA, 19 nt, synthetic construct
  misc_feature 1..19: note = Description of Artificial Sequence: Synthetic oligonucleotide
  source 1..19: mol_type = other RNA
ttgagtctctgacagggga

SEQ ID NO: 2244 - RNA, 19 nt, synthetic construct
  misc_feature 1..19: note = Description of Artificial Sequence: Synthetic oligonucleotide
  source 1..19: mol_type = other RNA
cttgagtctctgacagggg

SEQ ID NO: 2245 - RNA, 19 nt, synthetic construct
  misc_feature 1..19: note = Description of Artificial Sequence: Synthetic oligonucleotide
  source 1..19: mol_type = other RNA
gcttgagtctctgacaggg

SEQ ID NO: 2246 - RNA, 19 nt, synthetic construct
  misc_feature 1..19: note = Description of Artificial Sequence: Synthetic oligonucleotide
  source 1..19: mol_type = other RNA
agcttgagtctctgacagg

SEQ ID NO: 2247 - RNA, 19 nt, synthetic construct
  misc_feature 1..19: note = Description of Artificial Sequence: Synthetic oligonucleotide
  source 1..19: mol_type = other RNA
aagcttgagtctctgacag

SEQ ID NO: 2248 - RNA, 19 nt, synthetic construct
  misc_feature 1..19: note = Description of Artificial Sequence: Synthetic oligonucleotide
  source 1..19: mol_type = other RNA
aaagcttgagtctctgaca

SEQ ID NO: 2249 - RNA, 19 nt, synthetic construct
  misc_feature 1..19: note = Description of Artificial Sequence: Synthetic oligonucleotide
  source 1..19: mol_type = other RNA
caaagcttgagtctctgac

SEQ ID NO: 2250 - RNA, 19 nt, synthetic construct
  misc_feature 1..19: note = Description of Artificial Sequence: Synthetic oligonucleotide
  source 1..19: mol_type = other RNA
tcaaagcttgagtctctga

SEQ ID NO: 2251 - RNA, 19 nt, synthetic construct
  misc_feature 1..19: note = Description of Artificial Sequence: Synthetic oligonucleotide
  source 1..19: mol_type = other RNA
ctcaaagcttgagtctctg

SEQ ID NO: 2252 - RNA, 19 nt, synthetic construct
  misc_feature 1..19: note = Description of Artificial Sequence: Synthetic oligonucleotide
  source 1..19: mol_type = other RNA
tctcaaagcttgagtctct

SEQ ID NO: 2253 - RNA, 19 nt, synthetic construct
  misc_feature 1..19: note = Description of Artificial Sequence: Synthetic oligonucleotide
  source 1..19: mol_type = other RNA
ttctcaaagcttgagtctc

SEQ ID NO: 2254 - RNA, 19 nt, synthetic construct
  misc_feature 1..19: note = Description of Artificial Sequence: Synthetic oligonucleotide
  source 1..19: mol_type = other RNA
tttctcaaagcttgagtct

SEQ ID NO: 2255 - RNA, 19 nt, synthetic construct
  misc_feature 1..19: note = Description of Artificial Sequence: Synthetic oligonucleotide
  source 1..19: mol_type = other RNA
ctttctcaaagcttgagtc

SEQ ID NO: 2256 - RNA, 19 nt, synthetic construct
  misc_feature 1..19: note = Description of Artificial Sequence: Synthetic oligonucleotide
  source 1..19: mol_type = other RNA
cctttctcaaagcttgagt

SEQ ID NO: 2257 - RNA, 19 nt, synthetic construct
  misc_feature 1..19: note = Description of Artificial Sequence: Synthetic oligonucleotide
  source 1..19: mol_type = other RNA
gcctttctcaaagcttgag

SEQ ID NO: 2258 - RNA, 19 nt, synthetic construct
  misc_feature 1..19: note = Description of Artificial Sequence: Synthetic oligonucleotide
  source 1..19: mol_type = other RNA
agcctttctcaaagcttga

SEQ ID NO: 2259 - RNA, 19 nt, synthetic construct
  misc_feature 1..19: note = Description of Artificial Sequence: Synthetic oligonucleotide
  source 1..19: mol_type = other RNA
tagcctttctcaaagcttg

SEQ ID NO: 2260 - RNA, 19 nt, synthetic construct
  misc_feature 1..19: note = Description of Artificial Sequence: Synthetic oligonucleotide
  source 1..19: mol_type = other RNA
ctagcctttctcaaagctt

SEQ ID NO: 2261 - RNA, 19 nt, synthetic construct
  misc_feature 1..19: note = Description of Artificial Sequence: Synthetic oligonucleotide
  source 1..19: mol_type = other RNA
gctagcctttctcaaagct

SEQ ID NO: 2262 - RNA, 19 nt, synthetic construct
  misc_feature 1..19: note = Description of Artificial Sequence: Synthetic oligonucleotide
  source 1..19: mol_type = other RNA
tgctagcctttctcaaagc

SEQ ID NO: 2263 - RNA, 19 nt, synthetic construct
  misc_feature 1..19: note = Description of Artificial Sequence: Synthetic oligonucleotide
  source 1..19: mol_type = other RNA
ttgctagcctttctcaaag

SEQ ID NO: 2264 - RNA, 19 nt, synthetic construct
  misc_feature 1..19: note = Description of Artificial Sequence: Synthetic oligonucleotide
  source 1..19: mol_type = other RNA
tttgctagcctttctcaaa

SEQ ID NO: 2265 - RNA, 19 nt, synthetic construct
  misc_feature 1..19: note = Description of Artificial Sequence: Synthetic oligonucleotide
  source 1..19: mol_type = other RNA
ctttgctagcctttctcaa

SEQ ID NO: 2266 - RNA, 19 nt, synthetic construct
  misc_feature 1..19: note = Description of Artificial Sequence: Synthetic oligonucleotide
  source 1..19: mol_type = other RNA
tctttgctagcctttctca

SEQ ID NO: 2267 - RNA, 19 nt, synthetic construct
  misc_feature 1..19: note = Description of Artificial Sequence: Synthetic oligonucleotide
  source 1..19: mol_type = other RNA
ctctttgctagcctttctc

SEQ ID NO: 2268 - RNA, 19 nt, synthetic construct
  misc_feature 1..19: note = Description of Artificial Sequence: Synthetic oligonucleotide
  source 1..19: mol_type = other RNA
gctctttgctagcctttct

SEQ ID NO: 2269 - RNA, 19 nt, synthetic construct
  misc_feature 1..19: note = Description of Artificial Sequence: Synthetic oligonucleotide
  source 1..19: mol_type = other RNA
tgctctttgctagcctttc

SEQ ID NO: 2270 - RNA, 19 nt, synthetic construct
  misc_feature 1..19: note = Description of Artificial Sequence: Synthetic oligonucleotide
  source 1..19: mol_type = other RNA
ttgctctttgctagccttt

SEQ ID NO: 2271 - RNA, 19 nt, synthetic construct
  misc_feature 1..19: note = Description of Artificial Sequence: Synthetic oligonucleotide
  source 1..19: mol_type = other RNA
cttgctctttgctagcctt

SEQ ID NO: 2272 - RNA, 19 nt, synthetic construct
  misc_feature 1..19: note = Description of Artificial Sequence: Synthetic oligonucleotide
  source 1..19: mol_type = other RNA
ccttgctctttgctagcct

SEQ ID NO: 2273 - RNA, 19 nt, synthetic construct
  misc_feature 1..19: note = Description of Artificial Sequence: Synthetic oligonucleotide
  source 1..19: mol_type = other RNA
tccttgctctttgctagcc

SEQ ID NO: 2274 - RNA, 19 nt, synthetic construct
  misc_feature 1..19: note = Description of Artificial Sequence: Synthetic oligonucleotide
  source 1..19: mol_type = other RNA
ttccttgctctttgctagc

SEQ ID NO: 2275 - RNA, 19 nt, synthetic construct
  misc_feature 1..19: note = Description of Artificial Sequence: Synthetic oligonucleotide
  source 1..19: mol_type = other RNA
tttccttgctctttgctag

SEQ ID NO: 2276 - RNA, 19 nt, synthetic construct
  misc_feature 1..19: note = Description of Artificial Sequence: Synthetic oligonucleotide
  source 1..19: mol_type = other RNA
ctttccttgctctttgcta

SEQ ID NO: 2277 - RNA, 19 nt, synthetic construct
  misc_feature 1..19: note = Description of Artificial Sequence: Synthetic oligonucleotide
  source 1..19: mol_type = other RNA
tctttccttgctctttgct

SEQ ID NO: 2278 - RNA, 19 nt, synthetic construct
  misc_feature 1..19: note = Description of Artificial Sequence: Synthetic oligonucleotide
  source 1..19: mol_type = other RNA
ctctttccttgctctttgc

SEQ ID NO: 2279 - RNA, 19 nt, synthetic construct
  misc_feature 1..19: note = Description of Artificial Sequence: Synthetic oligonucleotide
  source 1..19: mol_type = other RNA
tctctttccttgctctttg

SEQ ID NO: 2280 - RNA, 19 nt, synthetic construct
  misc_feature 1..19: note = Description of Artificial Sequence: Synthetic oligonucleotide
  source 1..19: mol_type = other RNA
ctctctttccttgctcttt

SEQ ID NO: 2281 - RNA, 19 nt, synthetic construct
  misc_feature 1..19: note = Description of Artificial Sequence: Synthetic oligonucleotide
  source 1..19: mol_type = other RNA
tctctctttccttgctctt

SEQ ID NO: 2282 - RNA, 19 nt, synthetic construct
  misc_feature 1..19: note = Description of Artificial Sequence: Synthetic oligonucleotide
  source 1..19: mol_type = other RNA
ttctctctttccttgctct

SEQ ID NO: 2283 - RNA, 19 nt, synthetic construct
  misc_feature 1..19: note = Description of Artificial Sequence: Synthetic oligonucleotide
  source 1..19: mol_type = other RNA
tttctctctttccttgctc

SEQ ID NO: 2284 - RNA, 19 nt, synthetic construct
  misc_feature 1..19: note = Description of Artificial Sequence: Synthetic oligonucleotide
  source 1..19: mol_type = other RNA
ttttctctctttccttgct

SEQ ID NO: 2285 - RNA, 19 nt, synthetic construct
  misc_feature 1..19: note = Description of Artificial Sequence: Synthetic oligonucleotide
  source 1..19: mol_type = other RNA
gttttctctctttccttgc

SEQ ID NO: 2286 - RNA, 19 nt, synthetic construct
  misc_feature 1..19: note = Description of Artificial Sequence: Synthetic oligonucleotide
  source 1..19: mol_type = other RNA
tgttttctctctttccttg

SEQ ID NO: 2287 - RNA, 19 nt, synthetic construct
  misc_feature 1..19: note = Description of Artificial Sequence: Synthetic oligonucleotide
  source 1..19: mol_type = other RNA
ttgttttctctctttcctt

SEQ ID NO: 2288 - RNA, 19 nt, synthetic construct
  misc_feature 1..19: note = Description of Artificial Sequence: Synthetic oligonucleotide
  source 1..19: mol_type = other RNA
gttgttttctctctttcct

SEQ ID NO: 2289 - RNA, 19 nt, synthetic construct
  misc_feature 1..19: note = Description of Artificial Sequence: Synthetic oligonucleotide
  source 1..19: mol_type = other RNA
tgttgttttctctctttcc

SEQ ID NO: 2290 - RNA, 19 nt, synthetic construct
  misc_feature 1..19: note = Description of Artificial Sequence: Synthetic oligonucleotide
  source 1..19: mol_type = other RNA
ttgttgttttctctctttc

SEQ ID NO: 2291 - RNA, 19 nt, synthetic construct
  misc_feature 1..19: note = Description of Artificial Sequence: Synthetic oligonucleotide
  source 1..19: mol_type = other RNA
tttgttgttttctctcttt

SEQ ID NO: 2292 - RNA, 19 nt, synthetic construct
  misc_feature 1..19: note = Description of Artificial Sequence: Synthetic oligonucleotide
  source 1..19: mol_type = other RNA
ctttgttgttttctctctt

SEQ ID NO: 2293 - RNA, 19 nt, synthetic construct
  misc_feature 1..19: note = Description of Artificial Sequence: Synthetic oligonucleotide
  source 1..19: mol_type = other RNA
actttgttgttttctctct

SEQ ID NO: 2294 - RNA, 19 nt, synthetic construct
  misc_feature 1..19: note = Description of Artificial Sequence: Synthetic oligonucleotide
  source 1..19: mol_type = other RNA
cactttgttgttttctctc

SEQ ID NO: 2295 - RNA, 19 nt, synthetic construct
  misc_feature 1..19: note = Description of Artificial Sequence: Synthetic oligonucleotide
  source 1..19: mol_type = other RNA
ccactttgttgttttctct

SEQ ID NO: 2296 - RNA, 19 nt, synthetic construct
  misc_feature 1..19: note = Description of Artificial Sequence: Synthetic oligonucleotide
  source 1..19: mol_type = other RNA
gccactttgttgttttctc

SEQ ID NO: 2297 - RNA, 19 nt, synthetic construct
  misc_feature 1..19: note = Description of Artificial Sequence: Synthetic oligonucleotide
  source 1..19: mol_type = other RNA
cgccactttgttgttttct

SEQ ID NO: 2298 - RNA, 19 nt, synthetic construct
  misc_feature 1..19: note = Description of Artificial Sequence: Synthetic oligonucleotide
  source 1..19: mol_type = other RNA
tcgccactttgttgttttc

SEQ ID NO: 2299 - RNA, 19 nt, synthetic construct
  misc_feature 1..19: note = Description of Artificial Sequence: Synthetic oligonucleotide
  source 1..19: mol_type = other RNA
ctcgccactttgttgtttt

SEQ ID NO: 2300 - RNA, 19 nt, synthetic construct
  misc_feature 1..19: note = Description of Artificial Sequence: Synthetic oligonucleotide
  source 1..19: mol_type = other RNA
cctcgccactttgttgttt

SEQ ID NO: 2301 - RNA, 19 nt, synthetic construct
  misc_feature 1..19: note = Description of Artificial Sequence: Synthetic oligonucleotide
  source 1..19: mol_type = other RNA
gcctcgccactttgttgtt

SEQ ID NO: 2302 - RNA, 19 nt, synthetic construct
  misc_feature 1..19: note = Description of Artificial Sequence: Synthetic oligonucleotide
  source 1..19: mol_type = other RNA
ggcctcgccactttgttgt

SEQ ID NO: 2303 - RNA, 19 nt, synthetic construct
  misc_feature 1..19: note = Description of Artificial Sequence: Synthetic oligonucleotide
  source 1..19: mol_type = other RNA
gggcctcgccactttgttg

SEQ ID NO: 2304 - RNA, 19 nt, synthetic construct
  misc_feature 1..19: note = Description of Artificial Sequence: Synthetic oligonucleotide
  source 1..19: mol_type = other RNA
agggcctcgccactttgtt

SEQ ID NO: 2305 - RNA, 19 nt, synthetic construct
  misc_feature 1..19: note = Description of Artificial Sequence: Synthetic oligonucleotide
  source 1..19: mol_type = other RNA
gagggcctcgccactttgt

SEQ ID NO: 2306 - RNA, 19 nt, synthetic construct
  misc_feature 1..19: note = Description of Artificial Sequence: Synthetic oligonucleotide
  source 1..19: mol_type = other RNA
tgagggcctcgccactttg

SEQ ID NO: 2307 - RNA, 19 nt, synthetic construct
  misc_feature 1..19: note = Description of Artificial Sequence: Synthetic oligonucleotide
  source 1..19: mol_type = other RNA
ctgagggcctcgccacttt

SEQ ID NO: 2308 - RNA, 19 nt, synthetic construct
  misc_feature 1..19: note = Description of Artificial Sequence: Synthetic oligonucleotide
  source 1..19: mol_type = other RNA
tctgagggcctcgccactt

SEQ ID NO: 2309 - RNA, 19 nt, synthetic construct
  misc_feature 1..19: note = Description of Artificial Sequence: Synthetic oligonucleotide
  source 1..19: mol_type = other RNA
ctctgagggcctcgccact

SEQ ID NO: 2310 - RNA, 19 nt, synthetic construct
  misc_feature 1..19: note = Description of Artificial Sequence: Synthetic oligonucleotide
  source 1..19: mol_type = other RNA
actctgagggcctcgccac

SEQ ID NO: 2311 - RNA, 19 nt, synthetic construct
  misc_feature 1..19: note = Description of Artificial Sequence: Synthetic oligonucleotide
  source 1..19: mol_type = other RNA
cactctgagggcctcgcca

SEQ ID NO: 2312 - RNA, 19 nt, synthetic construct
  misc_feature 1..19: note = Description of Artificial Sequence: Synthetic oligonucleotide
  source 1..19: mol_type = other RNA
tcactctgagggcctcgcc

SEQ ID NO: 2313 - RNA, 19 nt, synthetic construct
  misc_feature 1..19: note = Description of Artificial Sequence: Synthetic oligonucleotide
  source 1..19: mol_type = other RNA
ttcactctgagggcctcgc

SEQ ID NO: 2314 - RNA, 19 nt, synthetic construct
  misc_feature 1..19: note = Description of Artificial Sequence: Synthetic oligonucleotide
  source 1..19: mol_type = other RNA
tttcactctgagggcctcg

SEQ ID NO: 2315 - RNA, 19 nt, synthetic construct
  misc_feature 1..19: note = Description of Artificial Sequence: Synthetic oligonucleotide
  source 1..19: mol_type = other RNA
ctttcactctgagggcctc

SEQ ID NO: 2316 - RNA, 19 nt, synthetic construct
  misc_feature 1..19: note = Description of Artificial Sequence: Synthetic oligonucleotide
  source 1..19: mol_type = other RNA
gctttcactctgagggcct

SEQ ID NO: 2317 - RNA, 19 nt, synthetic construct
  misc_feature 1..19: note = Description of Artificial Sequence: Synthetic oligonucleotide
  source 1..19: mol_type = other RNA
cgctttcactctgagggcc

SEQ ID NO: 2318 - RNA, 19 nt, synthetic construct
  misc_feature 1..19: note = Description of Artificial Sequence: Synthetic oligonucleotide
  source 1..19: mol_type = other RNA
acgctttcactctgagggc

SEQ ID NO: 2319 - RNA, 19 nt, synthetic construct
  misc_feature 1..19: note = Description of Artificial Sequence: Synthetic oligonucleotide
  source 1..19: mol_type = other RNA
tacgctttcactctgaggg

SEQ ID NO: 2320 - RNA, 19 nt, synthetic construct
  misc_feature 1..19: note = Description of Artificial Sequence: Synthetic oligonucleotide
  source 1..19: mol_type = other RNA
ttacgctttcactctgagg

SEQ ID NO: 2321 - RNA, 19 nt, synthetic construct
  misc_feature 1..19: note = Description of Artificial Sequence: Synthetic oligonucleotide
  source 1..19: mol_type = other RNA
cttacgctttcactctgag

SEQ ID NO: 2322 - RNA, 19 nt, synthetic construct
  misc_feature 1..19: note = Description of Artificial Sequence: Synthetic oligonucleotide
  source 1..19: mol_type = other RNA
ccttacgctttcactctga

SEQ ID NO: 2323 - RNA, 19 nt, synthetic construct
  misc_feature 1..19: note = Description of Artificial Sequence: Synthetic oligonucleotide
  source 1..19: mol_type = other RNA
accttacgctttcactctg

SEQ ID NO: 2324 - RNA, 19 nt, synthetic construct
  misc_feature 1..19: note = Description of Artificial Sequence: Synthetic oligonucleotide
  source 1..19: mol_type = other RNA
aaccttacgctttcactct

SEQ ID NO: 2325 - RNA, 19 nt, synthetic construct
  misc_feature 1..19: note = Description of Artificial Sequence: Synthetic oligonucleotide
  source 1..19: mol_type = other RNA
gaaccttacgctttcactc

SEQ ID NO: 2326 - RNA, 19 nt, synthetic construct
  misc_feature 1..19: note = Description of Artificial Sequence: Synthetic oligonucleotide
  source 1..19: mol_type = other RNA
tgaaccttacgctttcact

SEQ ID NO: 2327 - RNA, 19 nt, synthetic construct
  misc_feature 1..19: note = Description of Artificial Sequence: Synthetic oligonucleotide
  source 1..19: mol_type = other RNA
ctgaaccttacgctttcac

SEQ ID NO: 2328 - RNA, 19 nt, synthetic construct
  misc_feature 1..19: note = Description of Artificial Sequence: Synthetic oligonucleotide
  source 1..19: mol_type = other RNA
actgaaccttacgctttca

SEQ ID NO: 2329 - RNA, 19 nt, synthetic construct
  misc_feature 1..19: note = Description of Artificial Sequence: Synthetic oligonucleotide
  source 1..19: mol_type = other RNA
gactgaaccttacgctttc

SEQ ID NO: 2330 - RNA, 19 nt, synthetic construct
  misc_feature 1..19: note = Description of Artificial Sequence: Synthetic oligonucleotide
  source 1..19: mol_type = other RNA
tgactgaaccttacgcttt

SEQ ID NO: 2331 - RNA, 19 nt, synthetic construct
  misc_feature 1..19: note = Description of Artificial Sequence: Synthetic oligonucleotide
  source 1..19: mol_type = other RNA
ctgactgaaccttacgctt

SEQ ID NO: 2332 - RNA, 19 nt, synthetic construct
  misc_feature 1..19: note = Description of Artificial Sequence: Synthetic oligonucleotide
  source 1..19: mol_type = other RNA
gctgactgaaccttacgct

SEQ ID NO: 2333 - RNA, 19 nt, synthetic construct
  misc_feature 1..19: note = Description of Artificial Sequence: Synthetic oligonucleotide
  source 1..19: mol_type = other RNA
ggctgactgaaccttacgc

SEQ ID NO: 2334 - RNA, 19 nt, synthetic construct
  misc_feature 1..19: note = Description of Artificial Sequence: Synthetic oligonucleotide
  source 1..19: mol_type = other RNA
aggctgactgaaccttacg

SEQ ID NO: 2335 - RNA, 19 nt, synthetic construct
  misc_feature 1..19: note = Description of Artificial Sequence: Synthetic oligonucleotide
  source 1..19: mol_type = other RNA
caggctgactgaaccttac

SEQ ID NO: 2336 - RNA, 19 nt, synthetic construct
  misc_feature 1..19: note = Description of Artificial Sequence: Synthetic oligonucleotide
  source 1..19: mol_type = other RNA
gcaggctgactgaacctta

SEQ ID NO: 2337 - RNA, 19 nt, synthetic construct
  misc_feature 1..19: note = Description of Artificial Sequence: Synthetic oligonucleotide
  source 1..19: mol_type = other RNA
agcaggctgactgaacctt

SEQ ID NO: 2338 - RNA, 19 nt, synthetic construct
  misc_feature 1..19: note = Description of Artificial Sequence: Synthetic oligonucleotide
  source 1..19: mol_type = other RNA
cagcaggctgactgaacct

SEQ ID NO: 2339 - RNA, 19 nt, synthetic construct
  misc_feature 1..19: note = Description of Artificial Sequence: Synthetic oligonucleotide
  source 1..19: mol_type = other RNA
gcagcaggctgactgaacc

SEQ ID NO: 2340 - RNA, 19 nt, synthetic construct
  misc_feature 1..19: note = Description of Artificial Sequence: Synthetic oligonucleotide
  source 1..19: mol_type = other RNA
tgcagcaggctgactgaac

SEQ ID NO: 2341 - RNA, 19 nt, synthetic construct
  misc_feature 1..19: note = Description of Artificial Sequence: Synthetic oligonucleotide
  source 1..19: mol_type = other RNA
ctgcagcaggctgactgaa

SEQ ID NO: 2342 - RNA, 19 nt, synthetic construct
  misc_feature 1..19: note = Description of Artificial Sequence: Synthetic oligonucleotide
  source 1..19: mol_type = other RNA
gctgcagcaggctgactga

SEQ ID NO: 2343 - RNA, 19 nt, synthetic construct
  misc_feature 1..19: note = Description of Artificial Sequence: Synthetic oligonucleotide
  source 1..19: mol_type = other RNA
agctgcagcaggctgactg

SEQ ID NO: 2344 - RNA, 19 nt, synthetic construct
  misc_feature 1..19: note = Description of Artificial Sequence: Synthetic oligonucleotide
  source 1..19: mol_type = other RNA
aagctgcagcaggctgact

SEQ ID NO: 2345 - RNA, 19 nt, synthetic construct
  misc_feature 1..19: note = Description of Artificial Sequence: Synthetic oligonucleotide
  source 1..19: mol_type = other RNA
aaagctgcagcaggctgac

SEQ ID NO: 2346 - RNA, 19 nt, synthetic construct
  misc_feature 1..19: note = Description of Artificial Sequence: Synthetic oligonucleotide
  source 1..19: mol_type = other RNA
caaagctgcagcaggctga

SEQ ID NO: 2347 - RNA, 19 nt, synthetic construct
  misc_feature 1..19: note = Description of Artificial Sequence: Synthetic oligonucleotide
  source 1..19: mol_type = other RNA
gcaaagctgcagcaggctg

SEQ ID NO: 2348 - RNA, 19 nt, synthetic construct
  misc_feature 1..19: note = Description of Artificial Sequence: Synthetic oligonucleotide
  source 1..19: mol_type = other RNA
tgcaaagctgcagcaggct

SEQ ID NO: 2349 - RNA, 19 nt, synthetic construct
  misc_feature 1..19: note = Description of Artificial Sequence: Synthetic oligonucleotide
  source 1..19: mol_type = other RNA
ctgcaaagctgcagcaggc

SEQ ID NO: 2350 - RNA, 19 nt, synthetic construct
  misc_feature 1..19: note = Description of Artificial Sequence: Synthetic oligonucleotide
  source 1..19: mol_type = other RNA
tctgcaaagctgcagcagg

SEQ ID NO: 2351 - RNA, 19 nt, synthetic construct
  misc_feature 1..19: note = Description of Artificial Sequence: Synthetic oligonucleotide
  source 1..19: mol_type = other RNA
gtctgcaaagctgcagcag

SEQ ID NO: 2352 - RNA, 19 nt, synthetic construct
  misc_feature 1..19: note = Description of Artificial Sequence: Synthetic oligonucleotide
  source 1..19: mol_type = other RNA
ggtctgcaaagctgcagca

SEQ ID NO: 2353 - RNA, 19 nt, synthetic construct
  misc_feature 1..19: note = Description of Artificial Sequence: Synthetic oligonucleotide
  source 1..19: mol_type = other RNA
aggtctgcaaagctgcagc

SEQ ID NO: 2354 - RNA, 19 nt, synthetic construct
  misc_feature 1..19: note = Description of Artificial Sequence: Synthetic oligonucleotide
  source 1..19: mol_type = other RNA
gaggtctgcaaagctgcag

SEQ ID NO: 2355 - RNA, 19 nt, synthetic construct
  misc_feature 1..19: note = Description of Artificial Sequence: Synthetic oligonucleotide
  source 1..19: mol_type = other RNA
tgaggtctgcaaagctgca

SEQ ID NO: 2356 - RNA, 19 nt, synthetic construct
  misc_feature 1..19: note = Description of Artificial Sequence: Synthetic oligonucleotide
  source 1..19: mol_type = other RNA
ctgaggtctgcaaagctgc

SEQ ID NO: 2357 - RNA, 19 nt, synthetic construct
  misc_feature 1..19: note = Description of Artificial Sequence: Synthetic oligonucleotide
  source 1..19: mol_type = other RNA
gctgaggtctgcaaagctg

SEQ ID NO: 2358 - RNA, 19 nt, synthetic construct
  misc_feature 1..19: note = Description of Artificial Sequence: Synthetic oligonucleotide
  source 1..19: mol_type = other RNA
agctgaggtctgcaaagct

SEQ ID NO: 2359 - RNA, 19 nt, synthetic construct
  misc_feature 1..19: note = Description of Artificial Sequence: Synthetic oligonucleotide
  source 1..19: mol_type = other RNA
cagctgaggtctgcaaagc

SEQ ID NO: 2360 - RNA, 19 nt, synthetic construct
  misc_feature 1..19: note = Description of Artificial Sequence: Synthetic oligonucleotide
  source 1..19: mol_type = other RNA
ccagctgaggtctgcaaag

SEQ ID NO: 2361 - RNA, 19 nt, synthetic construct
  misc_feature 1..19: note = Description of Artificial Sequence: Synthetic oligonucleotide
  source 1..19: mol_type = other RNA
cccagctgaggtctgcaaa

SEQ ID NO: 2362 - RNA, 19 nt, synthetic construct
  misc_feature 1..19: note = Description of Artificial Sequence: Synthetic oligonucleotide
  source 1..19: mol_type = other RNA
gcccagctgaggtctgcaa

SEQ ID NO: 2363 - RNA, 19 nt, synthetic construct
  misc_feature 1..19: note = Description of Artificial Sequence: Synthetic oligonucleotide
  source 1..19: mol_type = other RNA
tgcccagctgaggtctgca

SEQ ID NO: 2364 - RNA, 19 nt, synthetic construct
  misc_feature 1..19: note = Description of Artificial Sequence: Synthetic oligonucleotide
  source 1..19: mol_type = other RNA
atgcccagctgaggtctgc

SEQ ID NO: 2365 - RNA, 19 nt, synthetic construct
  misc_feature 1..19: note = Description of Artificial Sequence: Synthetic oligonucleotide
  source 1..19: mol_type = other RNA
gatgcccagctgaggtctg

SEQ ID NO: 2366 - RNA, 19 nt, synthetic construct
  misc_feature 1..19: note = Description of Artificial Sequence: Synthetic oligonucleotide
  source 1..19: mol_type = other RNA
agatgcccagctgaggtct

SEQ ID NO: 2367 - RNA, 19 nt, synthetic construct
  misc_feature 1..19: note = Description of Artificial Sequence: Synthetic oligonucleotide
  source 1..19: mol_type = other RNA
gagatgcccagctgaggtc

SEQ ID NO: 2368 - RNA, 19 nt, synthetic construct
  misc_feature 1..19: note = Description of Artificial Sequence: Synthetic oligonucleotide
  source 1..19: mol_type = other RNA
ggagatgcccagctgaggt

SEQ ID NO: 2369 - RNA, 19 nt, synthetic construct
  misc_feature 1..19: note = Description of Artificial Sequence: Synthetic oligonucleotide
  source 1..19: mol_type = other RNA
tggagatgcccagctgagg

SEQ ID NO: 2370 - RNA, 19 nt, synthetic construct
  misc_feature 1..19: note = Description of Artificial Sequence: Synthetic oligonucleotide
  source 1..19: mol_type = other RNA
ctggagatgcccagctgag

SEQ ID NO: 2371 - RNA, 19 nt, synthetic construct
  misc_feature 1..19: note = Description of Artificial Sequence: Synthetic oligonucleotide
  source 1..19: mol_type = other RNA
tctggagatgcccagctga

SEQ ID NO: 2372 - RNA, 19 nt, synthetic construct
  misc_feature 1..19: note = Description of Artificial Sequence: Synthetic oligonucleotide
  source 1..19: mol_type = other RNA
gtctggagatgcccagctg

SEQ ID NO: 2373 - RNA, 19 nt, synthetic construct
  misc_feature 1..19: note = Description of Artificial Sequence: Synthetic oligonucleotide
  source 1..19: mol_type = other RNA
agtctggagatgcccagct

SEQ ID NO: 2374 - RNA, 19 nt, synthetic construct
  misc_feature 1..19: note = Description of Artificial Sequence: Synthetic oligonucleotide
  source 1..19: mol_type = other RNA
gagtctggagatgcccagc

SEQ ID NO: 2375 - RNA, 19 nt, synthetic construct
  misc_feature 1..19: note = Description of Artificial Sequence: Synthetic oligonucleotide
  source 1..19: mol_type = other RNA
ggagtctggagatgcccag

SEQ ID NO: 2376 - RNA, 19 nt, synthetic construct
  misc_feature 1..19: note = Description of Artificial Sequence: Synthetic oligonucleotide
  source 1..19: mol_type = other RNA
gggagtctggagatgccca

SEQ ID NO: 2377 - RNA, 19 nt, synthetic construct
  misc_feature 1..19: note = Description of Artificial Sequence: Synthetic oligonucleotide
  source 1..19: mol_type = other RNA
ggggagtctggagatgccc

SEQ ID NO: 2378 - RNA, 19 nt, synthetic construct
  misc_feature 1..19: note = Description of Artificial Sequence: Synthetic oligonucleotide
  source 1..19: mol_type = other RNA
aggggagtctggagatgcc

SEQ ID NO: 2379 - RNA, 19 nt, synthetic construct
  misc_feature 1..19: note = Description of Artificial Sequence: Synthetic oligonucleotide
  source 1..19: mol_type = other RNA
caggggagtctggagatgc

SEQ ID NO: 2380 - RNA, 19 nt, synthetic construct
  misc_feature 1..19: note = Description of Artificial Sequence: Synthetic oligonucleotide
  source 1..19: mol_type = other RNA
tcaggggagtctggagatg

SEQ ID NO: 2381 - RNA, 19 nt, synthetic construct
  misc_feature 1..19: note = Description of Artificial Sequence: Synthetic oligonucleotide
  source 1..19: mol_type = other RNA
ttcaggggagtctggagat

SEQ ID NO: 2382 - RNA, 19 nt, synthetic construct
  misc_feature 1..19: note = Description of Artificial Sequence: Synthetic oligonucleotide
  source 1..19: mol_type = other RNA
cttcaggggagtctggaga

SEQ ID NO: 2383 - RNA, 19 nt, synthetic construct
  misc_feature 1..19: note = Description of Artificial Sequence: Synthetic oligonucleotide
  source 1..19: mol_type = other RNA
ccttcaggggagtctggag

SEQ ID NO: 2384 - RNA, 19 nt, synthetic construct
  misc_feature 1..19: note = Description of Artificial Sequence: Synthetic oligonucleotide
  source 1..19: mol_type = other RNA
tccttcaggggagtctgga

SEQ ID NO: 2385 - RNA, 19 nt, synthetic construct
  misc_feature 1..19: note = Description of Artificial Sequence: Synthetic oligonucleotide
  source 1..19: mol_type = other RNA
ttccttcaggggagtctgg

SEQ ID NO: 2386 - RNA, 19 nt, synthetic construct
  misc_feature 1..19: note = Description of Artificial Sequence: Synthetic oligonucleotide
  source 1..19: mol_type = other RNA
cttccttcaggggagtctg

SEQ ID NO: 2387 - RNA, 19 nt, synthetic construct
  misc_feature 1..19: note = Description of Artificial Sequence: Synthetic oligonucleotide
  source 1..19: mol_type = other RNA
tcttccttcaggggagtct

SEQ ID NO: 2388 - RNA, 19 nt, synthetic construct
  misc_feature 1..19: note = Description of Artificial Sequence: Synthetic oligonucleotide
  source 1..19: mol_type = other RNA
ctcttccttcaggggagtc

SEQ ID NO: 2389 - RNA, 19 nt, synthetic construct
  misc_feature 1..19: note = Description of Artificial Sequence: Synthetic oligonucleotide
  source 1..19: mol_type = other RNA
gctcttccttcaggggagt

SEQ ID NO: 2390 - RNA, 19 nt, synthetic construct
  misc_feature 1..19: note = Description of Artificial Sequence: Synthetic oligonucleotide
  source 1..19: mol_type = other RNA
ggctcttccttcaggggag

SEQ ID NO: 2391 - RNA, 19 nt, synthetic construct
  misc_feature 1..19: note = Description of Artificial Sequence: Synthetic oligonucleotide
  source 1..19: mol_type = other RNA
aggctcttccttcagggga

SEQ ID NO: 2392 - RNA, 19 nt, synthetic construct
  misc_feature 1..19: note = Description of Artificial Sequence: Synthetic oligonucleotide
  source 1..19: mol_type = other RNA
aaggctcttccttcagggg

SEQ ID NO: 2393 - RNA, 19 nt, synthetic construct
  misc_feature 1..19: note = Description of Artificial Sequence: Synthetic oligonucleotide
  source 1..19: mol_type = other RNA
gaaggctcttccttcaggg

SEQ ID NO: 2394 - RNA, 19 nt, synthetic construct
  misc_feature 1..19: note = Description of Artificial Sequence: Synthetic oligonucleotide
  source 1..19: mol_type = other RNA
ggaaggctcttccttcagg

SEQ ID NO: 2395 - RNA, 19 nt, synthetic construct
  misc_feature 1..19: note = Description of Artificial Sequence: Synthetic oligonucleotide
  source 1..19: mol_type = other RNA
aggaaggctcttccttcag

SEQ ID NO: 2396 - RNA, 19 nt, synthetic construct
  misc_feature 1..19: note = Description of Artificial Sequence: Synthetic oligonucleotide
  source 1..19: mol_type = other RNA
gaggaaggctcttccttca

SEQ ID NO: 2397 - RNA, 19 nt, synthetic construct
  misc_feature 1..19: note = Description of Artificial Sequence: Synthetic oligonucleotide
  source 1..19: mol_type = other RNA
tgaggaaggctcttccttc

SEQ ID NO: 2398 - RNA, 19 nt, synthetic construct
  misc_feature 1..19: note = Description of Artificial Sequence: Synthetic oligonucleotide
  source 1..19: mol_type = other RNA
gtgaggaaggctcttcctt

SEQ ID NO: 2399 - RNA, 19 nt, synthetic construct
  misc_feature 1..19: note = Description of Artificial Sequence: Synthetic oligonucleotide
  source 1..19: mol_type = other RNA
ggtgaggaaggctcttcct

SEQ ID NO: 2400 - RNA, 19 nt, synthetic construct
  misc_feature 1..19: note = Description of Artificial Sequence: Synthetic oligonucleotide
  source 1..19: mol_type = other RNA
gggtgaggaaggctcttcc

SEQ ID NO: 2401 - RNA, 19 nt, synthetic construct
  misc_feature 1..19: note = Description of Artificial Sequence: Synthetic oligonucleotide
  source 1..19: mol_type = other RNA
tgggtgaggaaggctcttc

SEQ ID NO: 2402 - RNA, 19 nt, synthetic construct
  misc_feature 1..19: note = Description of Artificial Sequence: Synthetic oligonucleotide
  source 1..19: mol_type = other RNA
ttgggtgaggaaggctctt

SEQ ID NO: 2403 - RNA, 19 nt, synthetic construct
  misc_feature 1..19: note = Description of Artificial Sequence: Synthetic oligonucleotide
  source 1..19: mol_type = other RNA
tttgggtgaggaaggctct

SEQ ID NO: 2404 - RNA, 19 nt, synthetic construct
  misc_feature 1..19: note = Description of Artificial Sequence: Synthetic oligonucleotide
  source 1..19: mol_type = other RNA
gtttgggtgaggaaggctc

SEQ ID NO: 2405 - RNA, 19 nt, synthetic construct
  misc_feature 1..19: note = Description of Artificial Sequence: Synthetic oligonucleotide
  source 1..19: mol_type = other RNA
ggtttgggtgaggaaggct

SEQ ID NO: 2406 - RNA, 19 nt, synthetic construct
  misc_feature 1..19: note = Description of Artificial Sequence: Synthetic oligonucleotide
  source 1..19: mol_type = other RNA
gggtttgggtgaggaaggc

SEQ ID NO: 2407 - RNA, 19 nt, synthetic construct
  misc_feature 1..19: note = Description of Artificial Sequence: Synthetic oligonucleotide
  source 1..19: mol_type = other RNA
tgggtttgggtgaggaagg

SEQ ID NO: 2408 - RNA, 19 nt, synthetic construct
  misc_feature 1..19: note = Description of Artificial Sequence: Synthetic oligonucleotide
  source 1..19: mol_type = other RNA
gtgggtttgggtgaggaag

SEQ ID NO: 2409 - RNA, 19 nt, synthetic construct
  misc_feature 1..19: note = Description of Artificial Sequence: Synthetic oligonucleotide
  source 1..19: mol_type = other RNA
tgtgggtttgggtgaggaa

SEQ ID NO: 2410 - RNA, 19 nt, synthetic construct
  misc_feature 1..19: note = Description of Artificial Sequence: Synthetic oligonucleotide
  source 1..19: mol_type = other RNA
ttgtgggtttgggtgagga

SEQ ID NO: 2411 - RNA, 19 nt, synthetic construct
  misc_feature 1..19: note = Description of Artificial Sequence: Synthetic oligonucleotide
  source 1..19: mol_type = other RNA
tttgtgggtttgggtgagg

SEQ ID NO: 2412 - RNA, 19 nt, synthetic construct
  misc_feature 1..19: note = Description of Artificial Sequence: Synthetic oligonucleotide
  source 1..19: mol_type = other RNA
ttttgtgggtttgggtgag

SEQ ID NO: 2413 - RNA, 19 nt, synthetic construct
  misc_feature 1..19: note = Description of Artificial Sequence: Synthetic oligonucleotide
  source 1..19: mol_type = other RNA
cttttgtgggtttgggtga

SEQ ID NO: 2414 - RNA, 19 nt, synthetic construct
  misc_feature 1..19: note = Description of Artificial Sequence: Synthetic oligonucleotide
  source 1..19: mol_type = other RNA
tcttttgtgggtttgggtg

SEQ ID NO: 2415 - RNA, 19 nt, synthetic construct
  misc_feature 1..19: note = Description of Artificial Sequence: Synthetic oligonucleotide
  source 1..19: mol_type = other RNA
atcttttgtgggtttgggt

SEQ ID NO: 2416 - RNA, 19 nt, synthetic construct
  misc_feature 1..19: note = Description of Artificial Sequence: Synthetic oligonucleotide
  source 1..19: mol_type = other RNA
catcttttgtgggtttggg

SEQ ID NO: 2417 - RNA, 19 nt, synthetic construct
  misc_feature 1..19: note = Description of Artificial Sequence: Synthetic oligonucleotide
  source 1..19: mol_type = other RNA
gcatcttttgtgggtttgg

SEQ ID NO: 2418 - RNA, 19 nt, synthetic construct
  misc_feature 1..19: note = Description of Artificial Sequence: Synthetic oligonucleotide
  source 1..19: mol_type = other RNA
agcatcttttgtgggtttg

SEQ ID NO: 2419 - RNA, 19 nt, synthetic construct
  misc_feature 1..19: note = Description of Artificial Sequence: Synthetic oligonucleotide
  source 1..19: mol_type = other RNA
cagcatcttttgtgggttt

SEQ ID NO: 2420 - RNA, 19 nt, synthetic construct
  misc_feature 1..19: note = Description of Artificial Sequence: Synthetic oligonucleotide
  source 1..19: mol_type = other RNA
tcagcatcttttgtgggtt

SEQ ID NO: 2421 - RNA, 19 nt, synthetic construct
  misc_feature 1..19: note = Description of Artificial Sequence: Synthetic oligonucleotide
  source 1..19: mol_type = other RNA
ttcagcatcttttgtgggt

SEQ ID NO: 2422 - RNA, 19 nt, synthetic construct
  misc_feature 1..19: note = Description of Artificial Sequence: Synthetic oligonucleotide
  source 1..19: mol_type = other RNA
tttcagcatcttttgtggg

SEQ ID NO: 2423 - RNA, 19 nt, synthetic construct
  misc_feature 1..19: note = Description of Artificial Sequence: Synthetic oligonucleotide
  source 1..19: mol_type = other RNA
ttttcagcatcttttgtgg

SEQ ID NO: 2424 - RNA, 19 nt, synthetic construct
  misc_feature 1..19: note = Description of Artificial Sequence: Synthetic oligonucleotide
  source 1..19: mol_type = other RNA
tttttcagcatcttttgtg

SEQ ID NO: 2425 - RNA, 19 nt, synthetic construct
  misc_feature 1..19: note = Description of Artificial Sequence: Synthetic oligonucleotide
  source 1..19: mol_type = other RNA
ctttttcagcatcttttgt

SEQ ID NO: 2426 - RNA, 19 nt, synthetic construct
  misc_feature 1..19: note = Description of Artificial Sequence: Synthetic oligonucleotide
  source 1..19: mol_type = other RNA
gctttttcagcatcttttg

SEQ ID NO: 2427 - RNA, 19 nt, synthetic construct
  misc_feature 1..19: note = Description of Artificial Sequence: Synthetic oligonucleotide
  source 1..19: mol_type = other RNA
ggctttttcagcatctttt

SEQ ID NO: 2428 - RNA, 19 nt, synthetic construct
  misc_feature 1..19: note = Description of Artificial Sequence: Synthetic oligonucleotide
  source 1..19: mol_type = other RNA
aggctttttcagcatcttt

SEQ ID NO: 2429 - RNA, 19 nt, synthetic construct
  misc_feature 1..19: note = Description of Artificial Sequence: Synthetic oligonucleotide
  source 1..19: mol_type = other RNA
gaggctttttcagcatctt

SEQ ID NO: 2430 - RNA, 19 nt, synthetic construct
  misc_feature 1..19: note = Description of Artificial Sequence: Synthetic oligonucleotide
  source 1..19: mol_type = other RNA
agaggctttttcagcatct

SEQ ID NO: 2431 - RNA, 19 nt, synthetic construct
  misc_feature 1..19: note = Description of Artificial Sequence: Synthetic oligonucleotide
  source 1..19: mol_type = other RNA
gagaggctttttcagcatc

SEQ ID NO: 2432 - RNA, 19 nt, synthetic construct
  misc_feature 1..19: note = Description of Artificial Sequence: Synthetic oligonucleotide
  source 1..19: mol_type = other RNA
agagaggctttttcagcat

SEQ ID NO: 2433 - RNA, 19 nt, synthetic construct
  misc_feature 1..19: note = Description of Artificial Sequence: Synthetic oligonucleotide
  source 1..19: mol_type = other RNA
gagagaggctttttcagca

SEQ ID NO: 2434 - RNA, 19 nt, synthetic construct
  misc_feature 1..19: note = Description of Artificial Sequence: Synthetic oligonucleotide
  source 1..19: mol_type = other RNA
tgagagaggctttttcagc

SEQ ID NO: 2435 - RNA, 19 nt, synthetic construct
  misc_feature 1..19: note = Description of Artificial Sequence: Synthetic oligonucleotide
  source 1..19: mol_type = other RNA
ctgagagaggctttttcag

SEQ ID NO: 2436 - RNA, 19 nt, synthetic construct
  misc_feature 1..19: note = Description of Artificial Sequence: Synthetic oligonucleotide
  source 1..19: mol_type = other RNA
gctgagagaggctttttca

SEQ ID NO: 2437 - RNA, 19 nt, synthetic construct
  misc_feature 1..19: note = Description of Artificial Sequence: Synthetic oligonucleotide
  source 1..19: mol_type = other RNA
agctgagagaggctttttc

SEQ ID NO: 2438 - RNA, 19 nt, synthetic construct
  misc_feature 1..19: note = Description of Artificial Sequence: Synthetic oligonucleotide
  source 1..19: mol_type = other RNA
cagctgagagaggcttttt

SEQ ID NO: 2439 - RNA, 19 nt, synthetic construct
  misc_feature 1..19: note = Description of Artificial Sequence: Synthetic oligonucleotide
  source 1..19: mol_type = other RNA
acagctgagagaggctttt

SEQ ID NO: 2440 - RNA, 19 nt, synthetic construct
  misc_feature 1..19: note = Description of Artificial Sequence: Synthetic oligonucleotide
  source 1..19: mol_type = other RNA
cacagctgagagaggcttt

SEQ ID NO: 2441 - RNA, 19 nt, synthetic construct
  misc_feature 1..19: note = Description of Artificial Sequence: Synthetic oligonucleotide
  source 1..19: mol_type = other RNA
tcacagctgagagaggctt

SEQ ID NO: 2442 - RNA, 19 nt, synthetic construct
  misc_feature 1..19: note = Description of Artificial Sequence: Synthetic oligonucleotide
  source 1..19: mol_type = other RNA
gtcacagctgagagaggct

SEQ ID NO: 2443 - RNA, 19 nt, synthetic construct
  misc_feature 1..19: note = Description of Artificial Sequence: Synthetic oligonucleotide
  source 1..19: mol_type = other RNA
ggtcacagctgagagaggc

SEQ ID NO: 2444 - RNA, 19 nt, synthetic construct
  misc_feature 1..19: note = Description of Artificial Sequence: Synthetic oligonucleotide
  source 1..19: mol_type = other RNA
aggtcacagctgagagagg

SEQ ID NO: 2445 - RNA, 19 nt, synthetic construct
  misc_feature 1..19: note = Description of Artificial Sequence: Synthetic oligonucleotide
  source 1..19: mol_type = other RNA
caggtcacagctgagagag

SEQ ID NO: 2446 - RNA, 19 nt, synthetic construct
  misc_feature 1..19: note = Description of Artificial Sequence: Synthetic oligonucleotide
  source 1..19: mol_type = other RNA
ccaggtcacagctgagaga

SEQ ID NO: 2447 - RNA, 19 nt, synthetic construct
  misc_feature 1..19: note = Description of Artificial Sequence: Synthetic oligonucleotide
  source 1..19: mol_type = other RNA
gccaggtcacagctgagag

SEQ ID NO: 2448 - RNA, 19 nt, synthetic construct
  misc_feature 1..19: note = Description of Artificial Sequence: Synthetic oligonucleotide
  source 1..19: mol_type = other RNA
agccaggtcacagctgaga

SEQ ID NO: 2449 - RNA, 19 nt, synthetic construct
  misc_feature 1..19: note = Description of Artificial Sequence: Synthetic oligonucleotide
  source 1..19: mol_type = other RNA
gagccaggtcacagctgag

SEQ ID NO: 2450 - RNA, 19 nt, synthetic construct
  misc_feature 1..19: note = Description of Artificial Sequence: Synthetic oligonucleotide
  source 1..19: mol_type = other RNA
agagccaggtcacagctga

SEQ ID NO: 2451 - RNA, 19 nt, synthetic construct
  misc_feature 1..19: note = Description of Artificial Sequence: Synthetic oligonucleotide
  source 1..19: mol_type = other RNA
cagagccaggtcacagctg

SEQ ID NO: 2452 - RNA, 19 nt, synthetic construct
  misc_feature 1..19: note = Description of Artificial Sequence: Synthetic oligonucleotide
  source 1..19: mol_type = other RNA
gcagagccaggtcacagct

SEQ ID NO: 2453 - RNA, 19 nt, synthetic construct
  misc_feature 1..19: note = Description of Artificial Sequence: Synthetic oligonucleotide
  source 1..19: mol_type = other RNA
tgcagagccaggtcacagc

SEQ ID NO: 2454 - RNA, 19 nt, synthetic construct
  misc_feature 1..19: note = Description of Artificial Sequence: Synthetic oligonucleotide
  source 1..19: mol_type = other RNA
atgcagagccaggtcacag

SEQ ID NO: 2455 - RNA, 19 nt, synthetic construct
  misc_feature 1..19: note = Description of Artificial Sequence: Synthetic oligonucleotide
  source 1..19: mol_type = other RNA
aatgcagagccaggtcaca

SEQ ID NO: 2456 - RNA, 19 nt, synthetic construct
  misc_feature 1..19: note = Description of Artificial Sequence: Synthetic oligonucleotide
  source 1..19: mol_type = other RNA
aaatgcagagccaggtcac

SEQ ID NO: 2457 - RNA, 19 nt, synthetic construct
  misc_feature 1..19: note = Description of Artificial Sequence: Synthetic oligonucleotide
  source 1..19: mol_type = other RNA
aaaatgcagagccaggtca

SEQ ID NO: 2458 - RNA, 19 nt, synthetic construct
  misc_feature 1..19: note = Description of Artificial Sequence: Synthetic oligonucleotide
  source 1..19: mol_type = other RNA
gaaaatgcagagccaggtc

SEQ ID NO: 2459 - RNA, 19 nt, synthetic construct
  misc_feature 1..19: note = Description of Artificial Sequence: Synthetic oligonucleotide
  source 1..19: mol_type = other RNA
tgaaaatgcagagccaggt

SEQ ID NO: 2460 - RNA, 19 nt, synthetic construct
  misc_feature 1..19: note = Description of Artificial Sequence: Synthetic oligonucleotide
  source 1..19: mol_type = other RNA
atgaaaatgcagagccagg

SEQ ID NO: 2461 - RNA, 19 nt, synthetic construct
  misc_feature 1..19: note = Description of Artificial Sequence: Synthetic oligonucleotide
  source 1..19: mol_type = other RNA
gatgaaaatgcagagccag

SEQ ID NO: 2462 - RNA, 19 nt, synthetic construct
  misc_feature 1..19: note = Description of Artificial Sequence: Synthetic oligonucleotide
  source 1..19: mol_type = other RNA
cgatgaaaatgcagagcca

SEQ ID NO: 2463 - RNA, 19 nt, synthetic construct
  misc_feature 1..19: note = Description of Artificial Sequence: Synthetic oligonucleotide
  source 1..19: mol_type = other RNA
acgatgaaaatgcagagcc

SEQ ID NO: 2464 - RNA, 19 nt, synthetic construct
  misc_feature 1..19: note = Description of Artificial Sequence: Synthetic oligonucleotide
  source 1..19: mol_type = other RNA
cacgatgaaaatgcagagc

SEQ ID NO: 2465 - RNA, 19 nt, synthetic construct
  misc_feature 1..19: note = Description of Artificial Sequence: Synthetic oligonucleotide
  source 1..19: mol_type = other RNA
ccacgatgaaaatgcagag

SEQ ID NO: 2466 - RNA, 19 nt, synthetic construct
  misc_feature 1..19: note = Description of Artificial Sequence: Synthetic oligonucleotide
  source 1..19: mol_type = other RNA
gccacgatgaaaatgcaga

SEQ ID NO: 2467 - RNA, 19 nt, synthetic construct
  misc_feature 1..19: note = Description of Artificial Sequence: Synthetic oligonucleotide
  source 1..19: mol_type = other RNA
ggccacgatgaaaatgcag

SEQ ID NO: 2468 - RNA, 19 nt, synthetic construct
  misc_feature 1..19: note = Description of Artificial Sequence: Synthetic oligonucleotide
  source 1..19: mol_type = other RNA
aggccacgatgaaaatgca

SEQ ID NO: 2469 - RNA, 19 nt, synthetic construct
  misc_feature 1..19: note = Description of Artificial Sequence: Synthetic oligonucleotide
  source 1..19: mol_type = other RNA
aaggccacgatgaaaatgc

SEQ ID NO: 2470 - RNA, 19 nt, synthetic construct
  misc_feature 1..19: note = Description of Artificial Sequence: Synthetic oligonucleotide
  source 1..19: mol_type = other RNA
aaaggccacgatgaaaatg

SEQ ID NO: 2471 - RNA, 19 nt, synthetic construct
  misc_feature 1..19: note = Description of Artificial Sequence: Synthetic oligonucleotide
  source 1..19: mol_type = other RNA
caaaggccacgatgaaaat

SEQ ID NO: 2472 - RNA, 19 nt, synthetic construct
  misc_feature 1..19: note = Description of Artificial Sequence: Synthetic oligonucleotide
  source 1..19: mol_type = other RNA
acaaaggccacgatgaaaa

SEQ ID NO: 2473 - RNA, 19 nt, synthetic construct
  misc_feature 1..19: note = Description of Artificial Sequence: Synthetic oligonucleotide
  source 1..19: mol_type = other RNA
gacaaaggccacgatgaaa

SEQ ID NO: 2474 - RNA, 19 nt, synthetic construct
  misc_feature 1..19: note = Description of Artificial Sequence: Synthetic oligonucleotide
  source 1..19: mol_type = other RNA
tgacaaaggccacgatgaa

SEQ ID NO: 2475 - RNA, 19 nt, synthetic construct
  misc_feature 1..19: note = Description of Artificial Sequence: Synthetic oligonucleotide
  source 1..19: mol_type = other RNA
ctgacaaaggccacgatga

SEQ ID NO: 2476 - RNA, 19 nt, synthetic construct
  misc_feature 1..19: note = Description of Artificial Sequence: Synthetic oligonucleotide
  source 1..19: mol_type = other RNA
gctgacaaaggccacgatg

SEQ ID NO: 2477 - RNA, 19 nt, synthetic construct
  misc_feature 1..19: note = Description of Artificial Sequence: Synthetic oligonucleotide
  source 1..19: mol_type = other RNA
ggctgacaaaggccacgat

SEQ ID NO: 2478 - RNA, 19 nt, synthetic construct
  misc_feature 1..19: note = Description of Artificial Sequence: Synthetic oligonucleotide
  source 1..19: mol_type = other RNA
tggctgacaaaggccacga

SEQ ID NO: 2479 - RNA, 19 nt, synthetic construct
  misc_feature 1..19: note = Description of Artificial Sequence: Synthetic oligonucleotide
  source 1..19: mol_type = other RNA
gtggctgacaaaggccacg

SEQ ID NO: 2480 - RNA, 19 nt, synthetic construct
  misc_feature 1..19: note = Description of Artificial Sequence: Synthetic oligonucleotide
  source 1..19: mol_type = other RNA
ggtggctgacaaaggccac

SEQ ID NO: 2481 - RNA, 19 nt, synthetic construct
  misc_feature 1..19: note = Description of Artificial Sequence: Synthetic oligonucleotide
  source 1..19: mol_type = other RNA
gggtggctgacaaaggcca

SEQ ID NO: 2482 - RNA, 19 nt, synthetic construct
  misc_feature 1..19: note = Description of Artificial Sequence: Synthetic oligonucleotide
  source 1..19: mol_type = other RNA
tgggtggctgacaaaggcc

SEQ ID NO: 2483 - RNA, 19 nt, synthetic construct
  misc_feature 1..19: note = Description of Artificial Sequence: Synthetic oligonucleotide
  source 1..19: mol_type = other RNA
ctgggtggctgacaaaggc

SEQ ID NO: 2484 - RNA, 19 nt, synthetic construct
  misc_feature 1..19: note = Description of Artificial Sequence: Synthetic oligonucleotide
  source 1..19: mol_type = other RNA
gctgggtggctgacaaagg

SEQ ID NO: 2485 - RNA, 19 nt, synthetic construct
  misc_feature 1..19: note = Description of Artificial Sequence: Synthetic oligonucleotide
  source 1..19: mol_type = other RNA
cgctgggtggctgacaaag

SEQ ID NO: 2486 - RNA, 19 nt, synthetic construct
  misc_feature 1..19: note = Description of Artificial Sequence: Synthetic oligonucleotide
  source 1..19: mol_type = other RNA
acgctgggtggctgacaaa

SEQ ID NO: 2487 - RNA, 19 nt, synthetic construct
  misc_feature 1..19: note = Description of Artificial Sequence: Synthetic oligonucleotide
  source 1..19: mol_type = other RNA
cacgctgggtggctgacaa

SEQ ID NO: 2488 - RNA, 19 nt, synthetic construct
  misc_feature 1..19: note = Description of Artificial Sequence: Synthetic oligonucleotide
  source 1..19: mol_type = other RNA
ccacgctgggtggctgaca

SEQ ID NO: 2489 - RNA, 19 nt, synthetic construct
  misc_feature 1..19: note = Description of Artificial Sequence: Synthetic oligonucleotide
  source 1..19: mol_type = other RNA
gccacgctgggtggctgac

SEQ ID NO: 2490 - RNA, 19 nt, synthetic construct
  misc_feature 1..19: note = Description of Artificial Sequence: Synthetic oligonucleotide
  source 1..19: mol_type = other RNA
agccacgctgggtggctga

SEQ ID NO: 2491 - RNA, 19 nt, synthetic construct
  misc_feature 1..19: note = Description of Artificial Sequence: Synthetic oligonucleotide
  source 1..19: mol_type = other RNA
cagccacgctgggtggctg

SEQ ID NO: 2492 - RNA, 19 nt, synthetic construct
  misc_feature 1..19: note = Description of Artificial Sequence: Synthetic oligonucleotide
  source 1..19: mol_type = other RNA
gcagccacgctgggtggct

SEQ ID NO: 2493 - RNA, 19 nt, synthetic construct
  misc_feature 1..19: note = Description of Artificial Sequence: Synthetic oligonucleotide
  source 1..19: mol_type = other RNA
tgcagccacgctgggtggc

SEQ ID NO: 2494 - RNA, 19 nt, synthetic construct
  misc_feature 1..19: note = Description of Artificial Sequence: Synthetic oligonucleotide
  source 1..19: mol_type = other RNA
ctgcagccacgctgggtgg

SEQ ID NO: 2495 - RNA, 19 nt, synthetic construct
  misc_feature 1..19: note = Description of Artificial Sequence: Synthetic oligonucleotide
  source 1..19: mol_type = other RNA
tctgcagccacgctgggtg

SEQ ID NO: 2496 - RNA, 19 nt, synthetic construct
  misc_feature 1..19: note = Description of Artificial Sequence: Synthetic oligonucleotide
  source 1..19: mol_type = other RNA
ttctgcagccacgctgggt

SEQ ID NO: 2497 - RNA, 19 nt, synthetic construct
  misc_feature 1..19: note = Description of Artificial Sequence: Synthetic oligonucleotide
  source 1..19: mol_type = other RNA
cttctgcagccacgctggg

SEQ ID NO: 2498 - RNA, 19 nt, synthetic construct
  misc_feature 1..19: note = Description of Artificial Sequence: Synthetic oligonucleotide
  source 1..19: mol_type = other RNA
gcttctgcagccacgctgg

SEQ ID NO: 2499 - RNA, 19 nt, synthetic construct
  misc_feature 1..19: note = Description of Artificial Sequence: Synthetic oligonucleotide
  source 1..19: mol_type = other RNA
agcttctgcagccacgctg

SEQ ID NO: 2500 - RNA, 19 nt, synthetic construct
  misc_feature 1..19: note = Description of Artificial Sequence: Synthetic oligonucleotide
  source 1..19: mol_type = other RNA
gagcttctgcagccacgct

SEQ ID NO: 2501 - RNA, 19 nt, synthetic construct
  misc_feature 1..19: note = Description of Artificial Sequence: Synthetic oligonucleotide
  source 1..19: mol_type = other RNA
agagcttctgcagccacgc

SEQ ID NO: 2502 - RNA, 19 nt, synthetic construct
  misc_feature 1..19: note = Description of Artificial Sequence: Synthetic oligonucleotide
  source 1..19: mol_type = other RNA
gagagcttctgcagccacg

SEQ ID NO: 2503 - RNA, 19 nt, synthetic construct
  misc_feature 1..19: note = Description of Artificial Sequence: Synthetic oligonucleotide
  source 1..19: mol_type = other RNA
agagagcttctgcagccac

SEQ ID NO: 2504 - RNA, 19 nt, synthetic construct
  misc_feature 1..19: note = Description of Artificial Sequence: Synthetic oligonucleotide
  source 1..19: mol_type = other RNA
tagagagcttctgcagcca

SEQ ID NO: 2505 - RNA, 19 nt, synthetic construct
  misc_feature 1..19: note = Description of Artificial Sequence: Synthetic oligonucleotide
  source 1..19: mol_type = other RNA
ttagagagcttctgcagcc

SEQ ID NO: 2506 - RNA, 19 nt, synthetic construct
  misc_feature 1..19: note = Description of Artificial Sequence: Synthetic oligonucleotide
  source 1..19: mol_type = other RNA
cttagagagcttctgcagc

SEQ ID NO: 2507 - RNA, 19 nt, synthetic construct
  misc_feature 1..19: note = Description of Artificial Sequence: Synthetic oligonucleotide
  source 1..19: mol_type = other RNA
gcttagagagcttctgcag

SEQ ID NO: 2508 - RNA, 19 nt, synthetic construct
  misc_feature 1..19: note = Description of Artificial Sequence: Synthetic oligonucleotide
  source 1..19: mol_type = other RNA
tgcttagagagcttctgca

SEQ ID NO: 2509 - RNA, 19 nt, synthetic construct
  misc_feature 1..19: note = Description of Artificial Sequence: Synthetic oligonucleotide
  source 1..19: mol_type = other RNA
gtgcttagagagcttctgc

SEQ ID NO: 2510 - RNA, 19 nt, synthetic construct
  misc_feature 1..19: note = Description of Artificial Sequence: Synthetic oligonucleotide
  source 1..19: mol_type = other RNA
tgtgcttagagagcttctg

SEQ ID NO: 2511 - RNA, 19 nt, synthetic construct
  misc_feature 1..19: note = Description of Artificial Sequence: Synthetic oligonucleotide
  source 1..19: mol_type = other RNA
ttgtgcttagagagcttct

SEQ ID NO: 2512 - RNA, 19 nt, synthetic construct
  misc_feature 1..19: note = Description of Artificial Sequence: Synthetic oligonucleotide
  source 1..19: mol_type = other RNA
cttgtgcttagagagcttc

SEQ ID NO: 2513 - RNA, 19 nt, synthetic construct
  misc_feature 1..19: note = Description of Artificial Sequence: Synthetic oligonucleotide
  source 1..19: mol_type = other RNA
tcttgtgcttagagagctt

SEQ ID NO: 2514 - RNA, 19 nt, synthetic construct
  misc_feature 1..19: note = Description of Artificial Sequence: Synthetic oligonucleotide
  source 1..19: mol_type = other RNA
gtcttgtgcttagagagct

SEQ ID NO: 2515 - RNA, 19 nt, synthetic construct
  misc_feature 1..19: note = Description of Artificial Sequence: Synthetic oligonucleotide
  source 1..19: mol_type = other RNA
tgtcttgtgcttagagagc

SEQ ID NO: 2516 - RNA, 19 nt, synthetic construct
  misc_feature 1..19: note = Description of Artificial Sequence: Synthetic oligonucleotide
  source 1..19: mol_type = other RNA
gtgtcttgtgcttagagag

SEQ ID NO: 2517 - RNA, 19 nt, synthetic construct
  misc_feature 1..19: note = Description of Artificial Sequence: Synthetic oligonucleotide
  source 1..19: mol_type = other RNA
ggtgtcttgtgcttagaga

SEQ ID NO: 2518 - RNA, 19 nt, synthetic construct
  misc_feature 1..19: note = Description of Artificial Sequence: Synthetic oligonucleotide
  source 1..19: mol_type = other RNA
tggtgtcttgtgcttagag

SEQ ID NO: 2519 - RNA, 19 nt, synthetic construct
  misc_feature 1..19: note = Description of Artificial Sequence: Synthetic oligonucleotide
  source 1..19: mol_type = other RNA
ctggtgtcttgtgcttaga

SEQ ID NO: 2520 - RNA, 19 nt, synthetic construct
  misc_feature 1..19: note = Description of Artificial Sequence: Synthetic oligonucleotide
  source 1..19: mol_type = other RNA
gctggtgtcttgtgcttag

SEQ ID NO: 2521 - RNA, 19 nt, synthetic construct
  misc_feature 1..19: note = Description of Artificial Sequence: Synthetic oligonucleotide
  source 1..19: mol_type = other RNA
tgctggtgtcttgtgctta

SEQ ID NO: 2522 - RNA, 19 nt, synthetic construct
  misc_feature 1..19: note = Description of Artificial Sequence: Synthetic oligonucleotide
  source 1..19: mol_type = other RNA
gtgctggtgtcttgtgctt

SEQ ID NO: 2523 - RNA, 19 nt, synthetic construct
  misc_feature 1..19: note = Description of Artificial Sequence: Synthetic oligonucleotide
  source 1..19: mol_type = other RNA
tgtgctggtgtcttgtgct

SEQ ID NO: 2524 - RNA, 19 nt, synthetic construct
  misc_feature 1..19: note = Description of Artificial Sequence: Synthetic oligonucleotide
  source 1..19: mol_type = other RNA
ctgtgctggtgtcttgtgc

SEQ ID NO: 2525 - RNA, 19 nt, synthetic construct
  misc_feature 1..19: note = Description of Artificial Sequence: Synthetic oligonucleotide
  source 1..19: mol_type = other RNA
gctgtgctggtgtcttgtg

SEQ ID NO: 2526 - RNA, 19 nt, synthetic construct
  misc_feature 1..19: note = Description of Artificial Sequence: Synthetic oligonucleotide
  source 1..19: mol_type = other RNA
ggctgtgctggtgtcttgt

SEQ ID NO: 2527 - RNA, 19 nt, synthetic construct
  misc_feature 1..19: note = Description of Artificial Sequence: Synthetic oligonucleotide
  source 1..19: mol_type = other RNA
tggctgtgctggtgtcttg

SEQ ID NO: 2528 - RNA, 19 nt, synthetic construct
  misc_feature 1..19: note = Description of Artificial Sequence: Synthetic oligonucleotide
  source 1..19: mol_type = other RNA
gtggctgtgctggtgtctt

SEQ ID NO: 2529 - RNA, 19 nt, synthetic construct
  misc_feature 1..19: note = Description of Artificial Sequence: Synthetic oligonucleotide
  source 1..19: mol_type = other RNA
tgtggctgtgctggtgtct

SEQ ID NO: 2530 - RNA, 19 nt, synthetic construct
  misc_feature 1..19: note = Description of Artificial Sequence: Synthetic oligonucleotide
  source 1..19: mol_type = other RNA
ctgtggctgtgctggtgtc

SEQ ID NO: 2531 - RNA, 19 nt, synthetic construct
  misc_feature 1..19: note = Description of Artificial Sequence: Synthetic oligonucleotide
  source 1..19: mol_type = other RNA
gctgtggctgtgctggtgt

SEQ ID NO: 2532 - RNA, 19 nt, synthetic construct
  misc_feature 1..19: note = Description of Artificial Sequence: Synthetic oligonucleotide
  source 1..19: mol_type = other RNA
agctgtggctgtgctggtg

SEQ ID NO: 2533 - RNA, 19 nt, synthetic construct
  misc_feature 1..19: note = Description of Artificial Sequence: Synthetic oligonucleotide
  source 1..19: mol_type = other RNA
gagctgtggctgtgctggt

SEQ ID NO: 2534 - RNA, 19 nt, synthetic construct
  misc_feature 1..19: note = Description of Artificial Sequence: Synthetic oligonucleotide
  source 1..19: mol_type = other RNA
tgagctgtggctgtgctgg

SEQ ID NO: 2535 - RNA, 19 nt, synthetic construct
  misc_feature 1..19: note = Description of Artificial Sequence: Synthetic oligonucleotide
  source 1..19: mol_type = other RNA
ttgagctgtggctgtgctg

SEQ ID NO: 2536 - RNA, 19 nt, synthetic construct
  misc_feature 1..19: note = Description of Artificial Sequence: Synthetic oligonucleotide
  source 1..19: mol_type = other RNA
tttgagctgtggctgtgct

SEQ ID NO: 2537 - RNA, 19 nt, synthetic construct
  misc_feature 1..19: note = Description of Artificial Sequence: Synthetic oligonucleotide
  source 1..19: mol_type = other RNA
ctttgagctgtggctgtgc

SEQ ID NO: 2538 - RNA, 19 nt, synthetic construct
  misc_feature 1..19: note = Description of Artificial Sequence: Synthetic oligonucleotide
  source 1..19: mol_type = other RNA
gctttgagctgtggctgtg

SEQ ID NO: 2539 - RNA, 19 nt, synthetic construct
  misc_feature 1..19: note = Description of Artificial Sequence: Synthetic oligonucleotide
  source 1..19: mol_type = other RNA
cgctttgagctgtggctgt

SEQ ID NO: 2540 - RNA, 19 nt, synthetic construct
  misc_feature 1..19: note = Description of Artificial Sequence: Synthetic oligonucleotide
  source 1..19: mol_type = other RNA
ccgctttgagctgtggctg

SEQ ID NO: 2541 - RNA, 19 nt, synthetic construct
  misc_feature 1..19: note = Description of Artificial Sequence: Synthetic oligonucleotide
  source 1..19: mol_type = other RNA
gccgctttgagctgtggct

SEQ ID NO: 2542 - RNA, 19 nt, synthetic construct
  misc_feature 1..19: note = Description of Artificial Sequence: Synthetic oligonucleotide
  source 1..19: mol_type = other RNA
ggccgctttgagctgtggc

SEQ ID NO: 2543 - RNA, 19 nt, synthetic construct
  misc_feature 1..19: note = Description of Artificial Sequence: Synthetic oligonucleotide
  source 1..19: mol_type = other RNA
tggccgctttgagctgtgg

SEQ ID NO: 2544 - RNA, 19 nt, synthetic construct
  misc_feature 1..19: note = Description of Artificial Sequence: Synthetic oligonucleotide
  source 1..19: mol_type = other RNA
ttggccgctttgagctgtg

SEQ ID NO: 2545 - RNA, 19 nt, synthetic construct
  misc_feature 1..19: note = Description of Artificial Sequence: Synthetic oligonucleotide
  source 1..19: mol_type = other RNA
gttggccgctttgagctgt

SEQ ID NO: 2546 - RNA, 19 nt, synthetic construct
  misc_feature 1..19: note = Description of Artificial Sequence: Synthetic oligonucleotide
  source 1..19: mol_type = other RNA
agttggccgctttgagctg

SEQ ID NO: 2547 - RNA, 19 nt, synthetic construct
  misc_feature 1..19: note = Description of Artificial Sequence: Synthetic oligonucleotide
  source 1..19: mol_type = other RNA
cagttggccgctttgagct

SEQ ID NO: 2548 - RNA, 19 nt, synthetic construct
  misc_feature 1..19: note = Description of Artificial Sequence: Synthetic oligonucleotide
  source 1..19: mol_type = other RNA
gcagttggccgctttgagc

SEQ ID NO: 2549 - RNA, 19 nt, synthetic construct
  misc_feature 1..19: note = Description of Artificial Sequence: Synthetic oligonucleotide
  source 1..19: mol_type = other RNA
agcagttggccgctttgag

SEQ ID NO: 2550 - RNA, 19 nt, synthetic construct
  misc_feature 1..19: note = Description of Artificial Sequence: Synthetic oligonucleotide
  source 1..19: mol_type = other RNA
cagcagttggccgctttga

SEQ ID NO: 2551 - RNA, 19 nt, synthetic construct
  misc_feature 1..19: note = Description of Artificial Sequence: Synthetic oligonucleotide
  source 1..19: mol_type = other RNA
acagcagttggccgctttg

SEQ ID NO: 2552 - RNA, 19 nt, synthetic construct
  misc_feature 1..19: note = Description of Artificial Sequence: Synthetic oligonucleotide
  source 1..19: mol_type = other RNA
cacagcagttggccgcttt

SEQ ID NO: 2553 - RNA, 19 nt, synthetic construct
  misc_feature 1..19: note = Description of Artificial Sequence: Synthetic oligonucleotide
  source 1..19: mol_type = other RNA
tcacagcagttggccgctt

SEQ ID NO: 2554 - RNA, 19 nt, synthetic construct
  misc_feature 1..19: note = Description of Artificial Sequence: Synthetic oligonucleotide
  source 1..19: mol_type = other RNA
ctcacagcagttggccgct

SEQ ID NO: 2555 - RNA, 19 nt, synthetic construct
  misc_feature 1..19: note = Description of Artificial Sequence: Synthetic oligonucleotide
  source 1..19: mol_type = other RNA
cctcacagcagttggccgc

SEQ ID NO: 2556 - RNA, 19 nt, synthetic construct
  misc_feature 1..19: note = Description of Artificial Sequence: Synthetic oligonucleotide
  source 1..19: mol_type = other RNA
tcctcacagcagttggccg

SEQ ID NO: 2557 - RNA, 19 nt, synthetic construct
  misc_feature 1..19: note = Description of Artificial Sequence: Synthetic oligonucleotide
  source 1..19: mol_type = other RNA
ctcctcacagcagttggcc

SEQ ID NO: 2558 - RNA, 19 nt, synthetic construct
  misc_feature 1..19: note = Description of Artificial Sequence: Synthetic oligonucleotide
  source 1..19: mol_type = other RNA
cctcctcacagcagttggc

SEQ ID NO: 2559 - RNA, 19 nt, synthetic construct
  misc_feature 1..19: note = Description of Artificial Sequence: Synthetic oligonucleotide
  source 1..19: mol_type = other RNA
acctcctcacagcagttgg

SEQ ID NO: 2560 - RNA, 19 nt, synthetic construct
  misc_feature 1..19: note = Description of Artificial Sequence: Synthetic oligonucleotide
  source 1..19: mol_type = other RNA
cacctcctcacagcagttg

SEQ ID NO: 2561 - RNA, 19 nt, synthetic construct
  misc_feature 1..19: note = Description of Artificial Sequence: Synthetic oligonucleotide
  source 1..19: mol_type = other RNA
tcacctcctcacagcagtt

SEQ ID NO: 2562 - RNA, 19 nt, synthetic construct
  misc_feature 1..19: note = Description of Artificial Sequence: Synthetic oligonucleotide
  source 1..19: mol_type = other RNA
ttcacctcctcacagcagt

SEQ ID NO: 2563 - RNA, 19 nt, synthetic construct
  misc_feature 1..19: note = Description of Artificial Sequence: Synthetic oligonucleotide
  source 1..19: mol_type = other RNA
cttcacctcctcacagcag

SEQ ID NO: 2564 - RNA, 19 nt, synthetic construct
  misc_feature 1..19: note = Description of Artificial Sequence: Synthetic oligonucleotide
  source 1..19: mol_type = other RNA
ccttcacctcctcacagca

SEQ ID NO: 2565 - RNA, 19 nt, synthetic construct
  misc_feature 1..19: note = Description of Artificial Sequence: Synthetic oligonucleotide
  source 1..19: mol_type = other RNA
tccttcacctcctcacagc

SEQ ID NO: 2566 - RNA, 19 nt, synthetic construct
  misc_feature 1..19: note = Description of Artificial Sequence: Synthetic oligonucleotide
  source 1..19: mol_type = other RNA
ctccttcacctcctcacag

SEQ ID NO: 2567 - RNA, 19 nt, synthetic construct
  misc_feature 1..19: note = Description of Artificial Sequence: Synthetic oligonucleotide
  source 1..19: mol_type = other RNA
gctccttcacctcctcaca

SEQ ID NO: 2568 - RNA, 19 nt, synthetic construct
  misc_feature 1..19: note = Description of Artificial Sequence: Synthetic oligonucleotide
  source 1..19: mol_type = other RNA
agctccttcacctcctcac

SEQ ID NO: 2569 - RNA, 19 nt, synthetic construct
  misc_feature 1..19: note = Description of Artificial Sequence: Synthetic oligonucleotide
  source 1..19: mol_type = other RNA
gagctccttcacctcctca

SEQ ID NO: 2570 - RNA, 19 nt, synthetic construct
  misc_feature 1..19: note = Description of Artificial Sequence: Synthetic oligonucleotide
  source 1..19: mol_type = other RNA
tgagctccttcacctcctc

SEQ ID NO: 2571 - RNA, 19 nt, synthetic construct
  misc_feature 1..19: note = Description of Artificial Sequence: Synthetic oligonucleotide
  source 1..19: mol_type = other RNA
ttgagctccttcacctcct

SEQ ID NO: 2572 - RNA, 19 nt, synthetic construct
  misc_feature 1..19: note = Description of Artificial Sequence: Synthetic oligonucleotide
  source 1..19: mol_type = other RNA
cttgagctccttcacctcc

SEQ ID NO: 2573 - RNA, 19 nt, synthetic construct
  misc_feature 1..19: note = Description of Artificial Sequence: Synthetic oligonucleotide
  source 1..19: mol_type = other RNA
ccttgagctccttcacctc

SEQ ID NO: 2574 - RNA, 19 nt, synthetic construct
  misc_feature 1..19: note = Description of Artificial Sequence: Synthetic oligonucleotide
  source 1..19: mol_type = other RNA
gccttgagctccttcacct

SEQ ID NO: 2575 - RNA, 19 nt, synthetic construct
  misc_feature 1..19: note = Description of Artificial Sequence: Synthetic oligonucleotide
  source 1..19: mol_type = other RNA
ggccttgagctccttcacc

SEQ ID NO: 2576 - RNA, 19 nt, synthetic construct
  misc_feature 1..19: note = Description of Artificial Sequence: Synthetic oligonucleotide
  source 1..19: mol_type = other RNA
gggccttgagctccttcac

SEQ ID NO: 2577 - RNA, 19 nt, synthetic construct
  misc_feature 1..19: note = Description of Artificial Sequence: Synthetic oligonucleotide
  source 1..19: mol_type = other RNA
tgggccttgagctccttca

SEQ ID NO: 2578 - RNA, 19 nt, synthetic construct
  misc_feature 1..19: note = Description of Artificial Sequence: Synthetic oligonucleotide
  source 1..19: mol_type = other RNA
ttgggccttgagctccttc

SEQ ID NO: 2579 - RNA, 19 nt, synthetic construct
  misc_feature 1..19: note = Description of Artificial Sequence: Synthetic oligonucleotide
  source 1..19: mol_type = other RNA
cttgggccttgagctcctt

SEQ ID NO: 2580 - RNA, 19 nt, synthetic construct
  misc_feature 1..19: note = Description of Artificial Sequence: Synthetic oligonucleotide
  source 1..19: mol_type = other RNA
acttgggccttgagctcct

SEQ ID NO: 2581 - RNA, 19 nt, synthetic construct
  misc_feature 1..19: note = Description of Artificial Sequence: Synthetic oligonucleotide
  source 1..19: mol_type = other RNA
aacttgggccttgagctcc

SEQ ID NO: 2582 - RNA, 19 nt, synthetic construct
  misc_feature 1..19: note = Description of Artificial Sequence: Synthetic oligonucleotide
  source 1..19: mol_type = other RNA
caacttgggccttgagctc

SEQ ID NO: 2583 - RNA, 19 nt, synthetic construct
  misc_feature 1..19: note = Description of Artificial Sequence: Synthetic oligonucleotide
  source 1..19: mol_type = other RNA
gcaacttgggccttgagct

SEQ ID NO: 2584 - RNA, 19 nt, synthetic construct
  misc_feature 1..19: note = Description of Artificial Sequence: Synthetic oligonucleotide
  source 1..19: mol_type = other RNA
ggcaacttgggccttgagc

SEQ ID NO: 2585 - RNA, 19 nt, synthetic construct
  misc_feature 1..19: note = Description of Artificial Sequence: Synthetic oligonucleotide
  source 1..19: mol_type = other RNA
tggcaacttgggccttgag

SEQ ID NO: 2586 - RNA, 19 nt, synthetic construct
  misc_feature 1..19: note = Description of Artificial Sequence: Synthetic oligonucleotide
  source 1..19: mol_type = other RNA
ttggcaacttgggccttga

SEQ ID NO: 2587 - RNA, 19 nt, synthetic construct
  misc_feature 1..19: note = Description of Artificial Sequence: Synthetic oligonucleotide
  source 1..19: mol_type = other RNA
gttggcaacttgggccttg

SEQ ID NO: 2588 - RNA, 19 nt, synthetic construct
  misc_feature 1..19: note = Description of Artificial Sequence: Synthetic oligonucleotide
  source 1..19: mol_type = other RNA
ggttggcaacttgggcctt

SEQ ID NO: 2589 - RNA, 19 nt, synthetic construct
  misc_feature 1..19: note = Description of Artificial Sequence: Synthetic oligonucleotide
  source 1..19: mol_type = other RNA
aggttggcaacttgggcct

SEQ ID NO: 2590 - RNA, 19 nt, synthetic construct
  misc_feature 1..19: note = Description of Artificial Sequence: Synthetic oligonucleotide
  source 1..19: mol_type = other RNA
aaggttggcaacttgggcc

SEQ ID NO: 2591 - RNA, 19 nt, synthetic construct
  misc_feature 1..19: note = Description of Artificial Sequence: Synthetic oligonucleotide
  source 1..19: mol_type = other RNA
taaggttggcaacttgggc

SEQ ID NO: 2592 - RNA, 19 nt, synthetic construct
  misc_feature 1..19: note = Description of Artificial Sequence: Synthetic oligonucleotide
  source 1..19: mol_type = other RNA
ctaaggttggcaacttggg

SEQ ID NO: 2593 - RNA, 19 nt, synthetic construct
  misc_feature 1..19: note = Description of Artificial Sequence: Synthetic oligonucleotide
  source 1..19: mol_type = other RNA
gctaaggttggcaacttgg

SEQ ID NO: 2594 - RNA, 19 nt, synthetic construct
  misc_feature 1..19: note = Description of Artificial Sequence: Synthetic oligonucleotide
  source 1..19: mol_type = other RNA
tgctaaggttggcaacttg

SEQ ID NO: 2595 - RNA, 19 nt, synthetic construct
  misc_feature 1..19: note = Description of Artificial Sequence: Synthetic oligonucleotide
  source 1..19: mol_type = other RNA
ctgctaaggttggcaactt

SEQ ID NO: 2596 - RNA, 19 nt, synthetic construct
  misc_feature 1..19: note = Description of Artificial Sequence: Synthetic oligonucleotide
  source 1..19: mol_type = other RNA
gctgctaaggttggcaact

SEQ ID NO: 2597 - RNA, 19 nt, synthetic construct
  misc_feature 1..19: note = Description of Artificial Sequence: Synthetic oligonucleotide
  source 1..19: mol_type = other RNA
ggctgctaaggttggcaac

SEQ ID NO: 2598 - RNA, 19 nt, synthetic construct
  misc_feature 1..19: note = Description of Artificial Sequence: Synthetic oligonucleotide
  source 1..19: mol_type = other RNA
aggctgctaaggttggcaa

SEQ ID NO: 2599 - RNA, 19 nt, synthetic construct
  misc_feature 1..19: note = Description of Artificial Sequence: Synthetic oligonucleotide
  source 1..19: mol_type = other RNA
caggctgctaaggttggca

SEQ ID NO: 2600 - RNA, 19 nt, synthetic construct
  misc_feature 1..19: note = Description of Artificial Sequence: Synthetic oligonucleotide
  source 1..19: mol_type = other RNA
gcaggctgctaaggttggc

SEQ ID NO: 2601 - RNA, 19 nt, synthetic construct
  misc_feature 1..19: note = Description of Artificial Sequence: Synthetic oligonucleotide
  source 1..19: mol_type = other RNA
agcaggctgctaaggttgg

SEQ ID NO: 2602 - RNA, 19 nt, synthetic construct
  misc_feature 1..19: note = Description of Artificial Sequence: Synthetic oligonucleotide
  source 1..19: mol_type = other RNA
cagcaggctgctaaggttg

SEQ ID NO: 2603 - RNA, 19 nt, synthetic construct
  misc_feature 1..19: note = Description of Artificial Sequence: Synthetic oligonucleotide
  source 1..19: mol_type = other RNA
tcagcaggctgctaaggtt

SEQ ID NO: 2604 - RNA, 19 nt, synthetic construct
  misc_feature 1..19: note = Description of Artificial Sequence: Synthetic oligonucleotide
  source 1..19: mol_type = other RNA
ctcagcaggctgctaaggt

SEQ ID NO: 2605 - RNA, 19 nt, synthetic construct
  misc_feature 1..19: note = Description of Artificial Sequence: Synthetic oligonucleotide
  source 1..19: mol_type = other RNA
actcagcaggctgctaagg

SEQ ID NO: 2606 - RNA, 19 nt, synthetic construct
  misc_feature 1..19: note = Description of Artificial Sequence: Synthetic oligonucleotide
  source 1..19: mol_type = other RNA
cactcagcaggctgctaag

SEQ ID NO: 2607 - RNA, 19 nt, synthetic construct
  misc_feature 1..19: note = Description of Artificial Sequence: Synthetic oligonucleotide
  source 1..19: mol_type = other RNA
tcactcagcaggctgctaa

SEQ ID NO: 2608 - RNA, 19 nt, synthetic construct
  misc_feature 1..19: note = Description of Artificial Sequence: Synthetic oligonucleotide
  source 1..19: mol_type = other RNA
ttcactcagcaggctgcta

SEQ ID NO: 2609 - RNA, 19 nt, synthetic construct
  misc_feature 1..19: note = Description of Artificial Sequence: Synthetic oligonucleotide
  source 1..19: mol_type = other RNA
gttcactcagcaggctgct

SEQ ID NO: 2610 - RNA, 19 nt, synthetic construct
  misc_feature 1..19: note = Description of Artificial Sequence: Synthetic oligonucleotide
  source 1..19: mol_type = other RNA
agttcactcagcaggctgc

SEQ ID NO: 2611 - RNA, 19 nt, synthetic construct
  misc_feature 1..19: note = Description of Artificial Sequence: Synthetic oligonucleotide
  source 1..19: mol_type = other RNA
cagttcactcagcaggctg

SEQ ID NO: 2612 - RNA, 19 nt, synthetic construct
  misc_feature 1..19: note = Description of Artificial Sequence: Synthetic oligonucleotide
  source 1..19: mol_type = other RNA
tcagttcactcagcaggct

SEQ ID NO: 2613 - RNA, 19 nt, synthetic construct
  misc_feature 1..19: note = Description of Artificial Sequence: Synthetic oligonucleotide
  source 1..19: mol_type = other RNA
ttcagttcactcagcaggc

SEQ ID NO: 2614 - RNA, 19 nt, synthetic construct
  misc_feature 1..19: note = Description of Artificial Sequence: Synthetic oligonucleotide
  source 1..19: mol_type = other RNA
gttcagttcactcagcagg

SEQ ID NO: 2615 - RNA, 19 nt, synthetic construct
  misc_feature 1..19: note = Description of Artificial Sequence: Synthetic oligonucleotide
  source 1..19: mol_type = other RNA
tgttcagttcactcagcag

SEQ ID NO: 2616 - RNA, 19 nt, synthetic construct
  misc_feature 1..19: note = Description of Artificial Sequence: Synthetic oligonucleotide
  source 1..19: mol_type = other RNA
ttgttcagttcactcagca

SEQ ID NO: 2617 - RNA, 19 nt, synthetic construct
  misc_feature 1..19: note = Description of Artificial Sequence: Synthetic oligonucleotide
  source 1..19: mol_type = other RNA
cttgttcagttcactcagc

SEQ ID NO: 2618 - RNA, 19 nt, synthetic construct
  misc_feature 1..19: note = Description of Artificial Sequence: Synthetic oligonucleotide
  source 1..19: mol_type = other RNA
tcttgttcagttcactcag

SEQ ID NO: 2619 - RNA, 19 nt, synthetic construct
  misc_feature 1..19: note = Description of Artificial Sequence: Synthetic oligonucleotide
  source 1..19: mol_type = other RNA
ttcttgttcagttcactca

SEQ ID NO: 2620 - RNA, 19 nt, synthetic construct
  misc_feature 1..19: note = Description of Artificial Sequence: Synthetic oligonucleotide
  source 1..19: mol_type = other RNA
cttcttgttcagttcactc

SEQ ID NO: 2621 - RNA, 19 nt, synthetic construct
  misc_feature 1..19: note = Description of Artificial Sequence: Synthetic oligonucleotide
  source 1..19: mol_type = other RNA
gcttcttgttcagttcact

SEQ ID NO: 2622 - RNA, 19 nt, synthetic construct
  misc_feature 1..19: note = Description of Artificial Sequence: Synthetic oligonucleotide
  source 1..19: mol_type = other RNA
tgcttcttgttcagttcac

SEQ ID NO: 2623 - RNA, 19 nt, synthetic construct
  misc_feature 1..19: note = Description of Artificial Sequence: Synthetic oligonucleotide
  source 1..19: mol_type = other RNA
ctgcttcttgttcagttca

SEQ ID NO: 2624 - RNA, 19 nt, synthetic construct
  misc_feature 1..19: note = Description of Artificial Sequence: Synthetic oligonucleotide
  source 1..19: mol_type = other RNA
cctgcttcttgttcagttc

SEQ ID NO: 2625 - RNA, 19 nt, synthetic construct
  misc_feature 1..19: note = Description of Artificial Sequence: Synthetic oligonucleotide
  source 1..19: mol_type = other RNA
tcctgcttcttgttcagtt

SEQ ID NO: 2626 - RNA, 19 nt, synthetic construct
  misc_feature 1..19: note = Description of Artificial Sequence: Synthetic oligonucleotide
  source 1..19: mol_type = other RNA
ctcctgcttcttgttcagt

SEQ ID NO: 2627 - RNA, 19 nt, synthetic construct
  misc_feature 1..19: note = Description of Artificial Sequence: Synthetic oligonucleotide
  source 1..19: mol_type = other RNA
tctcctgcttcttgttcag

SEQ ID NO: 2628 - RNA, 19 nt, synthetic construct
  misc_feature 1..19: note = Description of Artificial Sequence: Synthetic oligonucleotide
  source 1..19: mol_type = other RNA
ctctcctgcttcttgttca

SEQ ID NO: 2629 - RNA, 19 nt, synthetic construct
  misc_feature 1..19: note = Description of Artificial Sequence: Synthetic oligonucleotide
  source 1..19: mol_type = other RNA
cctctcctgcttcttgttc

SEQ ID NO: 2630 - RNA, 19 nt, synthetic construct
  misc_feature 1..19: note = Description of Artificial Sequence: Synthetic oligonucleotide
  source 1..19: mol_type = other RNA
ccctctcctgcttcttgtt

SEQ ID NO: 2631 - RNA, 19 nt, synthetic construct
  misc_feature 1..19: note = Description of Artificial Sequence: Synthetic oligonucleotide
  source 1..19: mol_type = other RNA
tccctctcctgcttcttgt

SEQ ID NO: 2632 - RNA, 19 nt, synthetic construct
  misc_feature 1..19: note = Description of Artificial Sequence: Synthetic oligonucleotide
  source 1..19: mol_type = other RNA
gtccctctcctgcttcttg

SEQ ID NO: 2633 - RNA, 19 nt, synthetic construct
  misc_feature 1..19: note = Description of Artificial Sequence: Synthetic oligonucleotide
  source 1..19: mol_type = other RNA
agtccctctcctgcttctt

SEQ ID NO: 2634 - RNA, 19 nt, synthetic construct
  misc_feature 1..19: note = Description of Artificial Sequence: Synthetic oligonucleotide
  source 1..19: mol_type = other RNA
cagtccctctcctgcttct

SEQ ID NO: 2635 - RNA, 19 nt, synthetic construct
  misc_feature 1..19: note = Description of Artificial Sequence: Synthetic oligonucleotide
  source 1..19: mol_type = other RNA
ccagtccctctcctgcttc

SEQ ID NO: 2636 - RNA, 19 nt, synthetic construct
  misc_feature 1..19: note = Description of Artificial Sequence: Synthetic oligonucleotide
  source 1..19: mol_type = other RNA
cccagtccctctcctgctt

SEQ ID NO: 2637 - RNA, 19 nt, synthetic construct
  misc_feature 1..19: note = Description of Artificial Sequence: Synthetic oligonucleotide
  source 1..19: mol_type = other RNA
acccagtccctctcctgct

SEQ ID NO: 2638 - RNA, 19 nt, synthetic construct
  misc_feature 1..19: note = Description of Artificial Sequence: Synthetic oligonucleotide
  source 1..19: mol_type = other RNA
gacccagtccctctcctgc

SEQ ID NO: 2639 - RNA, 19 nt, synthetic construct
  misc_feature 1..19: note = Description of Artificial Sequence: Synthetic oligonucleotide
  source 1..19: mol_type = other RNA
tgacccagtccctctcctg

SEQ ID NO: 2640 - RNA, 19 nt, synthetic construct
  misc_feature 1..19: note = Description of Artificial Sequence: Synthetic oligonucleotide
  source 1..19: mol_type = other RNA
ctgacccagtccctctcct

SEQ ID NO: 2641 - RNA, 19 nt, synthetic construct
  misc_feature 1..19: note = Description of Artificial Sequence: Synthetic oligonucleotide
  source 1..19: mol_type = other RNA
gctgacccagtccctctcc

SEQ ID NO: 2642 - RNA, 19 nt, synthetic construct
  misc_feature 1..19: note = Description of Artificial Sequence: Synthetic oligonucleotide
  source 1..19: mol_type = other RNA
cgctgacccagtccctctc

SEQ ID NO: 2643 - RNA, 19 nt, synthetic construct
  misc_feature 1..19: note = Description of Artificial Sequence: Synthetic oligonucleotide
  source 1..19: mol_type = other RNA
acgctgacccagtccctct

SEQ ID NO: 2644 - RNA, 19 nt, synthetic construct
  misc_feature 1..19: note = Description of Artificial Sequence: Synthetic oligonucleotide
  source 1..19: mol_type = other RNA
cacgctgacccagtccctc

SEQ ID NO: 2645 - RNA, 19 nt, synthetic construct
  misc_feature 1..19: note = Description of Artificial Sequence: Synthetic oligonucleotide
  source 1..19: mol_type = other RNA
ccacgctgacccagtccct

SEQ ID NO: 2646 - RNA, 19 nt, synthetic construct
  misc_feature 1..19: note = Description of Artificial Sequence: Synthetic oligonucleotide
  source 1..19: mol_type = other RNA
accacgctgacccagtccc

SEQ ID NO: 2647 - RNA, 19 nt, synthetic construct
  misc_feature 1..19: note = Description of Artificial Sequence: Synthetic oligonucleotide
  source 1..19: mol_type = other RNA
gaccacgctgacccagtcc

SEQ ID NO: 2648 - RNA, 19 nt, synthetic construct
  misc_feature 1..19: note = Description of Artificial Sequence: Synthetic oligonucleotide
  source 1..19: mol_type = other RNA
tgaccacgctgacccagtc

SEQ ID NO: 2649 - RNA, 19 nt, synthetic construct
  misc_feature 1..19: note = Description of Artificial Sequence: Synthetic oligonucleotide
  source 1..19: mol_type = other RNA
atgaccacgctgacccagt

SEQ ID NO: 2650 - RNA, 19 nt, synthetic construct
  misc_feature 1..19: note = Description of Artificial Sequence: Synthetic oligonucleotide
  source 1..19: mol_type = other RNA
catgaccacgctgacccag

SEQ ID NO: 2651 - RNA, 19 nt, synthetic construct
  misc_feature 1..19: note = Description of Artificial Sequence: Synthetic oligonucleotide
  source 1..19: mol_type = other RNA
gcatgaccacgctgaccca

SEQ ID NO: 2652 - RNA, 19 nt, synthetic construct
  misc_feature 1..19: note = Description of Artificial Sequence: Synthetic oligonucleotide
  source 1..19: mol_type = other RNA
tgcatgaccacgctgaccc

SEQ ID NO: 2653 - RNA, 19 nt, synthetic construct
  misc_feature 1..19: note = Description of Artificial Sequence: Synthetic oligonucleotide
  source 1..19: mol_type = other RNA
ctgcatgaccacgctgacc

SEQ ID NO: 2654 - RNA, 19 nt, synthetic construct
  misc_feature 1..19: note = Description of Artificial Sequence: Synthetic oligonucleotide
  source 1..19: mol_type = other RNA
cctgcatgaccacgctgac

SEQ ID NO: 2655 - RNA, 19 nt, synthetic construct
  misc_feature 1..19: note = Description of Artificial Sequence: Synthetic oligonucleotide
  source 1..19: mol_type = other RNA
acctgcatgaccacgctga

SEQ ID NO: 2656 - RNA, 19 nt, synthetic construct
  misc_feature 1..19: note = Description of Artificial Sequence: Synthetic oligonucleotide
  source 1..19: mol_type = other RNA
cacctgcatgaccacgctg

SEQ ID NO: 2657 - RNA, 19 nt, synthetic construct
  misc_feature 1..19: note = Description of Artificial Sequence: Synthetic oligonucleotide
  source 1..19: mol_type = other RNA
tcacctgcatgaccacgct

SEQ ID NO: 2658 - RNA, 19 nt, synthetic construct
  misc_feature 1..19: note = Description of Artificial Sequence: Synthetic oligonucleotide
  source 1..19: mol_type = other RNA
atcacctgcatgaccacgc

SEQ ID NO: 2659 - RNA, 19 nt, synthetic construct
  misc_feature 1..19: note = Description of Artificial Sequence: Synthetic oligonucleotide
  source 1..19: mol_type = other RNA
catcacctgcatgaccacg

SEQ ID NO: 2660 - RNA, 19 nt, synthetic construct
  misc_feature 1..19: note = Description of Artificial Sequence: Synthetic oligonucleotide
  source 1..19: mol_type = other RNA
ccatcacctgcatgaccac

SEQ ID NO: 2661 - RNA, 19 nt, synthetic construct
  misc_feature 1..19: note = Description of Artificial Sequence: Synthetic oligonucleotide
  source 1..19: mol_type = other RNA
tccatcacctgcatgacca

SEQ ID NO: 2662 - RNA, 19 nt, synthetic construct
  misc_feature 1..19: note = Description of Artificial Sequence: Synthetic oligonucleotide
  source 1..19: mol_type = other RNA
ctccatcacctgcatgacc

SEQ ID NO: 2663 - RNA, 19 nt, synthetic construct
  misc_feature 1..19: note = Description of Artificial Sequence: Synthetic oligonucleotide
  source 1..19: mol_type = other RNA
gctccatcacctgcatgac

SEQ ID NO: 2664 - RNA, 19 nt, synthetic construct
  misc_feature 1..19: note = Description of Artificial Sequence: Synthetic oligonucleotide
  source 1..19: mol_type = other RNA
agctccatcacctgcatga

SEQ ID NO: 2665 - RNA, 19 nt, synthetic construct
  misc_feature 1..19: note = Description of Artificial Sequence: Synthetic oligonucleotide
  source 1..19: mol_type = other RNA
cagctccatcacctgcatg

SEQ ID NO: 2666 - RNA, 19 nt, synthetic construct
  misc_feature 1..19: note = Description of Artificial Sequence: Synthetic oligonucleotide
  source 1..19: mol_type = other RNA
ccagctccatcacctgcat

SEQ ID NO: 2667 - RNA, 19 nt, synthetic construct
  misc_feature 1..19: note = Description of Artificial Sequence: Synthetic oligonucleotide
  source 1..19: mol_type = other RNA
tccagctccatcacctgca

SEQ ID NO: 2668 - RNA, 19 nt, synthetic construct
  misc_feature 1..19: note = Description of Artificial Sequence: Synthetic oligonucleotide
  source 1..19: mol_type = other RNA
ctccagctccatcacctgc

SEQ ID NO: 2669 - RNA, 19 nt, synthetic construct
  misc_feature 1..19: note = Description of Artificial Sequence: Synthetic oligonucleotide
  source 1..19: mol_type = other RNA
tctccagctccatcacctg

SEQ ID NO: 2670 - RNA, 19 nt, synthetic construct
  misc_feature 1..19: note = Description of Artificial Sequence: Synthetic oligonucleotide
  source 1..19: mol_type = other RNA
ctctccagctccatcacct

SEQ ID NO: 2671 - RNA, 19 nt, synthetic construct
  misc_feature 1..19: note = Description of Artificial Sequence: Synthetic oligonucleotide
  source 1..19: mol_type = other RNA
gctctccagctccatcacc

SEQ ID NO: 2672 - RNA, 19 nt, synthetic construct
  misc_feature 1..19: note = Description of Artificial Sequence: Synthetic oligonucleotide
  source 1..19: mol_type = other RNA
tgctctccagctccatcac

SEQ ID NO: 2673 - RNA, 19 nt, synthetic construct
  misc_feature 1..19: note = Description of Artificial Sequence: Synthetic oligonucleotide
  source 1..19: mol_type = other RNA
ttgctctccagctccatca

SEQ ID NO: 2674 - RNA, 19 nt, synthetic construct
  misc_feature 1..19: note = Description of Artificial Sequence: Synthetic oligonucleotide
  source 1..19: mol_type = other RNA
gttgctctccagctccatc

SEQ ID NO: 2675 - RNA, 19 nt, synthetic construct
  misc_feature 1..19: note = Description of Artificial Sequence: Synthetic oligonucleotide
  source 1..19: mol_type = other RNA
tgttgctctccagctccat

SEQ ID NO: 2676 - RNA, 19 nt, synthetic construct
  misc_feature 1..19: note = Description of Artificial Sequence: Synthetic oligonucleotide
  source 1..19: mol_type = other RNA
ctgttgctctccagctcca

SEQ ID NO: 2677 - RNA, 19 nt, synthetic construct
  misc_feature 1..19: note = Description of Artificial Sequence: Synthetic oligonucleotide
  source 1..19: mol_type = other RNA
gctgttgctctccagctcc

SEQ ID NO: 2678 - RNA, 19 nt, synthetic construct
  misc_feature 1..19: note = Description of Artificial Sequence: Synthetic oligonucleotide
  source 1..19: mol_type = other RNA
tgctgttgctctccagctc

SEQ ID NO: 2679 - RNA, 19 nt, synthetic construct
  misc_feature 1..19: note = Description of Artificial Sequence: Synthetic oligonucleotide
  source 1..19: mol_type = other RNA
ttgctgttgctctccagct

SEQ ID NO: 2680 - RNA, 19 nt, synthetic construct
  misc_feature 1..19: note = Description of Artificial Sequence: Synthetic oligonucleotide
  source 1..19: mol_type = other RNA
cttgctgttgctctccagc

SEQ ID NO: 2681 - RNA, 19 nt, synthetic construct
  misc_feature 1..19: note = Description of Artificial Sequence: Synthetic oligonucleotide
  source 1..19: mol_type = other RNA
gcttgctgttgctctccag

SEQ ID NO: 2682 - RNA, 19 nt, synthetic construct
  misc_feature 1..19: note = Description of Artificial Sequence: Synthetic oligonucleotide
  source 1..19: mol_type = other RNA
cgcttgctgttgctctcca

SEQ ID NO: 2683 - RNA, 19 nt, synthetic construct
  misc_feature 1..19: note = Description of Artificial Sequence: Synthetic oligonucleotide
  source 1..19: mol_type = other RNA
gcgcttgctgttgctctcc

SEQ ID NO: 2684 - RNA, 19 nt, synthetic construct
  misc_feature 1..19: note = Description of Artificial Sequence: Synthetic oligonucleotide
  source 1..19: mol_type = other RNA
tgcgcttgctgttgctctc

SEQ ID NO: 2685 - RNA, 19 nt, synthetic construct
  misc_feature 1..19: note = Description of Artificial Sequence: Synthetic oligonucleotide
  source 1..19: mol_type = other RNA
atgcgcttgctgttgctct

SEQ ID NO: 2686 - RNA, 19 nt, synthetic construct
  misc_feature 1..19: note = Description of Artificial Sequence: Synthetic oligonucleotide
  source 1..19: mol_type = other RNA
catgcgcttgctgttgctc

SEQ ID NO: 2687 - RNA, 19 nt, synthetic construct
  misc_feature 1..19: note = Description of Artificial Sequence: Synthetic oligonucleotide
  source 1..19: mol_type = other RNA
ccatgcgcttgctgttgct

SEQ ID NO: 2688 - RNA, 19 nt, synthetic construct
  misc_feature 1..19: note = Description of Artificial Sequence: Synthetic oligonucleotide
  source 1..19: mol_type = other RNA
tccatgcgcttgctgttgc

SEQ ID NO: 2689 - RNA, 19 nt, synthetic construct
  misc_feature 1..19: note = Description of Artificial Sequence: Synthetic oligonucleotide
  source 1..19: mol_type = other RNA
ctccatgcgcttgctgttg

SEQ ID NO: 2690 - RNA, 19 nt, synthetic construct
  misc_feature 1..19: note = Description of Artificial Sequence: Synthetic oligonucleotide
  source 1..19: mol_type = other RNA
actccatgcgcttgctgtt

SEQ ID NO: 2691 - RNA, 19 nt, synthetic construct
  misc_feature 1..19: note = Description of Artificial Sequence: Synthetic oligonucleotide
  source 1..19: mol_type = other RNA
gactccatgcgcttgctgt

SEQ ID NO: 2692 - RNA, 19 nt, synthetic construct
  misc_feature 1..19: note = Description of Artificial Sequence: Synthetic oligonucleotide
  source 1..19: mol_type = other RNA
cgactccatgcgcttgctg

SEQ ID NO: 2693 - RNA, 19 nt, synthetic construct
  misc_feature 1..19: note = Description of Artificial Sequence: Synthetic oligonucleotide
  source 1..19: mol_type = other RNA
gcgactccatgcgcttgct

SEQ ID NO: 2694 - RNA, 19 nt, synthetic construct
  misc_feature 1..19: note = Description of Artificial Sequence: Synthetic oligonucleotide
  source 1..19: mol_type = other RNA
cgcgactccatgcgcttgc

SEQ ID NO: 2695 - RNA, 19 nt, synthetic construct
  misc_feature 1..19: note = Description of Artificial Sequence: Synthetic oligonucleotide
  source 1..19: mol_type = other RNA
ccgcgactccatgcgcttg

SEQ ID NO: 2696 - RNA, 19 nt, synthetic construct
  misc_feature 1..19: note = Description of Artificial Sequence: Synthetic oligonucleotide
  source 1..19: mol_type = other RNA
gccgcgactccatgcgctt

SEQ ID NO: 2697 - RNA, 19 nt, synthetic construct
  misc_feature 1..19: note = Description of Artificial Sequence: Synthetic oligonucleotide
  source 1..19: mol_type = other RNA
agccgcgactccatgcgct

SEQ ID NO: 2698 - RNA, 19 nt, synthetic construct
  misc_feature 1..19: note = Description of Artificial Sequence: Synthetic oligonucleotide
  source 1..19: mol_type = other RNA
gagccgcgactccatgcgc

SEQ ID NO: 2699 - RNA, 19 nt, synthetic construct
  misc_feature 1..19: note = Description of Artificial Sequence: Synthetic oligonucleotide
  source 1..19: mol_type = other RNA
tgagccgcgactccatgcg

SEQ ID NO: 2700 - RNA, 19 nt, synthetic construct
  misc_feature 1..19: note = Description of Artificial Sequence: Synthetic oligonucleotide
  source 1..19: mol_type = other RNA
gtgagccgcgactccatgc

SEQ ID NO: 2701 - RNA, 19 nt, synthetic construct
  misc_feature 1..19: note = Description of Artificial Sequence: Synthetic oligonucleotide
  source 1..19: mol_type = other RNA
tgtgagccgcgactccatg

SEQ ID NO: 2702 - RNA, 19 nt, synthetic construct
  misc_feature 1..19: note = Description of Artificial Sequence: Synthetic oligonucleotide
  source 1..19: mol_type = other RNA
ctgtgagccgcgactccat

SEQ ID NO: 2703 - RNA, 19 nt, synthetic construct
  misc_feature 1..19: note = Description of Artificial Sequence: Synthetic oligonucleotide
  source 1..19: mol_type = other RNA
tctgtgagccgcgactcca

SEQ ID NO: 2704 - RNA, 19 nt, synthetic construct
  misc_feature 1..19: note = Description of Artificial Sequence: Synthetic oligonucleotide
  source 1..19: mol_type = other RNA
atctgtgagccgcgactcc

SEQ ID NO: 2705 - RNA, 19 nt, synthetic construct
  misc_feature 1..19: note = Description of Artificial Sequence: Synthetic oligonucleotide
  source 1..19: mol_type = other RNA
catctgtgagccgcgactc

SEQ ID NO: 2706 - RNA, 19 nt, synthetic construct
  misc_feature 1..19: note = Description of Artificial Sequence: Synthetic oligonucleotide
  source 1..19: mol_type = other RNA
gcatctgtgagccgcgact

SEQ ID NO: 2707 - RNA, 19 nt, synthetic construct
  misc_feature 1..19: note = Description of Artificial Sequence: Synthetic oligonucleotide
  source 1..19: mol_type = other RNA
agcatctgtgagccgcgac

SEQ ID NO: 2708 - RNA, 19 nt, synthetic construct
  misc_feature 1..19: note = Description of Artificial Sequence: Synthetic oligonucleotide
  source 1..19: mol_type = other RNA
cagcatctgtgagccgcga

SEQ ID NO: 2709 - RNA, 19 nt, synthetic construct
  misc_feature 1..19: note = Description of Artificial Sequence: Synthetic oligonucleotide
  source 1..19: mol_type = other RNA
tcagcatctgtgagccgcg

SEQ ID NO: 2710 - RNA, 19 nt, synthetic construct
  misc_feature 1..19: note = Description of Artificial Sequence: Synthetic oligonucleotide
  source 1..19: mol_type = other RNA
ctcagcatctgtgagccgc

SEQ ID NO: 2711 - RNA, 19 nt, synthetic construct
  misc_feature 1..19: note = Description of Artificial Sequence: Synthetic oligonucleotide
  source 1..19: mol_type = other RNA
tctcagcatctgtgagccg

SEQ ID NO: 2712 - RNA, 19 nt, synthetic construct
  misc_feature 1..19: note = Description of Artificial Sequence: Synthetic oligonucleotide
  source 1..19: mol_type = other RNA
ctctcagcatctgtgagcc

SEQ ID NO: 2713 - RNA, 19 nt, synthetic construct
  misc_feature 1..19: note = Description of Artificial Sequence: Synthetic oligonucleotide
  source 1..19: mol_type = other RNA
gctctcagcatctgtgagc

SEQ ID NO: 2714 - RNA, 19 nt, synthetic construct
  misc_feature 1..19: note = Description of Artificial Sequence: Synthetic oligonucleotide
  source 1..19: mol_type = other RNA
tgctctcagcatctgtgag

SEQ ID NO: 2715 - RNA, 19 nt, synthetic construct
  misc_feature 1..19: note = Description of Artificial Sequence: Synthetic oligonucleotide
  source 1..19: mol_type = other RNA
ttgctctcagcatctgtga

SEQ ID NO: 2716 - RNA, 19 nt, synthetic construct
  misc_feature 1..19: note = Description of Artificial Sequence: Synthetic oligonucleotide
  source 1..19: mol_type = other RNA
cttgctctcagcatctgtg

SEQ ID NO: 2717 - RNA, 19 nt, synthetic construct
  misc_feature 1..19: note = Description of Artificial Sequence: Synthetic oligonucleotide
  source 1..19: mol_type = other RNA
acttgctctcagcatctgt

SEQ ID NO: 2718 - RNA, 19 nt, synthetic construct
  misc_feature 1..19: note = Description of Artificial Sequence: Synthetic oligonucleotide
  source 1..19: mol_type = other RNA
tacttgctctcagcatctg

SEQ ID NO: 2719 - RNA, 19 nt, synthetic construct
  misc_feature 1..19: note = Description of Artificial Sequence: Synthetic oligonucleotide
  source 1..19: mol_type = other RNA
gtacttgctctcagcatct

SEQ ID NO: 2720 - RNA, 19 nt, synthetic construct
  misc_feature 1..19: note = Description of Artificial Sequence: Synthetic oligonucleotide
  source 1..19: mol_type = other RNA
agtacttgctctcagcatc

SEQ ID NO: 2721 - RNA, 19 nt, synthetic construct
  misc_feature 1..19: note = Description of Artificial Sequence: Synthetic oligonucleotide
  source 1..19: mol_type = other RNA
gagtacttgctctcagcat

SEQ ID NO: 2722 - RNA, 19 nt, synthetic construct
  misc_feature 1..19: note = Description of Artificial Sequence: Synthetic oligonucleotide
  source 1..19: mol_type = other RNA
ggagtacttgctctcagca

SEQ ID NO: 2723 - RNA, 19 nt, synthetic construct
  misc_feature 1..19: note = Description of Artificial Sequence: Synthetic oligonucleotide
  source 1..19: mol_type = other RNA
cggagtacttgctctcagc

SEQ ID NO: 2724 - RNA, 19 nt, synthetic construct
  misc_feature 1..19: note = Description of Artificial Sequence: Synthetic oligonucleotide
  source 1..19: mol_type = other RNA
tcggagtacttgctctcag

SEQ ID NO: 2725 - RNA, 19 nt, synthetic construct
  misc_feature 1..19: note = Description of Artificial Sequence: Synthetic oligonucleotide
  source 1..19: mol_type = other RNA
ctcggagtacttgctctca

SEQ ID NO: 2726 - RNA, 19 nt, synthetic construct
  misc_feature 1..19: note = Description of Artificial Sequence: Synthetic oligonucleotide
  source 1..19: mol_type = other RNA
tctcggagtacttgctctc

SEQ ID NO: 2727 - RNA, 19 nt, synthetic construct
  misc_feature 1..19: note = Description of Artificial Sequence: Synthetic oligonucleotide
  source 1..19: mol_type = other RNA
atctcggagtacttgctct

SEQ ID NO: 2728 - RNA, 19 nt, synthetic construct
  misc_feature 1..19: note = Description of Artificial Sequence: Synthetic oligonucleotide
  source 1..19: mol_type = other RNA
catctcggagtacttgctc

SEQ ID NO: 2729 - RNA, 19 nt, synthetic construct
  misc_feature 1..19: note = Description of Artificial Sequence: Synthetic oligonucleotide
  source 1..19: mol_type = other RNA
tcatctcggagtacttgct

SEQ ID NO: 2730 - RNA, 19 nt, synthetic construct
  misc_feature 1..19: note = Description of Artificial Sequence: Synthetic oligonucleotide
  source 1..19: mol_type = other RNA
ttcatctcggagtacttgc

SEQ ID NO: 2731 - RNA, 19 nt, synthetic construct
  misc_feature 1..19: note = Description of Artificial Sequence: Synthetic oligonucleotide
  source 1..19: mol_type = other RNA
gttcatctcggagtacttg

SEQ ID NO: 2732 - RNA, 19 nt, synthetic construct
  misc_feature 1..19: note = Description of Artificial Sequence: Synthetic oligonucleotide
  source 1..19: mol_type = other RNA
tgttcatctcggagtactt

SEQ ID NO: 2733 - RNA, 19 nt, synthetic construct
  misc_feature 1..19: note = Description of Artificial Sequence: Synthetic oligonucleotide
  source 1..19: mol_type = other RNA
ttgttcatctcggagtact

SEQ ID NO: 2734 - RNA, 19 nt, synthetic construct
  misc_feature 1..19: note = Description of Artificial Sequence: Synthetic oligonucleotide
  source 1..19: mol_type = other RNA
gttgttcatctcggagtac

SEQ ID NO: 2735 - RNA, 19 nt, synthetic construct
  misc_feature 1..19: note = Description of Artificial Sequence: Synthetic oligonucleotide
  source 1..19: mol_type = other RNA
ggttgttcatctcggagta

SEQ ID NO: 2736 - RNA, 19 nt, synthetic construct
  misc_feature 1..19: note = Description of Artificial Sequence: Synthetic oligonucleotide
  source 1..19: mol_type = other RNA
tggttgttcatctcggagt

SEQ ID NO: 2737 - RNA, 19 nt, synthetic construct
  misc_feature 1..19: note = Description of Artificial Sequence: Synthetic oligonucleotide
  source 1..19: mol_type = other RNA
ttggttgttcatctcggag

SEQ ID NO: 2738 - RNA, 19 nt, synthetic construct
  misc_feature 1..19: note = Description of Artificial Sequence: Synthetic oligonucleotide
  source 1..19: mol_type = other RNA
tttggttgttcatctcgga

SEQ ID NO: 2739 - RNA, 19 nt, synthetic construct
  misc_feature 1..19: note = Description of Artificial Sequence: Synthetic oligonucleotide
  source 1..19: mol_type = other RNA
atttggttgttcatctcgg

SEQ ID NO: 2740 - RNA, 19 nt, synthetic construct
  misc_feature 1..19: note = Description of Artificial Sequence: Synthetic oligonucleotide
  source 1..19: mol_type = other RNA
aatttggttgttcatctcg

SEQ ID NO: 2741 - RNA, 19 nt, synthetic construct
  misc_feature 1..19: note = Description of Artificial Sequence: Synthetic oligonucleotide
  source 1..19: mol_type = other RNA
caatttggttgttcatctc

SEQ ID NO: 2742 - RNA, 19 nt, synthetic construct
  misc_feature 1..19: note = Description of Artificial Sequence: Synthetic oligonucleotide
  source 1..19: mol_type = other RNA
tcaatttggttgttcatct

SEQ ID NO: 2743 - RNA, 19 nt, synthetic construct
  misc_feature 1..19: note = Description of Artificial Sequence: Synthetic oligonucleotide
  source 1..19: mol_type = other RNA
gtcaatttggttgttcatc

SEQ ID NO: 2744 - RNA, 19 nt, synthetic construct
  misc_feature 1..19: note = Description of Artificial Sequence: Synthetic oligonucleotide
  source 1..19: mol_type = other RNA
tgtcaatttggttgttcat

SEQ ID NO: 2745 - RNA, 19 nt, synthetic construct
  misc_feature 1..19: note = Description of Artificial Sequence: Synthetic oligonucleotide
  source 1..19: mol_type = other RNA
atgtcaatttggttgttca

SEQ ID NO: 2746 - RNA, 19 nt, synthetic construct
  misc_feature 1..19: note = Description of Artificial Sequence: Synthetic oligonucleotide
  source 1..19: mol_type = other RNA
gatgtcaatttggttgttc

SEQ ID NO: 2747 - RNA, 19 nt, synthetic construct
  misc_feature 1..19: note = Description of Artificial Sequence: Synthetic oligonucleotide
  source 1..19: mol_type = other RNA
tgatgtcaatttggttgtt

SEQ ID NO: 2748 - RNA, 19 nt, synthetic construct
  misc_feature 1..19: note = Description of Artificial Sequence: Synthetic oligonucleotide
  source 1..19: mol_type = other RNA
atgatgtcaatttggttgt

SEQ ID NO: 2749 - RNA, 19 nt, synthetic construct
  misc_feature 1..19: note = Description of Artificial Sequence: Synthetic oligonucleotide
  source 1..19: mol_type = other RNA
catgatgtcaatttggttg

SEQ ID NO: 2750 - RNA, 19 nt, synthetic construct
  misc_feature 1..19: note = Description of Artificial Sequence: Synthetic oligonucleotide
  source 1..19: mol_type = other RNA
gcatgatgtcaatttggtt

SEQ ID NO: 2751 - RNA, 19 nt, synthetic construct
  misc_feature 1..19: note = Description of Artificial Sequence: Synthetic oligonucleotide
  source 1..19: mol_type = other RNA
tgcatgatgtcaatttggt

SEQ ID NO: 2752 - RNA, 19 nt, synthetic construct
  misc_feature 1..19: note = Description of Artificial Sequence: Synthetic oligonucleotide
  source 1..19: mol_type = other RNA
ctgcatgatgtcaatttgg

SEQ ID NO: 2753 - RNA, 19 nt, synthetic construct
  misc_feature 1..19: note = Description of Artificial Sequence: Synthetic oligonucleotide
  source 1..19: mol_type = other RNA
gctgcatgatgtcaatttg

SEQ ID NO: 2754 - RNA, 19 nt, synthetic construct
  misc_feature 1..19: note = Description of Artificial Sequence: Synthetic oligonucleotide
  source 1..19: mol_type = other RNA
agctgcatgatgtcaattt

SEQ ID NO: 2755 - RNA, 19 nt, synthetic construct
  misc_feature 1..19: note = Description of Artificial Sequence: Synthetic oligonucleotide
  source 1..19: mol_type = other RNA
cagctgcatgatgtcaatt

SEQ ID NO: 2756 - RNA, 19 nt, synthetic construct
  misc_feature 1..19: note = Description of Artificial Sequence: Synthetic oligonucleotide
  source 1..19: mol_type = other RNA
gcagctgcatgatgtcaat

SEQ ID NO: 2757 - RNA, 19 nt, synthetic construct
  misc_feature 1..19: note = Description of Artificial Sequence: Synthetic oligonucleotide
  source 1..19: mol_type = other RNA
tgcagctgcatgatgtcaa

SEQ ID NO: 2758 - RNA, 19 nt, synthetic construct
  misc_feature 1..19: note = Description of Artificial Sequence: Synthetic oligonucleotide
  source 1..19: mol_type = other RNA
ctgcagctgcatgatgtca

SEQ ID NO: 2759 - RNA, 19 nt, synthetic construct
  misc_feature 1..19: note = Description of Artificial Sequence: Synthetic oligonucleotide
  source 1..19: mol_type = other RNA
cctgcagctgcatgatgtc

SEQ ID NO: 2760 - RNA, 19 nt, synthetic construct
  misc_feature 1..19: note = Description of Artificial Sequence: Synthetic oligonucleotide
  source 1..19: mol_type = other RNA
gcctgcagctgcatgatgt

SEQ ID NO: 2761 - RNA, 19 nt, synthetic construct
  misc_feature 1..19: note = Description of Artificial Sequence: Synthetic oligonucleotide
  source 1..19: mol_type = other RNA
tgcctgcagctgcatgatg

SEQ ID NO: 2762 - RNA, 19 nt, synthetic construct
  misc_feature 1..19: note = Description of Artificial Sequence: Synthetic oligonucleotide
  source 1..19: mol_type = other RNA
ctgcctgcagctgcatgat

SEQ ID NO: 2763 - RNA, 19 nt, synthetic construct
  misc_feature 1..19: note = Description of Artificial Sequence: Synthetic oligonucleotide
  source 1..19: mol_type = other RNA
gctgcctgcagctgcatga

SEQ ID NO: 2764 - RNA, 19 nt, synthetic construct
  misc_feature 1..19: note = Description of Artificial Sequence: Synthetic oligonucleotide
  source 1..19: mol_type = other RNA
tgctgcctgcagctgcatg

SEQ ID NO: 2765 - RNA, 19 nt, synthetic construct
  misc_feature 1..19: note = Description of Artificial Sequence: Synthetic oligonucleotide
  source 1..19: mol_type = other RNA
gtgctgcctgcagctgcat

SEQ ID NO: 2766 - RNA, 19 nt, synthetic construct
  misc_feature 1..19: note = Description of Artificial Sequence: Synthetic oligonucleotide
  source 1..19: mol_type = other RNA
tgtgctgcctgcagctgca

SEQ ID NO: 2767 - RNA, 19 nt, synthetic construct
  misc_feature 1..19: note = Description of Artificial Sequence: Synthetic oligonucleotide
  source 1..19: mol_type = other RNA
ctgtgctgcctgcagctgc

SEQ ID NO: 2768 - RNA, 19 nt, synthetic construct
  misc_feature 1..19: note = Description of Artificial Sequence: Synthetic oligonucleotide
  source 1..19: mol_type = other RNA
tctgtgctgcctgcagctg

SEQ ID NO: 2769 - RNA, 19 nt, synthetic construct
  misc_feature 1..19: note = Description of Artificial Sequence: Synthetic oligonucleotide
  source 1..19: mol_type = other RNA
gtctgtgctgcctgcagct

SEQ ID NO: 2770 - RNA, 19 nt, synthetic construct
  misc_feature 1..19: note = Description of Artificial Sequence: Synthetic oligonucleotide
  source 1..19: mol_type = other RNA
cgtctgtgctgcctgcagc

SEQ ID NO: 2771 - RNA, 19 nt, synthetic construct
  misc_feature 1..19: note = Description of Artificial Sequence: Synthetic oligonucleotide
  source 1..19: mol_type = other RNA
ccgtctgtgctgcctgcag

SEQ ID NO: 2772 - RNA, 19 nt, synthetic construct
  misc_feature 1..19: note = Description of Artificial Sequence: Synthetic oligonucleotide
  source 1..19: mol_type = other RNA
accgtctgtgctgcctgca

SEQ ID NO: 2773 - RNA, 19 nt, synthetic construct
  misc_feature 1..19: note = Description of Artificial Sequence: Synthetic oligonucleotide
  source 1..19: mol_type = other RNA
gaccgtctgtgctgcctgc

SEQ ID NO: 2774 - RNA, 19 nt, synthetic construct
  misc_feature 1..19: note = Description of Artificial Sequence: Synthetic oligonucleotide
  source 1..19: mol_type = other RNA
tgaccgtctgtgctgcctg

SEQ ID NO: 2775 - RNA, 19 nt, synthetic construct
  misc_feature 1..19: note = Description of Artificial Sequence: Synthetic oligonucleotide
  source 1..19: mol_type = other RNA
gtgaccgtctgtgctgcct

SEQ ID NO: 2776 - RNA, 19 nt, synthetic construct
  misc_feature 1..19: note = Description of Artificial Sequence: Synthetic oligonucleotide
  source 1..19: mol_type = other RNA
agtgaccgtctgtgctgcc

SEQ ID NO: 2777 - RNA, 19 nt, synthetic construct
  misc_feature 1..19: note = Description of Artificial Sequence: Synthetic oligonucleotide
  source 1..19: mol_type = other RNA
gagtgaccgtctgtgctgc

SEQ ID NO: 2778 - RNA, 19 nt, synthetic construct
  misc_feature 1..19: note = Description of Artificial Sequence: Synthetic oligonucleotide
  source 1..19: mol_type = other RNA
tgagtgaccgtctgtgctg

SEQ ID NO: 2779 - RNA, 19 nt, synthetic construct
  misc_feature 1..19: note = Description of Artificial Sequence: Synthetic oligonucleotide
  source 1..19: mol_type = other RNA
ctgagtgaccgtctgtgct

SEQ ID NO: 2780 - RNA, 19 nt, synthetic construct
  misc_feature 1..19: note = Description of Artificial Sequence: Synthetic oligonucleotide
  source 1..19: mol_type = other RNA
tctgagtgaccgtctgtgc

SEQ ID NO: 2781 - RNA, 19 nt, synthetic construct
  misc_feature 1..19: note = Description of Artificial Sequence: Synthetic oligonucleotide
  source 1..19: mol_type = other RNA
gtctgagtgaccgtctgtg

SEQ ID NO: 2782 - RNA, 19 nt, synthetic construct
  misc_feature 1..19: note = Description of Artificial Sequence: Synthetic oligonucleotide
  source 1..19: mol_type = other RNA
ggtctgagtgaccgtctgt

SEQ ID NO: 2783 - RNA, 19 nt, synthetic construct
  misc_feature 1..19: note = Description of Artificial Sequence: Synthetic oligonucleotide
  source 1..19: mol_type = other RNA
aggtctgagtgaccgtctg

SEQ ID NO: 2784 - RNA, 19 nt, synthetic construct
  misc_feature 1..19: note = Description of Artificial Sequence: Synthetic oligonucleotide
  source 1..19: mol_type = other RNA
gaggtctgagtgaccgtct

SEQ ID NO: 2785 - RNA, 19 nt, synthetic construct
  misc_feature 1..19: note = Description of Artificial Sequence: Synthetic oligonucleotide
  source 1..19: mol_type = other RNA
ggaggtctgagtgaccgtc

SEQ ID NO: 2786 - RNA, 19 nt, synthetic construct
  misc_feature 1..19: note = Description of Artificial Sequence: Synthetic oligonucleotide
  source 1..19: mol_type = other RNA
cggaggtctgagtgaccgt

SEQ ID NO: 2787 - RNA, 19 nt, synthetic construct
  misc_feature 1..19: note = Description of Artificial Sequence: Synthetic oligonucleotide
  source 1..19: mol_type = other RNA
gcggaggtctgagtgaccg

SEQ ID NO: 2788 - RNA, 19 nt, synthetic construct
  misc_feature 1..19: note = Description of Artificial Sequence: Synthetic oligonucleotide
  source 1..19: mol_type = other RNA
tgcggaggtctgagtgacc

SEQ ID NO: 2789 - RNA, 19 nt, synthetic construct
  misc_feature 1..19: note = Description of Artificial Sequence: Synthetic oligonucleotide
  source 1..19: mol_type = other RNA
ctgcggaggtctgagtgac

SEQ ID NO: 2790 - RNA, 19 nt, synthetic construct
  misc_feature 1..19: note = Description of Artificial Sequence: Synthetic oligonucleotide
  source 1..19: mol_type = other RNA
tctgcggaggtctgagtga

SEQ ID NO: 2791 - RNA, 19 nt, synthetic construct
  misc_feature 1..19: note = Description of Artificial Sequence: Synthetic oligonucleotide
  source 1..19: mol_type = other RNA
atctgcggaggtctgagtg

SEQ ID NO: 2792 - RNA, 19 nt, synthetic construct
  misc_feature 1..19: note = Description of Artificial Sequence: Synthetic oligonucleotide
  source 1..19: mol_type = other RNA
catctgcggaggtctgagt

SEQ ID NO: 2793 - RNA, 19 nt, synthetic construct
  misc_feature 1..19: note = Description of Artificial Sequence: Synthetic oligonucleotide
  source 1..19: mol_type = other RNA
gcatctgcggaggtctgag

SEQ ID NO: 2794 - RNA, 19 nt, synthetic construct
  misc_feature 1..19: note = Description of Artificial Sequence: Synthetic oligonucleotide
  source 1..19: mol_type = other RNA
ggcatctgcggaggtctga

SEQ ID NO: 2795 - RNA, 19 nt, synthetic construct
  misc_feature 1..19: note = Description of Artificial Sequence: Synthetic oligonucleotide
  source 1..19: mol_type = other RNA
tggcatctgcggaggtctg

SEQ ID NO: 2796 - RNA, 19 nt, synthetic construct
  misc_feature 1..19: note = Description of Artificial Sequence: Synthetic oligonucleotide
  source 1..19: mol_type = other RNA
atggcatctgcggaggtct

SEQ ID NO: 2797 - RNA, 19 nt, synthetic construct
  misc_feature 1..19: note = Description of Artificial Sequence: Synthetic oligonucleotide
  source 1..19: mol_type = other RNA
gatggcatctgcggaggtc

SEQ ID NO: 2798 - RNA, 19 nt, synthetic construct
  misc_feature 1..19: note = Description of Artificial Sequence: Synthetic oligonucleotide
  source 1..19: mol_type = other RNA
agatggcatctgcggaggt

SEQ ID NO: 2799 - RNA, 19 nt, synthetic construct
  misc_feature 1..19: note = Description of Artificial Sequence: Synthetic oligonucleotide
  source 1..19: mol_type = other RNA
tagatggcatctgcggagg

SEQ ID NO: 2800 - RNA, 19 nt, synthetic construct
  misc_feature 1..19: note = Description of Artificial Sequence: Synthetic oligonucleotide
  source 1..19: mol_type = other RNA
gtagatggcatctgcggag

SEQ ID NO: 2801 - RNA, 19 nt, synthetic construct
  misc_feature 1..19: note = Description of Artificial Sequence: Synthetic oligonucleotide
  source 1..19: mol_type = other RNA
cgtagatggcatctgcgga

SEQ ID NO: 2802 - RNA, 19 nt, synthetic construct
  misc_feature 1..19: note = Description of Artificial Sequence: Synthetic oligonucleotide
  source 1..19: mol_type = other RNA
tcgtagatggcatctgcgg

SEQ ID NO: 2803 - RNA, 19 nt, synthetic construct
  misc_feature 1..19: note = Description of Artificial Sequence: Synthetic oligonucleotide
  source 1..19: mol_type = other RNA
gtcgtagatggcatctgcg

SEQ ID NO: 2804 - RNA, 19 nt, synthetic construct
  misc_feature 1..19: note = Description of Artificial Sequence: Synthetic oligonucleotide
  source 1..19: mol_type = other RNA
agtcgtagatggcatctgc

SEQ ID NO: 2805 - RNA, 19 nt, synthetic construct
  misc_feature 1..19: note = Description of Artificial Sequence: Synthetic oligonucleotide
  source 1..19: mol_type = other RNA
cagtcgtagatggcatctg

SEQ ID NO: 2806 - RNA, 19 nt, synthetic construct
  misc_feature 1..19: note = Description of Artificial Sequence: Synthetic oligonucleotide
  source 1..19: mol_type = other RNA
gcagtcgtagatggcatct

SEQ ID NO: 2807 - RNA, 19 nt, synthetic construct
  misc_feature 1..19: note = Description of Artificial Sequence: Synthetic oligonucleotide
  source 1..19: mol_type = other RNA
agcagtcgtagatggcatc

SEQ ID NO: 2808 - RNA, 19 nt, synthetic construct
  misc_feature 1..19: note = Description of Artificial Sequence: Synthetic oligonucleotide
  source 1..19: mol_type = other RNA
gagcagtcgtagatggcat

SEQ ID NO: 2809 - RNA, 19 nt, synthetic construct
  misc_feature 1..19: note = Description of Artificial Sequence: Synthetic oligonucleotide
  source 1..19: mol_type = other RNA
agagcagtcgtagatggca

SEQ ID NO: 2810 - RNA, 19 nt, synthetic construct
  misc_feature 1..19: note = Description of Artificial Sequence: Synthetic oligonucleotide
  source 1..19: mol_type = other RNA
aagagcagtcgtagatggc

SEQ ID NO: 2811 - RNA, 19 nt, synthetic construct
  misc_feature 1..19: note = Description of Artificial Sequence: Synthetic oligonucleotide
  source 1..19: mol_type = other RNA
gaagagcagtcgtagatgg

SEQ ID NO: 2812 - RNA, 19 nt, synthetic construct
  misc_feature 1..19: note = Description of Artificial Sequence: Synthetic oligonucleotide
  source 1..19: mol_type = other RNA
ggaagagcagtcgtagatg

SEQ ID NO: 2813 - RNA, 19 nt, synthetic construct
  misc_feature 1..19: note = Description of Artificial Sequence: Synthetic oligonucleotide
  source 1..19: mol_type = other RNA
gggaagagcagtcgtagat

SEQ ID NO: 2814 - RNA, 19 nt, synthetic construct
  misc_feature 1..19: note = Description of Artificial Sequence: Synthetic oligonucleotide
  source 1..19: mol_type = other RNA
agggaagagcagtcgtaga

SEQ ID NO: 2815 - RNA, 19 nt, synthetic construct
  misc_feature 1..19: note = Description of Artificial Sequence: Synthetic oligonucleotide
  source 1..19: mol_type = other RNA
gagggaagagcagtcgtag

SEQ ID NO: 2816 - RNA, 19 nt, synthetic construct
  misc_feature 1..19: note = Description of Artificial Sequence: Synthetic oligonucleotide
  source 1..19: mol_type = other RNA
agagggaagagcagtcgta

SEQ ID NO: 2817 - RNA, 19 nt, synthetic construct
  misc_feature 1..19: note = Description of Artificial Sequence: Synthetic oligonucleotide
  source 1..19: mol_type = other RNA
tagagggaagagcagtcgt

SEQ ID NO: 2818 - RNA, 19 nt, synthetic construct
  misc_feature 1..19: note = Description of Artificial Sequence: Synthetic oligonucleotide
  source 1..19: mol_type = other RNA
gtagagggaagagcagtcg

SEQ ID NO: 2819 - RNA, 19 nt, synthetic construct
  misc_feature 1..19: note = Description of Artificial Sequence: Synthetic oligonucleotide
  source 1..19: mol_type = other RNA
ggtagagggaagagcagtc

SEQ ID NO: 2820 - RNA, 19 nt, synthetic construct
  misc_feature 1..19: note = Description of Artificial Sequence: Synthetic oligonucleotide
  source 1..19: mol_type = other RNA
tggtagagggaagagcagt

SEQ ID NO: 2821 - RNA, 19 nt, synthetic construct
  misc_feature 1..19: note = Description of Artificial Sequence: Synthetic oligonucleotide
  source 1..19: mol_type = other RNA
ctggtagagggaagagcag

SEQ ID NO: 2822 - RNA, 19 nt, synthetic construct
  misc_feature 1..19: note = Description of Artificial Sequence: Synthetic oligonucleotide
  source 1..19: mol_type = other RNA
tctggtagagggaagagca

SEQ ID NO: 2823 - RNA, 19 nt, synthetic construct
  misc_feature 1..19: note = Description of Artificial Sequence: Synthetic oligonucleotide
  source 1..19: mol_type = other RNA
ttctggtagagggaagagc

SEQ ID NO: 2824 - RNA, 19 nt, synthetic construct
  misc_feature 1..19: note = Description of Artificial Sequence: Synthetic oligonucleotide
  source 1..19: mol_type = other RNA
cttctggtagagggaagag

SEQ ID NO: 2825 - RNA, 19 nt, synthetic construct
  misc_feature 1..19: note = Description of Artificial Sequence: Synthetic oligonucleotide
  source 1..19: mol_type = other RNA
tcttctggtagagggaaga

SEQ ID NO: 2826 - RNA, 19 nt, synthetic construct
  misc_feature 1..19: note = Description of Artificial Sequence: Synthetic oligonucleotide
  source 1..19: mol_type = other RNA
ttcttctggtagagggaag

SEQ ID NO: 2827 - RNA, 19 nt, synthetic construct
  misc_feature 1..19: note = Description of Artificial Sequence: Synthetic oligonucleotide
  source 1..19: mol_type = other RNA
gttcttctggtagagggaa

SEQ ID NO: 2828 - RNA, 19 nt, synthetic construct
  misc_feature 1..19: note = Description of Artificial Sequence: Synthetic oligonucleotide
  source 1..19: mol_type = other RNA
agttcttctggtagaggga

SEQ ID NO: 2829 - RNA, 19 nt, synthetic construct
  misc_feature 1..19: note = Description of Artificial Sequence: Synthetic oligonucleotide
  source 1..19: mol_type = other RNA
tagttcttctggtagaggg

SEQ ID NO: 2830 - RNA, 19 nt, synthetic construct
  misc_feature 1..19: note = Description of Artificial Sequence: Synthetic oligonucleotide
  source 1..19: mol_type = other RNA
gtagttcttctggtagagg

SEQ ID NO: 2831 - RNA, 19 nt, synthetic construct
  misc_feature 1..19: note = Description of Artificial Sequence: Synthetic oligonucleotide
  source 1..19: mol_type = other RNA
ggtagttcttctggtagag

SEQ ID NO: 2832 - RNA, 19 nt, synthetic construct
  misc_feature 1..19: note = Description of Artificial Sequence: Synthetic oligonucleotide
  source 1..19: mol_type = other RNA
cggtagttcttctggtaga

SEQ ID NO: 2833 - RNA, 19 nt, synthetic construct
  misc_feature 1..19: note = Description of Artificial Sequence: Synthetic oligonucleotide
  source 1..19: mol_type = other RNA
gcggtagttcttctggtag

SEQ ID NO: 2834 - RNA, 19 nt, synthetic construct
  misc_feature 1..19: note = Description of Artificial Sequence: Synthetic oligonucleotide
  source 1..19: mol_type = other RNA
tgcggtagttcttctggta

SEQ ID NO: 2835 - RNA, 19 nt, synthetic construct
  misc_feature 1..19: note = Description of Artificial Sequence: Synthetic oligonucleotide
  source 1..19: mol_type = other RNA
atgcggtagttcttctggt

SEQ ID NO: 2836 - RNA, 19 nt, synthetic construct
  misc_feature 1..19: note = Description of Artificial Sequence: Synthetic oligonucleotide
  source 1..19: mol_type = other RNA
gatgcggtagttcttctgg

SEQ ID NO: 2837 - RNA, 19 nt, synthetic construct
  misc_feature 1..19: note = Description of Artificial Sequence: Synthetic oligonucleotide
  source 1..19: mol_type = other RNA
agatgcggtagttcttctg

SEQ ID NO: 2838 - RNA, 19 nt, synthetic construct
  misc_feature 1..19: note = Description of Artificial Sequence: Synthetic oligonucleotide
  source 1..19: mol_type = other RNA
gagatgcggtagttcttct

SEQ ID NO: 2839 - RNA, 19 nt, synthetic construct
  misc_feature 1..19: note = Description of Artificial Sequence: Synthetic oligonucleotide
  source 1..19: mol_type = other RNA
agagatgcggtagttcttc

SEQ ID NO: 2840 - RNA, 19 nt, synthetic construct
  misc_feature 1..19: note = Description of Artificial Sequence: Synthetic oligonucleotide
  source 1..19: mol_type = other RNA
cagagatgcggtagttctt

SEQ ID NO: 2841 - RNA, 19 nt, synthetic construct
  misc_feature 1..19: note = Description of Artificial Sequence: Synthetic oligonucleotide
  source 1..19: mol_type = other RNA
ccagagatgcggtagttct

SEQ ID NO: 2842 - RNA, 19 nt, synthetic construct
  misc_feature 1..19: note = Description of Artificial Sequence: Synthetic oligonucleotide
  source 1..19: mol_type = other RNA
tccagagatgcggtagttc

SEQ ID NO: 2843 - RNA, 19 nt, synthetic construct
  misc_feature 1..19: note = Description of Artificial Sequence: Synthetic oligonucleotide
  source 1..19: mol_type = other RNA
ctccagagatgcggtagtt

SEQ ID NO: 2844 - RNA, 19 nt, synthetic construct
  misc_feature 1..19: note = Description of Artificial Sequence: Synthetic oligonucleotide
  source 1..19: mol_type = other RNA
actccagagatgcggtagt

SEQ ID NO: 2845 - RNA, 19 nt, synthetic construct
  misc_feature 1..19: note = Description of Artificial Sequence: Synthetic oligonucleotide
  source 1..19: mol_type = other RNA
cactccagagatgcggtag

SEQ ID NO: 2846 - RNA, 19 nt, synthetic construct
  misc_feature 1..19: note = Description of Artificial Sequence: Synthetic oligonucleotide
  source 1..19: mol_type = other RNA
acactccagagatgcggta

SEQ ID NO: 2847 - RNA, 19 nt, synthetic construct
  misc_feature 1..19: note = Description of Artificial Sequence: Synthetic oligonucleotide
  source 1..19: mol_type = other RNA
tacactccagagatgcggt

SEQ ID NO: 2848 - RNA, 19 nt, synthetic construct
  misc_feature 1..19: note = Description of Artificial Sequence: Synthetic oligonucleotide
  source 1..19: mol_type = other RNA
atacactccagagatgcgg

SEQ ID NO: 2849 - RNA, 19 nt, synthetic construct
  misc_feature 1..19: note = Description of Artificial Sequence: Synthetic oligonucleotide
  source 1..19: mol_type = other RNA
tatacactccagagatgcg

SEQ ID NO: 2850 - RNA, 19 nt, synthetic construct
  misc_feature 1..19: note = Description of Artificial Sequence: Synthetic oligonucleotide
  source 1..19: mol_type = other RNA
ttatacactccagagatgc

SEQ ID NO: 2851 - RNA, 19 nt, synthetic construct
  misc_feature 1..19: note = Description of Artificial Sequence: Synthetic oligonucleotide
  source 1..19: mol_type = other RNA
cttatacactccagagatg

SEQ ID NO: 2852 - RNA, 19 nt, synthetic construct
  misc_feature 1..19: note = Description of Artificial Sequence: Synthetic oligonucleotide
  source 1..19: mol_type = other RNA
gcttatacactccagagat

SEQ ID NO: 2853 - RNA, 19 nt, synthetic construct
  misc_feature 1..19: note = Description of Artificial Sequence: Synthetic oligonucleotide
  source 1..19: mol_type = other RNA
agcttatacactccagaga

SEQ ID NO: 2854 - RNA, 19 nt, synthetic construct
  misc_feature 1..19: note = Description of Artificial Sequence: Synthetic oligonucleotide
  source 1..19: mol_type = other RNA
aagcttatacactccagag

SEQ ID NO: 2855 - RNA, 19 nt, synthetic construct
  misc_feature 1..19: note = Description of Artificial Sequence: Synthetic oligonucleotide
  source 1..19: mol_type = other RNA
gaagcttatacactccaga

SEQ ID NO: 2856 - RNA, 19 nt, synthetic construct
  misc_feature 1..19: note = Description of Artificial Sequence: Synthetic oligonucleotide
  source 1..19: mol_type = other RNA
ggaagcttatacactccag

SEQ ID NO: 2857 - RNA, 19 nt, synthetic construct
  misc_feature 1..19: note = Description of Artificial Sequence: Synthetic oligonucleotide
  source 1..19: mol_type = other RNA
aggaagcttatacactcca

SEQ ID NO: 2858 - RNA, 19 nt, synthetic construct
  misc_feature 1..19: note = Description of Artificial Sequence: Synthetic oligonucleotide
  source 1..19: mol_type = other RNA
gaggaagcttatacactcc

SEQ ID NO: 2859 - RNA, 19 nt, synthetic construct
  misc_feature 1..19: note = Description of Artificial Sequence: Synthetic oligonucleotide
  source 1..19: mol_type = other RNA
ggaggaagcttatacactc

SEQ ID NO: 2860 - RNA, 19 nt, synthetic construct
  misc_feature 1..19: note = Description of Artificial Sequence: Synthetic oligonucleotide
  source 1..19: mol_type = other RNA
aggaggaagcttatacact

SEQ ID NO: 2861 - RNA, 19 nt, synthetic construct
  misc_feature 1..19: note = Description of Artificial Sequence: Synthetic oligonucleotide
  source 1..19: mol_type = other RNA
caggaggaagcttatacac

SEQ ID NO: 2862 - RNA, 19 nt, synthetic construct
  misc_feature 1..19: note = Description of Artificial Sequence: Synthetic oligonucleotide
  source 1..19: mol_type = other RNA
tcaggaggaagcttataca

SEQ ID NO: 2863 - RNA, 19 nt, synthetic construct
  misc_feature 1..19: note = Description of Artificial Sequence: Synthetic oligonucleotide
  source 1..19: mol_type = other RNA
atcaggaggaagcttatac

SEQ ID NO: 2864 - RNA, 19 nt, synthetic construct
  misc_feature 1..19: note = Description of Artificial Sequence: Synthetic oligonucleotide
  source 1..19: mol_type = other RNA
catcaggaggaagcttata

SEQ ID NO: 2865 - RNA, 19 nt, synthetic construct
  misc_feature 1..19: note = Description of Artificial Sequence: Synthetic oligonucleotide
  source 1..19: mol_type = other RNA
tcatcaggaggaagcttat

SEQ ID NO: 2866 - RNA, 19 nt, synthetic construct
  misc_feature 1..19: note = Description of Artificial Sequence: Synthetic oligonucleotide
  source 1..19: mol_type = other RNA
gtcatcaggaggaagctta

SEQ ID NO: 2867 - RNA, 19 nt, synthetic construct
  misc_feature 1..19: note = Description of Artificial Sequence: Synthetic oligonucleotide
  source 1..19: mol_type = other RNA
agtcatcaggaggaagctt

SEQ ID NO: 2868 - RNA, 19 nt, synthetic construct
  misc_feature 1..19: note = Description of Artificial Sequence: Synthetic oligonucleotide
  source 1..19: mol_type = other RNA
aagtcatcaggaggaagct

SEQ ID NO: 2869 - RNA, 19 nt, synthetic construct
  misc_feature 1..19: note = Description of Artificial Sequence: Synthetic oligonucleotide
  source 1..19: mol_type = other RNA
gaagtcatcaggaggaagc

SEQ ID NO: 2870 - RNA, 19 nt, synthetic construct
  misc_feature 1..19: note = Description of Artificial Sequence: Synthetic oligonucleotide
  source 1..19: mol_type = other RNA
ggaagtcatcaggaggaag

SEQ ID NO: 2871 - RNA, 19 nt, synthetic construct
  misc_feature 1..19: note = Description of Artificial Sequence: Synthetic oligonucleotide
  source 1..19: mol_type = other RNA
aggaagtcatcaggaggaa

SEQ ID NO: 2872 - RNA, 19 nt, synthetic construct
  misc_feature 1..19: note = Description of Artificial Sequence: Synthetic oligonucleotide
  source 1..19: mol_type = other RNA
caggaagtcatcaggagga

SEQ ID NO: 2873 - RNA, 19 nt, synthetic construct
  misc_feature 1..19: note = Description of Artificial Sequence: Synthetic oligonucleotide
  source 1..19: mol_type = other RNA
ccaggaagtcatcaggagg

SEQ ID NO: 2874 - RNA, 19 nt, synthetic construct
  misc_feature 1..19: note = Description of Artificial Sequence: Synthetic oligonucleotide
  source 1..19: mol_type = other RNA
cccaggaagtcatcaggag

SEQ ID NO: 2875 - RNA, 19 nt, synthetic construct
  misc_feature 1..19: note = Description of Artificial Sequence: Synthetic oligonucleotide
  source 1..19: mol_type = other RNA
gcccaggaagtcatcagga

SEQ ID NO: 2876 - RNA, 19 nt, synthetic construct
  misc_feature 1..19: note = Description of Artificial Sequence: Synthetic oligonucleotide
  source 1..19: mol_type = other RNA
tgcccaggaagtcatcagg

SEQ ID NO: 2877 - RNA, 19 nt, synthetic construct
  misc_feature 1..19: note = Description of Artificial Sequence: Synthetic oligonucleotide
  source 1..19: mol_type = other RNA
ctgcccaggaagtcatcag

SEQ ID NO: 2878 - RNA, 19 nt, synthetic construct
  misc_feature 1..19: note = Description of Artificial Sequence: Synthetic oligonucleotide
  source 1..19: mol_type = other RNA
gctgcccaggaagtcatca

SEQ ID NO: 2879 - RNA, 19 nt, synthetic construct
  misc_feature 1..19: note = Description of Artificial Sequence: Synthetic oligonucleotide
  source 1..19: mol_type = other RNA
ggctgcccaggaagtcatc

SEQ ID NO: 2880 - RNA, 19 nt, synthetic construct
  misc_feature 1..19: note = Description of Artificial Sequence: Synthetic oligonucleotide
  source 1..19: mol_type = other RNA
gggctgcccaggaagtcat

SEQ ID NO: 2881 - RNA, 19 nt, synthetic construct
  misc_feature 1..19: note = Description of Artificial Sequence: Synthetic oligonucleotide
  source 1..19: mol_type = other RNA
agggctgcccaggaagtca

SEQ ID NO: 2882 - RNA, 19 nt, synthetic construct
  misc_feature 1..19: note = Description of Artificial Sequence: Synthetic oligonucleotide
  source 1..19: mol_type = other RNA
cagggctgcccaggaagtc

SEQ ID NO: 2883 - RNA, 19 nt, synthetic construct
  misc_feature 1..19: note = Description of Artificial Sequence: Synthetic oligonucleotide
  source 1..19: mol_type = other RNA
tcagggctgcccaggaagt

SEQ ID NO: 2884 - RNA, 19 nt, synthetic construct
  misc_feature 1..19: note = Description of Artificial Sequence: Synthetic oligonucleotide
  source 1..19: mol_type = other RNA
ttcagggctgcccaggaag

SEQ ID NO: 2885 - RNA, 19 nt, synthetic construct
  misc_feature 1..19: note = Description of Artificial Sequence: Synthetic oligonucleotide
  source 1..19: mol_type = other RNA
gttcagggctgcccaggaa

SEQ ID NO: 2886 - RNA, 19 nt, synthetic construct
  misc_feature 1..19: note = Description of Artificial Sequence: Synthetic oligonucleotide
  source 1..19: mol_type = other RNA
agttcagggctgcccagga

SEQ ID NO: 2887 - RNA, 19 nt, synthetic construct
  misc_feature 1..19: note = Description of Artificial Sequence: Synthetic oligonucleotide
  source 1..19: mol_type = other RNA
cagttcagggctgcccagg

SEQ ID NO: 2888 - RNA, 19 nt, synthetic construct
  misc_feature 1..19: note = Description of Artificial Sequence: Synthetic oligonucleotide
  source 1..19: mol_type = other RNA
ccagttcagggctgcccag

SEQ ID NO: 2889 - RNA, 19 nt, synthetic construct
  misc_feature 1..19: note = Description of Artificial Sequence: Synthetic oligonucleotide
  source 1..19: mol_type = other RNA
tccagttcagggctgccca

SEQ ID NO: 2890 - RNA, 19 nt, synthetic construct
  misc_feature 1..19: note = Description of Artificial Sequence: Synthetic oligonucleotide
  source 1..19: mol_type = other RNA
ctccagttcagggctgccc

SEQ ID NO: 2891 - RNA, 19 nt, synthetic construct
  misc_feature 1..19: note = Description of Artificial Sequence: Synthetic oligonucleotide
  source 1..19: mol_type = other RNA
cctccagttcagggctgcc

SEQ ID NO: 2892 - RNA, 19 nt, synthetic construct
  misc_feature 1..19: note = Description of Artificial Sequence: Synthetic oligonucleotide
  source 1..19: mol_type = other RNA
acctccagttcagggctgc

SEQ ID NO: 2893 - RNA, 19 nt, synthetic construct
  misc_feature 1..19: note = Description of Artificial Sequence: Synthetic oligonucleotide
  source 1..19: mol_type = other RNA
cacctccagttcagggctg

SEQ ID NO: 2894 - RNA, 19 nt, synthetic construct
  misc_feature 1..19: note = Description of Artificial Sequence: Synthetic oligonucleotide
  source 1..19: mol_type = other RNA
acacctccagttcagggct

SEQ ID NO: 2895 - RNA, 19 nt, synthetic construct
  misc_feature 1..19: note = Description of Artificial Sequence: Synthetic oligonucleotide
  source 1..19: mol_type = other RNA
aacacctccagttcagggc

SEQ ID NO: 2896 - RNA, 19 nt, synthetic construct
  misc_feature 1..19: note = Description of Artificial Sequence: Synthetic oligonucleotide
  source 1..19: mol_type = other RNA
gaacacctccagttcaggg

SEQ ID NO: 2897 - RNA, 19 nt, synthetic construct
  misc_feature 1..19: note = Description of Artificial Sequence: Synthetic oligonucleotide
  source 1..19: mol_type = other RNA
agaacacctccagttcagg

SEQ ID NO: 2898 - RNA, 19 nt, synthetic construct
  misc_feature 1..19: note = Description of Artificial Sequence: Synthetic oligonucleotide
  source 1..19: mol_type = other RNA
cagaacacctccagttcag

SEQ ID NO: 2899 - RNA, 19 nt, synthetic construct
  misc_feature 1..19: note = Description of Artificial Sequence: Synthetic oligonucleotide
  source 1..19: mol_type = other RNA
acagaacacctccagttca

SEQ ID NO: 2900 - RNA, 19 nt, synthetic construct
  misc_feature 1..19: note = Description of Artificial Sequence: Synthetic oligonucleotide
  source 1..19: mol_type = other RNA
cacagaacacctccagttc

SEQ ID NO: 2901 - RNA, 19 nt, synthetic construct
  misc_feature 1..19: note = Description of Artificial Sequence: Synthetic oligonucleotide
  source 1..19: mol_type = other RNA
tcacagaacacctccagtt

SEQ ID NO: 2902 - RNA, 19 nt, synthetic construct
  misc_feature 1..19: note = Description of Artificial Sequence: Synthetic oligonucleotide
  source 1..19: mol_type = other RNA
gtcacagaacacctccagt

SEQ ID NO: 2903 - RNA, 19 nt, synthetic construct
  misc_feature 1..19: note = Description of Artificial Sequence: Synthetic oligonucleotide
  source 1..19: mol_type = other RNA
tgtcacagaacacctccag

SEQ ID NO: 2904 - RNA, 19 nt, synthetic construct
  misc_feature 1..19: note = Description of Artificial Sequence: Synthetic oligonucleotide
  source 1..19: mol_type = other RNA
atgtcacagaacacctcca

SEQ ID NO: 2905 - RNA, 19 nt, synthetic construct
  misc_feature 1..19: note = Description of Artificial Sequence: Synthetic oligonucleotide
  source 1..19: mol_type = other RNA
catgtcacagaacacctcc

SEQ ID NO: 2906 - RNA, 19 nt, synthetic construct
  misc_feature 1..19: note = Description of Artificial Sequence: Synthetic oligonucleotide
  source 1..19: mol_type = other RNA
ccatgtcacagaacacctc

SEQ ID NO: 2907 - RNA, 19 nt, synthetic construct
  misc_feature 1..19: note = Description of Artificial Sequence: Synthetic oligonucleotide
  source 1..19: mol_type = other RNA
tccatgtcacagaacacct

SEQ ID NO: 2908 - RNA, 19 nt, synthetic construct
  misc_feature 1..19: note = Description of Artificial Sequence: Synthetic oligonucleotide
  source 1..19: mol_type = other RNA
ctccatgtcacagaacacc

SEQ ID NO: 2909 - RNA, 19 nt, synthetic construct
  misc_feature 1..19: note = Description of Artificial Sequence: Synthetic oligonucleotide
  source 1..19: mol_type = other RNA
tctccatgtcacagaacac

SEQ ID NO: 2910 - RNA, 19 nt, synthetic construct
  misc_feature 1..19: note = Description of Artificial Sequence: Synthetic oligonucleotide
  source 1..19: mol_type = other RNA
gtctccatgtcacagaaca

SEQ ID NO: 2911 - RNA, 19 nt, synthetic construct
  misc_feature 1..19: note = Description of Artificial Sequence: Synthetic oligonucleotide
  source 1..19: mol_type = other RNA
agtctccatgtcacagaac

SEQ ID NO: 2912 - RNA, 19 nt, synthetic construct
  misc_feature 1..19: note = Description of Artificial Sequence: Synthetic oligonucleotide
  source 1..19: mol_type = other RNA
aagtctccatgtcacagaa

SEQ ID NO: 2913 - RNA, 19 nt, synthetic construct
  misc_feature 1..19: note = Description of Artificial Sequence: Synthetic oligonucleotide
  source 1..19: mol_type = other RNA
gaagtctccatgtcacaga

SEQ ID NO: 2914 - RNA, 19 nt, synthetic construct
  misc_feature 1..19: note = Description of Artificial Sequence: Synthetic oligonucleotide
  source 1..19: mol_type = other RNA
tgaagtctccatgtcacag

SEQ ID NO: 2915 - RNA, 19 nt, synthetic construct
  misc_feature 1..19: note = Description of Artificial Sequence: Synthetic oligonucleotide
  source 1..19: mol_type = other RNA
ctgaagtctccatgtcaca

SEQ ID NO: 2916 - RNA, 19 nt, synthetic construct
  misc_feature 1..19: note = Description of Artificial Sequence: Synthetic oligonucleotide
  source 1..19: mol_type = other RNA
cctgaagtctccatgtcac

SEQ ID NO: 2917 - RNA, 19 nt, synthetic construct
  misc_feature 1..19: note = Description of Artificial Sequence: Synthetic oligonucleotide
  source 1..19: mol_type = other RNA
gcctgaagtctccatgtca

SEQ ID NO: 2918 - RNA, 19 nt, synthetic construct
  misc_feature 1..19: note = Description of Artificial Sequence: Synthetic oligonucleotide
  source 1..19: mol_type = other RNA
cgcctgaagtctccatgtc

SEQ ID NO: 2919 - RNA, 19 nt, synthetic construct
  misc_feature 1..19: note = Description of Artificial Sequence: Synthetic oligonucleotide
  source 1..19: mol_type = other RNA
ccgcctgaagtctccatgt

SEQ ID NO: 2920 - RNA, 19 nt, synthetic construct
  misc_feature 1..19: note = Description of Artificial Sequence: Synthetic oligonucleotide
  source 1..19: mol_type = other RNA
tccgcctgaagtctccatg

SEQ ID NO: 2921 - RNA, 19 nt, synthetic construct
  misc_feature 1..19: note = Description of Artificial Sequence: Synthetic oligonucleotide
  source 1..19: mol_type = other RNA
ctccgcctgaagtctccat

SEQ ID NO: 2922 - RNA, 19 nt, synthetic construct
  misc_feature 1..19: note = Description of Artificial Sequence: Synthetic oligonucleotide
  source 1..19: mol_type = other RNA
cctccgcctgaagtctcca

SEQ ID NO: 2923 - RNA, 19 nt, synthetic construct
  misc_feature 1..19: note = Description of Artificial Sequence: Synthetic oligonucleotide
  source 1..19: mol_type = other RNA
gcctccgcctgaagtctcc

SEQ ID NO: 2924 - RNA, 19 nt, synthetic construct
  misc_feature 1..19: note = Description of Artificial Sequence: Synthetic oligonucleotide
  source 1..19: mol_type = other RNA
agcctccgcctgaagtctc

SEQ ID NO: 2925 - RNA, 19 nt, synthetic construct
  misc_feature 1..19: note = Description of Artificial Sequence: Synthetic oligonucleotide
  source 1..19: mol_type = other RNA
cagcctccgcctgaagtct

SEQ ID NO: 2926 - RNA, 19 nt, synthetic construct
  misc_feature 1..19: note = Description of Artificial Sequence: Synthetic oligonucleotide
  source 1..19: mol_type = other RNA
ccagcctccgcctgaagtc

SEQ ID NO: 2927 - RNA, 19 nt, synthetic construct
  misc_feature 1..19: note = Description of Artificial Sequence: Synthetic oligonucleotide
  source 1..19: mol_type = other RNA
tccagcctccgcctgaagt

SEQ ID NO: 2928 - RNA, 19 nt, synthetic construct
  misc_feature 1..19: note = Description of Artificial Sequence: Synthetic oligonucleotide
  source 1..19: mol_type = other RNA
gtccagcctccgcctgaag

SEQ ID NO: 2929 - RNA, 19 nt, synthetic construct
  misc_feature 1..19: note = Description of Artificial Sequence: Synthetic oligonucleotide
  source 1..19: mol_type = other RNA
ggtccagcctccgcctgaa

SEQ ID NO: 2930 - RNA, 19 nt, synthetic construct
  misc_feature 1..19: note = Description of Artificial Sequence: Synthetic oligonucleotide
  source 1..19: mol_type = other RNA
tggtccagcctccgcctga

SEQ ID NO: 2931 - RNA, 19 nt, synthetic construct
  misc_feature 1..19: note = Description of Artificial Sequence: Synthetic oligonucleotide
  source 1..19: mol_type = other RNA
atggtccagcctccgcctg

SEQ ID NO: 2932 - RNA, 19 nt, synthetic construct
  misc_feature 1..19: note = Description of Artificial Sequence: Synthetic oligonucleotide
  source 1..19: mol_type = other RNA
gatggtccagcctccgcct

SEQ ID NO: 2933 - RNA, 19 nt, synthetic construct
  misc_feature 1..19: note = Description of Artificial Sequence: Synthetic oligonucleotide
  source 1..19: mol_type = other RNA
tgatggtccagcctccgcc

SEQ ID NO: 2934 - RNA, 19 nt, synthetic construct
  misc_feature 1..19: note = Description of Artificial Sequence: Synthetic oligonucleotide
  source 1..19: mol_type = other RNA
atgatggtccagcctccgc

SEQ ID NO: 2935 - RNA, 19 nt, synthetic construct
  misc_feature 1..19: note = Description of Artificial Sequence: Synthetic oligonucleotide
  source 1..19: mol_type = other RNA
gatgatggtccagcctccg

SEQ ID NO: 2936 - RNA, 19 nt, synthetic construct
  misc_feature 1..19: note = Description of Artificial Sequence: Synthetic oligonucleotide
  source 1..19: mol_type = other RNA
ggatgatggtccagcctcc

SEQ ID NO: 2937 - RNA, 19 nt, synthetic construct
  misc_feature 1..19: note = Description of Artificial Sequence: Synthetic oligonucleotide
  source 1..19: mol_type = other RNA
tggatgatggtccagcctc

SEQ ID NO: 2938 - RNA, 19 nt, synthetic construct
  misc_feature 1..19: note = Description of Artificial Sequence: Synthetic oligonucleotide
  source 1..19: mol_type = other RNA
ctggatgatggtccagcct

SEQ ID NO: 2939 - RNA, 19 nt, synthetic construct
  misc_feature 1..19: note = Description of Artificial Sequence: Synthetic oligonucleotide
  source 1..19: mol_type = other RNA
tctggatgatggtccagcc

SEQ ID NO: 2940 - RNA, 19 nt, synthetic construct
  misc_feature 1..19: note = Description of Artificial Sequence: Synthetic oligonucleotide
  source 1..19: mol_type = other RNA
ctctggatgatggtccagc

SEQ ID NO: 2941 - RNA, 19 nt, synthetic construct
  misc_feature 1..19: note = Description of Artificial Sequence: Synthetic oligonucleotide
  source 1..19: mol_type = other RNA
tctctggatgatggtccag

SEQ ID NO: 2942 - RNA, 19 nt, synthetic construct
  misc_feature 1..19: note = Description of Artificial Sequence: Synthetic oligonucleotide
  source 1..19: mol_type = other RNA
gtctctggatgatggtcca

SEQ ID NO: 2943 - RNA, 19 nt, synthetic construct
  misc_feature 1..19: note = Description of Artificial Sequence: Synthetic oligonucleotide
  source 1..19: mol_type = other RNA
cgtctctggatgatggtcc

SEQ ID NO: 2944 - RNA, 19 nt, synthetic construct
  misc_feature 1..19: note = Description of Artificial Sequence: Synthetic oligonucleotide
  source 1..19: mol_type = other RNA
tcgtctctggatgatggtc

SEQ ID NO: 2945 - RNA, 19 nt, synthetic construct
  misc_feature 1..19: note = Description of Artificial Sequence: Synthetic oligonucleotide
  source 1..19: mol_type = other RNA
ttcgtctctggatgatggt

SEQ ID NO: 2946 - RNA, 19 nt, synthetic construct
  misc_feature 1..19: note = Description of Artificial Sequence: Synthetic oligonucleotide
  source 1..19: mol_type = other RNA
tttcgtctctggatgatgg

SEQ ID NO: 2947 - RNA, 19 nt, synthetic construct
  misc_feature 1..19: note = Description of Artificial Sequence: Synthetic oligonucleotide
  source 1..19: mol_type = other RNA
ttttcgtctctggatgatg

SEQ ID NO: 2948 - RNA, 19 nt, synthetic construct
  misc_feature 1..19: note = Description of Artificial Sequence: Synthetic oligonucleotide
  source 1..19: mol_type = other RNA
tttttcgtctctggatgat

SEQ ID NO: 2949 - RNA, 19 nt, synthetic construct
  misc_feature 1..19: note = Description of Artificial Sequence: Synthetic oligonucleotide
  source 1..19: mol_type = other RNA
ctttttcgtctctggatga

SEQ ID NO: 2950 - RNA, 19 nt, synthetic construct
  misc_feature 1..19: note = Description of Artificial Sequence: Synthetic oligonucleotide
  source 1..19: mol_type = other RNA
actttttcgtctctggatg

SEQ ID NO: 2951 - RNA, 19 nt, synthetic construct
  misc_feature 1..19: note = Description of Artificial Sequence: Synthetic oligonucleotide
  source 1..19: mol_type = other RNA
cactttttcgtctctggat

SEQ ID NO: 2952 - RNA, 19 nt, synthetic construct
  misc_feature 1..19: note = Description of Artificial Sequence: Synthetic oligonucleotide
  source 1..19: mol_type = other RNA
ccactttttcgtctctgga

SEQ ID NO: 2953 - RNA, 19 nt, synthetic construct
  misc_feature 1..19: note = Description of Artificial Sequence: Synthetic oligonucleotide
  source 1..19: mol_type = other RNA
gccactttttcgtctctgg

SEQ ID NO: 2954 - RNA, 19 nt, synthetic construct
  misc_feature 1..19: note = Description of Artificial Sequence: Synthetic oligonucleotide
  source 1..19: mol_type = other RNA
ggccactttttcgtctctg

SEQ ID NO: 2955 - RNA, 19 nt, synthetic construct
  misc_feature 1..19: note = Description of Artificial Sequence: Synthetic oligonucleotide
  source 1..19: mol_type = other RNA
aggccactttttcgtctct

SEQ ID NO: 2956 - RNA, 19 nt, synthetic construct
  misc_feature 1..19: note = Description of Artificial Sequence: Synthetic oligonucleotide
  source 1..19: mol_type = other RNA
aaggccactttttcgtctc

SEQ ID NO: 2957 - RNA, 19 nt, synthetic construct
  misc_feature 1..19: note = Description of Artificial Sequence: Synthetic oligonucleotide
  source 1..19: mol_type = other RNA
caaggccactttttcgtct

SEQ ID NO: 2958 - RNA, 19 nt, synthetic construct
  misc_feature 1..19: note = Description of Artificial Sequence: Synthetic oligonucleotide
  source 1..19: mol_type = other RNA
acaaggccactttttcgtc

SEQ ID NO: 2959 - RNA, 19 nt, synthetic construct
  misc_feature 1..19: note = Description of Artificial Sequence: Synthetic oligonucleotide
  source 1..19: mol_type = other RNA
gacaaggccactttttcgt

SEQ ID NO: 2960 - RNA, 19 nt, synthetic construct
  misc_feature 1..19: note = Description of Artificial Sequence: Synthetic oligonucleotide
  source 1..19: mol_type = other RNA
agacaaggccactttttcg

SEQ ID NO: 2961 - RNA, 19 nt, synthetic construct
  misc_feature 1..19: note = Description of Artificial Sequence: Synthetic oligonucleotide
  source 1..19: mol_type = other RNA
gagacaaggccactttttc

SEQ ID NO: 2962 - RNA, 19 nt, synthetic construct
  misc_feature 1..19: note = Description of Artificial Sequence: Synthetic oligonucleotide
  source 1..19: mol_type = other RNA
ggagacaaggccacttttt

SEQ ID NO: 2963 - RNA, 19 nt, synthetic construct
  misc_feature 1..19: note = Description of Artificial Sequence: Synthetic oligonucleotide
  source 1..19: mol_type = other RNA
aggagacaaggccactttt

SEQ ID NO: 2964 - RNA, 19 nt, synthetic construct
  misc_feature 1..19: note = Description of Artificial Sequence: Synthetic oligonucleotide
  source 1..19: mol_type = other RNA
aaggagacaaggccacttt

SEQ ID NO: 2965 - RNA, 19 nt, synthetic construct
  misc_feature 1..19: note = Description of Artificial Sequence: Synthetic oligonucleotide
  source 1..19: mol_type = other RNA
gaaggagacaaggccactt

SEQ ID NO: 2966 - RNA, 19 nt, synthetic construct
  misc_feature 1..19: note = Description of Artificial Sequence: Synthetic oligonucleotide
  source 1..19: mol_type = other RNA
agaaggagacaaggccact

SEQ ID NO: 2967 - RNA, 19 nt, synthetic construct
  misc_feature 1..19: note = Description of Artificial Sequence: Synthetic oligonucleotide
  source 1..19: mol_type = other RNA
tagaaggagacaaggccac

SEQ ID NO: 2968 - RNA, 19 nt, synthetic construct
  misc_feature 1..19: note = Description of Artificial Sequence: Synthetic oligonucleotide
  source 1..19: mol_type = other RNA
gtagaaggagacaaggcca

SEQ ID NO: 2969 - RNA, 19 nt, synthetic construct
  misc_feature 1..19: note = Description of Artificial Sequence: Synthetic oligonucleotide
  source 1..19: mol_type = other RNA
ggtagaaggagacaaggcc

SEQ ID NO: 2970 - RNA, 19 nt, synthetic construct
  misc_feature 1..19: note = Description of Artificial Sequence: Synthetic oligonucleotide
  source 1..19: mol_type = other RNA
cggtagaaggagacaaggc

SEQ ID NO: 2971 - RNA, 19 nt, synthetic construct
  misc_feature 1..19: note = Description of Artificial Sequence: Synthetic oligonucleotide
  source 1..19: mol_type = other RNA
ccggtagaaggagacaagg

SEQ ID NO: 2972 - RNA, 19 nt, synthetic construct
  misc_feature 1..19: note = Description of Artificial Sequence: Synthetic oligonucleotide
  source 1..19: mol_type = other RNA
cccggtagaaggagacaag

SEQ ID NO: 2973 - RNA, 19 nt, synthetic construct
  misc_feature 1..19: note = Description of Artificial Sequence: Synthetic oligonucleotide
  source 1..19: mol_type = other RNA
tcccggtagaaggagacaa

SEQ ID NO: 2974 - RNA, 19 nt, synthetic construct
  misc_feature 1..19: note = Description of Artificial Sequence: Synthetic oligonucleotide
  source 1..19: mol_type = other RNA
gtcccggtagaaggagaca

SEQ ID NO: 2975 - RNA, 19 nt, synthetic construct
  misc_feature 1..19: note = Description of Artificial Sequence: Synthetic oligonucleotide
  source 1..19: mol_type = other RNA
agtcccggtagaaggagac

SEQ ID NO: 2976 - RNA, 19 nt, synthetic construct
  misc_feature 1..19: note = Description of Artificial Sequence: Synthetic oligonucleotide
  source 1..19: mol_type = other RNA
cagtcccggtagaaggaga

SEQ ID NO: 2977 - RNA, 19 nt, synthetic construct
  misc_feature 1..19: note = Description of Artificial Sequence: Synthetic oligonucleotide
  source 1..19: mol_type = other RNA
ccagtcccggtagaaggag

SEQ ID NO: 2978 - RNA, 19 nt, synthetic construct
  misc_feature 1..19: note = Description of Artificial Sequence: Synthetic oligonucleotide
  source 1..19: mol_type = other RNA
tccagtcccggtagaagga

SEQ ID NO: 2979 - RNA, 19 nt, synthetic construct
  misc_feature 1..19: note = Description of Artificial Sequence: Synthetic oligonucleotide
  source 1..19: mol_type = other RNA
ttccagtcccggtagaagg

SEQ ID NO: 2980 - RNA, 19 nt, synthetic construct
  misc_feature 1..19: note = Description of Artificial Sequence: Synthetic oligonucleotide
  source 1..19: mol_type = other RNA
cttccagtcccggtagaag

SEQ ID NO: 2981 - RNA, 19 nt, synthetic construct
  misc_feature 1..19: note = Description of Artificial Sequence: Synthetic oligonucleotide
  source 1..19: mol_type = other RNA
gcttccagtcccggtagaa

SEQ ID NO: 2982 - RNA, 19 nt, synthetic construct
  misc_feature 1..19: note = Description of Artificial Sequence: Synthetic oligonucleotide
  source 1..19: mol_type = other RNA
tgcttccagtcccggtaga

SEQ ID NO: 2983 - RNA, 19 nt, synthetic construct
  misc_feature 1..19: note = Description of Artificial Sequence: Synthetic oligonucleotide
  source 1..19: mol_type = other RNA
ctgcttccagtcccggtag

SEQ ID NO: 2984 - RNA, 19 nt, synthetic construct
  misc_feature 1..19: note = Description of Artificial Sequence: Synthetic oligonucleotide
  source 1..19: mol_type = other RNA
actgcttccagtcccggta

SEQ ID NO: 2985 - RNA, 19 nt, synthetic construct
  misc_feature 1..19: note = Description of Artificial Sequence: Synthetic oligonucleotide
  source 1..19: mol_type = other RNA
tactgcttccagtcccggt

SEQ ID NO: 2986 - RNA, 19 nt, synthetic construct
  misc_feature 1..19: note = Description of Artificial Sequence: Synthetic oligonucleotide
  source 1..19: mol_type = other RNA
gtactgcttccagtcccgg

SEQ ID NO: 2987 - RNA, 19 nt, synthetic construct
  misc_feature 1..19: note = Description of Artificial Sequence: Synthetic oligonucleotide
  source 1..19: mol_type = other RNA
tgtactgcttccagtcccg

SEQ ID NO: 2988 - RNA, 19 nt, synthetic construct
  misc_feature 1..19: note = Description of Artificial Sequence: Synthetic oligonucleotide
  source 1..19: mol_type = other RNA
ttgtactgcttccagtccc

SEQ ID NO: 2989 - RNA, 19 nt, synthetic construct
  misc_feature 1..19: note = Description of Artificial Sequence: Synthetic oligonucleotide
  source 1..19: mol_type = other RNA
cttgtactgcttccagtcc

SEQ ID NO: 2990 - RNA, 19 nt, synthetic construct
  misc_feature 1..19: note = Description of Artificial Sequence: Synthetic oligonucleotide
  source 1..19: mol_type = other RNA
gcttgtactgcttccagtc

SEQ ID NO: 2991 - RNA, 19 nt, synthetic construct
  misc_feature 1..19: note = Description of Artificial Sequence: Synthetic oligonucleotide
  source 1..19: mol_type = other RNA
tgcttgtactgcttccagt

SEQ ID NO: 2992 - RNA, 19 nt, synthetic construct
  misc_feature 1..19: note = Description of Artificial Sequence: Synthetic oligonucleotide
  source 1..19: mol_type = other RNA
ctgcttgtactgcttccag

SEQ ID NO: 2993 - RNA, 19 nt, synthetic construct
  misc_feature 1..19: note = Description of Artificial Sequence: Synthetic oligonucleotide
  source 1..19: mol_type = other RNA
cctgcttgtactgcttcca

SEQ ID NO: 2994 - RNA, 19 nt, synthetic construct
  misc_feature 1..19: note = Description of Artificial Sequence: Synthetic oligonucleotide
  source 1..19: mol_type = other RNA
ccctgcttgtactgcttcc

SEQ ID NO: 2995 - RNA, 19 nt, synthetic construct
  misc_feature 1..19: note = Description of Artificial Sequence: Synthetic oligonucleotide
  source 1..19: mol_type = other RNA
gccctgcttgtactgcttc

SEQ ID NO: 2996 - RNA, 19 nt, synthetic construct
  misc_feature 1..19: note = Description of Artificial Sequence: Synthetic oligonucleotide
  source 1..19: mol_type = other RNA
agccctgcttgtactgctt

SEQ ID NO: 2997 - RNA, 19 nt, synthetic construct
  misc_feature 1..19: note = Description of Artificial Sequence: Synthetic oligonucleotide
  source 1..19: mol_type = other RNA
aagccctgcttgtactgct

SEQ ID NO: 2998 - RNA, 19 nt, synthetic construct
  misc_feature 1..19: note = Description of Artificial Sequence: Synthetic oligonucleotide
  source 1..19: mol_type = other RNA
aaagccctgcttgtactgc

SEQ ID NO: 2999 - RNA, 19 nt, synthetic construct
  misc_feature 1..19: note = Description of Artificial Sequence: Synthetic oligonucleotide
  source 1..19: mol_type = other RNA
caaagccctgcttgtactg

SEQ ID NO: 3000 - RNA, 19 nt, synthetic construct
  misc_feature 1..19: note = Description of Artificial Sequence: Synthetic oligonucleotide
  source 1..19: mol_type = other RNA
ccaaagccctgcttgtact

SEQ ID NO: 3001 - RNA, 19 nt, synthetic construct
  misc_feature 1..19: note = Description of Artificial Sequence: Synthetic oligonucleotide
  source 1..19: mol_type = other RNA
gccaaagccctgcttgtac

SEQ ID NO: 3002 - RNA, 19 nt, synthetic construct
  misc_feature 1..19: note = Description of Artificial Sequence: Synthetic oligonucleotide
  source 1..19: mol_type = other RNA
tgccaaagccctgcttgta

SEQ ID NO: 3003 - RNA, 19 nt, synthetic construct
  misc_feature 1..19: note = Description of Artificial Sequence: Synthetic oligonucleotide
  source 1..19: mol_type = other RNA
ctgccaaagccctgcttgt

SEQ ID NO: 3004 - RNA, 19 nt, synthetic construct
  misc_feature 1..19: note = Description of Artificial Sequence: Synthetic oligonucleotide
  source 1..19: mol_type = other RNA
gctgccaaagccctgcttg

SEQ ID NO: 3005 - RNA, 19 nt, synthetic construct
  misc_feature 1..19: note = Description of Artificial Sequence: Synthetic oligonucleotide
  source 1..19: mol_type = other RNA
tgctgccaaagccctgctt

SEQ ID NO: 3006 - RNA, 19 nt, synthetic construct
  misc_feature 1..19: note = Description of Artificial Sequence: Synthetic oligonucleotide
  source 1..19: mol_type = other RNA
atgctgccaaagccctgct

SEQ ID NO: 3007 - RNA, 19 nt, synthetic construct
  misc_feature 1..19: note = Description of Artificial Sequence: Synthetic oligonucleotide
  source 1..19: mol_type = other RNA
gatgctgccaaagccctgc

SEQ ID NO: 3008 - RNA, 19 nt, synthetic construct
  misc_feature 1..19: note = Description of Artificial Sequence: Synthetic oligonucleotide
  source 1..19: mol_type = other RNA
ggatgctgccaaagccctg

SEQ ID NO: 3009 - RNA, 19 nt, synthetic construct
  misc_feature 1..19: note = Description of Artificial Sequence: Synthetic oligonucleotide
  source 1..19: mol_type = other RNA
cggatgctgccaaagccct

SEQ ID NO: 3010 - RNA, 19 nt, synthetic construct
  misc_feature 1..19: note = Description of Artificial Sequence: Synthetic oligonucleotide
  source 1..19: mol_type = other RNA
acggatgctgccaaagccc

SEQ ID NO: 3011 - RNA, 19 nt, synthetic construct
  misc_feature 1..19: note = Description of Artificial Sequence: Synthetic oligonucleotide
  source 1..19: mol_type = other RNA
cacggatgctgccaaagcc

SEQ ID NO: 3012 - RNA, 19 nt, synthetic construct
  misc_feature 1..19: note = Description of Artificial Sequence: Synthetic oligonucleotide
  source 1..19: mol_type = other RNA
ccacggatgctgccaaagc

SEQ ID NO: 3013 - RNA, 19 nt, synthetic construct
  misc_feature 1..19: note = Description of Artificial Sequence: Synthetic oligonucleotide
  source 1..19: mol_type = other RNA
cccacggatgctgccaaag

SEQ ID NO: 3014 - RNA, 19 nt, synthetic construct
  misc_feature 1..19: note = Description of Artificial Sequence: Synthetic oligonucleotide
  source 1..19: mol_type = other RNA
ccccacggatgctgccaaa

SEQ ID NO: 3015 - RNA, 19 nt, synthetic construct
  misc_feature 1..19: note = Description of Artificial Sequence: Synthetic oligonucleotide
  source 1..19: mol_type = other RNA
tccccacggatgctgccaa

SEQ ID NO: 3016 - RNA, 19 nt, synthetic construct
  misc_feature 1..19: note = Description of Artificial Sequence: Synthetic oligonucleotide
  source 1..19: mol_type = other RNA
gtccccacggatgctgcca

SEQ ID NO: 3017 - RNA, 19 nt, synthetic construct
  misc_feature 1..19: note = Description of Artificial Sequence: Synthetic oligonucleotide
  source 1..19: mol_type = other RNA
agtccccacggatgctgcc

SEQ ID NO: 3018 - RNA, 19 nt, synthetic construct
  misc_feature 1..19: note = Description of Artificial Sequence: Synthetic oligonucleotide
  source 1..19: mol_type = other RNA
aagtccccacggatgctgc

SEQ ID NO: 3019 - RNA, 19 nt, synthetic construct
  misc_feature 1..19: note = Description of Artificial Sequence: Synthetic oligonucleotide
  source 1..19: mol_type = other RNA
gaagtccccacggatgctg

SEQ ID NO: 3020 - RNA, 19 nt, synthetic construct
  misc_feature 1..19: note = Description of Artificial Sequence: Synthetic oligonucleotide
  source 1..19: mol_type = other RNA
agaagtccccacggatgct

SEQ ID NO: 3021 - RNA, 19 nt, synthetic construct
  misc_feature 1..19: note = Description of Artificial Sequence: Synthetic oligonucleotide
  source 1..19: mol_type = other RNA
cagaagtccccacggatgc

SEQ ID NO: 3022 - RNA, 19 nt, synthetic construct
  misc_feature 1..19: note = Description of Artificial Sequence: Synthetic oligonucleotide
  source 1..19: mol_type = other RNA
ccagaagtccccacggatg

SEQ ID NO: 3023 - RNA, 19 nt, synthetic construct
  misc_feature 1..19: note = Description of Artificial Sequence: Synthetic oligonucleotide
  source 1..19: mol_type = other RNA
gccagaagtccccacggat

SEQ ID NO: 3024 - RNA, 19 nt, synthetic construct
  misc_feature 1..19: note = Description of Artificial Sequence: Synthetic oligonucleotide
  source 1..19: mol_type = other RNA
agccagaagtccccacgga

SEQ ID NO: 3025 - RNA, 19 nt, synthetic construct
  misc_feature 1..19: note = Description of Artificial Sequence: Synthetic oligonucleotide
  source 1..19: mol_type = other RNA
cagccagaagtccccacgg

SEQ ID NO: 3026 - RNA, 19 nt, synthetic construct
  misc_feature 1..19: note = Description of Artificial Sequence: Synthetic oligonucleotide
  source 1..19: mol_type = other RNA
ccagccagaagtccccacg

SEQ ID NO: 3027 - RNA, 19 nt, synthetic construct
  misc_feature 1..19: note = Description of Artificial Sequence: Synthetic oligonucleotide
  source 1..19: mol_type = other RNA
cccagccagaagtccccac

SEQ ID NO: 3028 - RNA, 19 nt, synthetic construct
  misc_feature 1..19: note = Description of Artificial Sequence: Synthetic oligonucleotide
  source 1..19: mol_type = other RNA
ccccagccagaagtcccca

SEQ ID NO: 3029 - RNA, 19 nt, synthetic construct
  misc_feature 1..19: note = Description of Artificial Sequence: Synthetic oligonucleotide
  source 1..19: mol_type = other RNA
tccccagccagaagtcccc

SEQ ID NO: 3030 - RNA, 19 nt, synthetic construct
  misc_feature 1..19: note = Description of Artificial Sequence: Synthetic oligonucleotide
  source 1..19: mol_type = other RNA
ttccccagccagaagtccc

SEQ ID NO: 3031 - RNA, 19 nt, synthetic construct
  misc_feature 1..19: note = Description of Artificial Sequence: Synthetic oligonucleotide
  source 1..19: mol_type = other RNA
gttccccagccagaagtcc

SEQ ID NO: 3032 - RNA, 19 nt, synthetic construct
  misc_feature 1..19: note = Description of Artificial Sequence: Synthetic oligonucleotide
  source 1..19: mol_type = other RNA
cgttccccagccagaagtc

SEQ ID NO: 3033 - RNA, 19 nt, synthetic construct
  misc_feature 1..19: note = Description of Artificial Sequence: Synthetic oligonucleotide
  source 1..19: mol_type = other RNA
tcgttccccagccagaagt

SEQ ID NO: 3034 - RNA, 19 nt, synthetic construct
  misc_feature 1..19: note = Description of Artificial Sequence: Synthetic oligonucleotide
  source 1..19: mol_type = other RNA
ttcgttccccagccagaag

SEQ ID NO: 3035 - RNA, 19 nt, synthetic construct
  misc_feature 1..19: note = Description of Artificial Sequence: Synthetic oligonucleotide
  source 1..19: mol_type = other RNA
gttcgttccccagccagaa

SEQ ID NO: 3036 - RNA, 19 nt, synthetic construct
  misc_feature 1..19: note = Description of Artificial Sequence: Synthetic oligonucleotide
  source 1..19: mol_type = other RNA
tgttcgttccccagccaga

SEQ ID NO: 3037 - RNA, 19 nt, synthetic construct
  misc_feature 1..19: note = Description of Artificial Sequence: Synthetic oligonucleotide
  source 1..19: mol_type = other RNA
gtgttcgttccccagccag

SEQ ID NO: 3038 - RNA, 19 nt, synthetic construct
  misc_feature 1..19: note = Description of Artificial Sequence: Synthetic oligonucleotide
  source 1..19: mol_type = other RNA
tgtgttcgttccccagcca

SEQ ID NO: 3039 - RNA, 19 nt, synthetic construct
  misc_feature 1..19: note = Description of Artificial Sequence: Synthetic oligonucleotide
  source 1..19: mol_type = other RNA
atgtgttcgttccccagcc

SEQ ID NO: 3040 - RNA, 19 nt, synthetic construct
  misc_feature 1..19: note = Description of Artificial Sequence: Synthetic oligonucleotide
  source 1..19: mol_type = other RNA
gatgtgttcgttccccagc

SEQ ID NO: 3041 - RNA, 19 nt, synthetic construct
  misc_feature 1..19: note = Description of Artificial Sequence: Synthetic oligonucleotide
  source 1..19: mol_type = other RNA
ggatgtgttcgttccccag

SEQ ID NO: 3042 - RNA, 19 nt, synthetic construct
  misc_feature 1..19: note = Description of Artificial Sequence: Synthetic oligonucleotide
  source 1..19: mol_type = other RNA
tggatgtgttcgttcccca

SEQ ID NO: 3043 - RNA, 19 nt, synthetic construct
  misc_feature 1..19: note = Description of Artificial Sequence: Synthetic oligonucleotide
  source 1..19: mol_type = other RNA
gtggatgtgttcgttcccc

SEQ ID NO: 3044 - RNA, 19 nt, synthetic construct
  misc_feature 1..19: note = Description of Artificial Sequence: Synthetic oligonucleotide
  source 1..19: mol_type = other RNA
ggtggatgtgttcgttccc

SEQ ID NO: 3045 - RNA, 19 nt, synthetic construct
  misc_feature 1..19: note = Description of Artificial Sequence: Synthetic oligonucleotide
  source 1..19: mol_type = other RNA
cggtggatgtgttcgttcc

SEQ ID NO: 3046 - RNA, 19 nt, synthetic construct
  misc_feature 1..19: note = Description of Artificial Sequence: Synthetic oligonucleotide
  source 1..19: mol_type = other RNA
ccggtggatgtgttcgttc

SEQ ID NO: 3047 - RNA, 19 nt, synthetic construct
  misc_feature 1..19: note = Description of Artificial Sequence: Synthetic oligonucleotide
  source 1..19: mol_type = other RNA
gccggtggatgtgttcgtt

SEQ ID NO: 3048 - RNA, 19 nt, synthetic construct
  misc_feature 1..19: note = Description of Artificial Sequence: Synthetic oligonucleotide
  source 1..19: mol_type = other RNA
agccggtggatgtgttcgt

SEQ ID NO: 3049 - RNA, 19 nt, synthetic construct
  misc_feature 1..19: note = Description of Artificial Sequence: Synthetic oligonucleotide
  source 1..19: mol_type = other RNA
gagccggtggatgtgttcg

SEQ ID NO: 3050 - RNA, 19 nt, synthetic construct
  misc_feature 1..19: note = Description of Artificial Sequence: Synthetic oligonucleotide
  source 1..19: mol_type = other RNA
agagccggtggatgtgttc

SEQ ID NO: 3051 - RNA, 19 nt, synthetic construct
  misc_feature 1..19: note = Description of Artificial Sequence: Synthetic oligonucleotide
  source 1..19: mol_type = other RNA
gagagccggtggatgtgtt

SEQ ID NO: 3052 - RNA, 19 nt, synthetic construct
  misc_feature 1..19: note = Description of Artificial Sequence: Synthetic oligonucleotide
  source 1..19: mol_type = other RNA
ggagagccggtggatgtgt

SEQ ID NO: 3053 - RNA, 19 nt, synthetic construct
  misc_feature 1..19: note = Description of Artificial Sequence: Synthetic oligonucleotide
  source 1..19: mol_type = other RNA
tggagagccggtggatgtg

SEQ ID NO: 3054 - RNA, 19 nt, synthetic construct
  misc_feature 1..19: note = Description of Artificial Sequence: Synthetic oligonucleotide
  source 1..19: mol_type = other RNA
ctggagagccggtggatgt

SEQ ID NO: 3055 - RNA, 19 nt, synthetic construct
  misc_feature 1..19: note = Description of Artificial Sequence: Synthetic oligonucleotide
  source 1..19: mol_type = other RNA
tctggagagccggtggatg

SEQ ID NO: 3056 - RNA, 19 nt, synthetic construct
  misc_feature 1..19: note = Description of Artificial Sequence: Synthetic oligonucleotide
  source 1..19: mol_type = other RNA
gtctggagagccggtggat

SEQ ID NO: 3057 - RNA, 19 nt, synthetic construct
  misc_feature 1..19: note = Description of Artificial Sequence: Synthetic oligonucleotide
  source 1..19: mol_type = other RNA
tgtctggagagccggtgga

SEQ ID NO: 3058 - RNA, 19 nt, synthetic construct
  misc_feature 1..19: note = Description of Artificial Sequence: Synthetic oligonucleotide
  source 1..19: mol_type = other RNA
ctgtctggagagccggtgg

SEQ ID NO: 3059 - RNA, 19 nt, synthetic construct
  misc_feature 1..19: note = Description of Artificial Sequence: Synthetic oligonucleotide
  source 1..19: mol_type = other RNA
gctgtctggagagccggtg

SEQ ID NO: 3060 - RNA, 19 nt, synthetic construct
  misc_feature 1..19: note = Description of Artificial Sequence: Synthetic oligonucleotide
  source 1..19: mol_type = other RNA
ggctgtctggagagccggt

SEQ ID NO: 3061 - RNA, 19 nt, synthetic construct
  misc_feature 1..19: note = Description of Artificial Sequence: Synthetic oligonucleotide
  source 1..19: mol_type = other RNA
tggctgtctggagagccgg

SEQ ID NO: 3062 - RNA, 19 nt, synthetic construct
  misc_feature 1..19: note = Description of Artificial Sequence: Synthetic oligonucleotide
  source 1..19: mol_type = other RNA
ttggctgtctggagagccg

SEQ ID NO: 3063 - RNA, 19 nt, synthetic construct
  misc_feature 1..19: note = Description of Artificial Sequence: Synthetic oligonucleotide
  source 1..19: mol_type = other RNA
gttggctgtctggagagcc

SEQ ID NO: 3064 - RNA, 19 nt, synthetic construct
  misc_feature 1..19: note = Description of Artificial Sequence: Synthetic oligonucleotide
  source 1..19: mol_type = other RNA
ggttggctgtctggagagc

SEQ ID NO: 3065 - RNA, 19 nt, synthetic construct
  misc_feature 1..19: note = Description of Artificial Sequence: Synthetic oligonucleotide
  source 1..19: mol_type = other RNA
gggttggctgtctggagag

SEQ ID NO: 3066 - RNA, 19 nt, synthetic construct
  misc_feature 1..19: note = Description of Artificial Sequence: Synthetic oligonucleotide
  source 1..19: mol_type = other RNA
cgggttggctgtctggaga

SEQ ID NO: 3067 - RNA, 19 nt, synthetic construct
  misc_feature 1..19: note = Description of Artificial Sequence: Synthetic oligonucleotide
  source 1..19: mol_type = other RNA
ccgggttggctgtctggag

SEQ ID NO: 3068 - RNA, 19 nt, synthetic construct
  misc_feature 1..19: note = Description of Artificial Sequence: Synthetic oligonucleotide
  source 1..19: mol_type = other RNA
gccgggttggctgtctgga

SEQ ID NO: 3069 - RNA, 19 nt, synthetic construct
  misc_feature 1..19: note = Description of Artificial Sequence: Synthetic oligonucleotide
  source 1..19: mol_type = other RNA
agccgggttggctgtctgg

SEQ ID NO: 3070 - RNA, 19 nt, synthetic construct
  misc_feature 1..19: note = Description of Artificial Sequence: Synthetic oligonucleotide
  source 1..19: mol_type = other RNA
cagccgggttggctgtctg

SEQ ID NO: 3071 - RNA, 19 nt, synthetic construct
  misc_feature 1..19: note = Description of Artificial Sequence: Synthetic oligonucleotide
  source 1..19: mol_type = other RNA
gcagccgggttggctgtct

SEQ ID NO: 3072 - RNA, 19 nt, synthetic construct
  misc_feature 1..19: note = Description of Artificial Sequence: Synthetic oligonucleotide
  source 1..19: mol_type = other RNA
cgcagccgggttggctgtc

SEQ ID NO: 3073 - RNA, 19 nt, synthetic construct
  misc_feature 1..19: note = Description of Artificial Sequence: Synthetic oligonucleotide
  source 1..19: mol_type = other RNA
acgcagccgggttggctgt

SEQ ID NO: 3074 - RNA, 19 nt, synthetic construct
  misc_feature 1..19: note = Description of Artificial Sequence: Synthetic oligonucleotide
  source 1..19: mol_type = other RNA
cacgcagccgggttggctg

SEQ ID NO: 3075 - RNA, 19 nt, synthetic construct
  misc_feature 1..19: note = Description of Artificial Sequence: Synthetic oligonucleotide
  source 1..19: mol_type = other RNA
acacgcagccgggttggct

SEQ ID NO: 3076 - RNA, 19 nt, synthetic construct
  misc_feature 1..19: note = Description of Artificial Sequence: Synthetic oligonucleotide
  source 1..19: mol_type = other RNA
tacacgcagccgggttggc

SEQ ID NO: 3077 - RNA, 19 nt, synthetic construct
  misc_feature 1..19: note = Description of Artificial Sequence: Synthetic oligonucleotide
  source 1..19: mol_type = other RNA
ctacacgcagccgggttgg

SEQ ID NO: 3078 - RNA, 19 nt, synthetic construct
  misc_feature 1..19: note = Description of Artificial Sequence: Synthetic oligonucleotide
  source 1..19: mol_type = other RNA
tctacacgcagccgggttg

SEQ ID NO: 3079 - RNA, 19 nt, synthetic construct
  misc_feature 1..19: note = Description of Artificial Sequence: Synthetic oligonucleotide
  source 1..19: mol_type = other RNA
ctctacacgcagccgggtt

SEQ ID NO: 3080 - RNA, 19 nt, synthetic construct
  misc_feature 1..19: note = Description of Artificial Sequence: Synthetic oligonucleotide
  source 1..19: mol_type = other RNA
tctctacacgcagccgggt

SEQ ID NO: 3081 - RNA, 19 nt, synthetic construct
  misc_feature 1..19: note = Description of Artificial Sequence: Synthetic oligonucleotide
  source 1..19: mol_type = other RNA
atctctacacgcagccggg

SEQ ID NO: 3082 - RNA, 19 nt, synthetic construct
  misc_feature 1..19: note = Description of Artificial Sequence: Synthetic oligonucleotide
  source 1..19: mol_type = other RNA
catctctacacgcagccgg

SEQ ID NO: 3083 - RNA, 19 nt, synthetic construct
  misc_feature 1..19: note = Description of Artificial Sequence: Synthetic oligonucleotide
  source 1..19: mol_type = other RNA
ccatctctacacgcagccg

SEQ ID NO: 3084 - RNA, 19 nt, synthetic construct
  misc_feature 1..19: note = Description of Artificial Sequence: Synthetic oligonucleotide
  source 1..19: mol_type = other RNA
tccatctctacacgcagcc

SEQ ID NO: 3085 - RNA, 19 nt, synthetic construct
  misc_feature 1..19: note = Description of Artificial Sequence: Synthetic oligonucleotide
  source 1..19: mol_type = other RNA
ctccatctctacacgcagc

SEQ ID NO: 3086 - RNA, 19 nt, synthetic construct
  misc_feature 1..19: note = Description of Artificial Sequence: Synthetic oligonucleotide
  source 1..19: mol_type = other RNA
cctccatctctacacgcag

SEQ ID NO: 3087 - RNA, 19 nt, synthetic construct
  misc_feature 1..19: note = Description of Artificial Sequence: Synthetic oligonucleotide
  source 1..19: mol_type = other RNA
tcctccatctctacacgca

SEQ ID NO: 3088 - RNA, 19 nt, synthetic construct
  misc_feature 1..19: note = Description of Artificial Sequence: Synthetic oligonucleotide
  source 1..19: mol_type = other RNA
gtcctccatctctacacgc

SEQ ID NO: 3089 - RNA, 19 nt, synthetic construct
  misc_feature 1..19: note = Description of Artificial Sequence: Synthetic oligonucleotide
  source 1..19: mol_type = other RNA
agtcctccatctctacacg

SEQ ID NO: 3090 - RNA, 19 nt, synthetic construct
  misc_feature 1..19: note = Description of Artificial Sequence: Synthetic oligonucleotide
  source 1..19: mol_type = other RNA
cagtcctccatctctacac

SEQ ID NO: 3091 - RNA, 19 nt, synthetic construct
  misc_feature 1..19: note = Description of Artificial Sequence: Synthetic oligonucleotide
  source 1..19: mol_type = other RNA
ccagtcctccatctctaca

SEQ ID NO: 3092 - RNA, 19 nt, synthetic construct
  misc_feature 1..19: note = Description of Artificial Sequence: Synthetic oligonucleotide
  source 1..19: mol_type = other RNA
cccagtcctccatctctac

SEQ ID NO: 3093 - RNA, 19 nt, synthetic construct
  misc_feature 1..19: note = Description of Artificial Sequence: Synthetic oligonucleotide
  source 1..19: mol_type = other RNA
tcccagtcctccatctcta

SEQ ID NO: 3094 - RNA, 19 nt, synthetic construct
  misc_feature 1..19: note = Description of Artificial Sequence: Synthetic oligonucleotide
  source 1..19: mol_type = other RNA
ctcccagtcctccatctct

SEQ ID NO: 3095 - RNA, 19 nt, synthetic construct
  misc_feature 1..19: note = Description of Artificial Sequence: Synthetic oligonucleotide
  source 1..19: mol_type = other RNA
cctcccagtcctccatctc

SEQ ID NO: 3096 - RNA, 19 nt, synthetic construct
  misc_feature 1..19: note = Description of Artificial Sequence: Synthetic oligonucleotide
  source 1..19: mol_type = other RNA
ccctcccagtcctccatct

SEQ ID NO: 3097 - RNA, 19 nt, synthetic construct
  misc_feature 1..19: note = Description of Artificial Sequence: Synthetic oligonucleotide
  source 1..19: mol_type = other RNA
gccctcccagtcctccatc

SEQ ID NO: 3098 - RNA, 19 nt, synthetic construct
  misc_feature 1..19: note = Description of Artificial Sequence: Synthetic oligonucleotide
  source 1..19: mol_type = other RNA
tgccctcccagtcctccat

SEQ ID NO: 3099 - RNA, 19 nt, synthetic construct
  misc_feature 1..19: note = Description of Artificial Sequence: Synthetic oligonucleotide
  source 1..19: mol_type = other RNA
ttgccctcccagtcctcca

SEQ ID NO: 3100 - RNA, 19 nt, synthetic construct
  misc_feature 1..19: note = Description of Artificial Sequence: Synthetic oligonucleotide
  source 1..19: mol_type = other RNA
gttgccctcccagtcctcc

SEQ ID NO: 3101 - RNA, 19 nt, synthetic construct
  misc_feature 1..19: note = Description of Artificial Sequence: Synthetic oligonucleotide
  source 1..19: mol_type = other RNA
ggttgccctcccagtcctc

SEQ ID NO: 3102 - RNA, 19 nt, synthetic construct
  misc_feature 1..19: note = Description of Artificial Sequence: Synthetic oligonucleotide
  source 1..19: mol_type = other RNA
aggttgccctcccagtcct

SEQ ID NO: 3103 - RNA, 19 nt, synthetic construct
  misc_feature 1..19: note = Description of Artificial Sequence: Synthetic oligonucleotide
  source 1..19: mol_type = other RNA
caggttgccctcccagtcc

SEQ ID NO: 3104 - RNA, 19 nt, synthetic construct
  misc_feature 1..19: note = Description of Artificial Sequence: Synthetic oligonucleotide
  source 1..19: mol_type = other RNA
gcaggttgccctcccagtc

SEQ ID NO: 3105 - RNA, 19 nt, synthetic construct
  misc_feature 1..19: note = Description of Artificial Sequence: Synthetic oligonucleotide
  source 1..19: mol_type = other RNA
cgcaggttgccctcccagt

SEQ ID NO: 3106 - RNA, 19 nt, synthetic construct
  misc_feature 1..19: note = Description of Artificial Sequence: Synthetic oligonucleotide
  source 1..19: mol_type = other RNA
gcgcaggttgccctcccag

SEQ ID NO: 3107 - RNA, 19 nt, synthetic construct
  misc_feature 1..19: note = Description of Artificial Sequence: Synthetic oligonucleotide
  source 1..19: mol_type = other RNA
agcgcaggttgccctccca

SEQ ID NO: 3108 - RNA, 19 nt, synthetic construct
  misc_feature 1..19: note = Description of Artificial Sequence: Synthetic oligonucleotide
  source 1..19: mol_type = other RNA
tagcgcaggttgccctccc

SEQ ID NO: 3109 - RNA, 19 nt, synthetic construct
  misc_feature 1..19: note = Description of Artificial Sequence: Synthetic oligonucleotide
  source 1..19: mol_type = other RNA
gtagcgcaggttgccctcc

SEQ ID NO: 3110 - RNA, 19 nt, synthetic construct
  misc_feature 1..19: note = Description of Artificial Sequence: Synthetic oligonucleotide
  source 1..19: mol_type = other RNA
cgtagcgcaggttgccctc

SEQ ID NO: 3111 - RNA, 19 nt, synthetic construct
  misc_feature 1..19: note = Description of Artificial Sequence: Synthetic oligonucleotide
  source 1..19: mol_type = other RNA
gcgtagcgcaggttgccct

SEQ ID NO: 3112 - RNA, 19 nt, synthetic construct
  misc_feature 1..19: note = Description of Artificial Sequence: Synthetic oligonucleotide
  source 1..19: mol_type = other RNA
agcgtagcgcaggttgccc

SEQ ID NO: 3113 - RNA, 19 nt, synthetic construct
  misc_feature 1..19: note = Description of Artificial Sequence: Synthetic oligonucleotide
  source 1..19: mol_type = other RNA
cagcgtagcgcaggttgcc

SEQ ID NO: 3114 - RNA, 19 nt, synthetic construct
  misc_feature 1..19: note = Description of Artificial Sequence: Synthetic oligonucleotide
  source 1..19: mol_type = other RNA
tcagcgtagcgcaggttgc

SEQ ID NO: 3115 - RNA, 19 nt, synthetic construct
  misc_feature 1..19: note = Description of Artificial Sequence: Synthetic oligonucleotide
  source 1..19: mol_type = other RNA
ctcagcgtagcgcaggttg

SEQ ID NO: 3116 - RNA, 19 nt, synthetic construct
  misc_feature 1..19: note = Description of Artificial Sequence: Synthetic oligonucleotide
  source 1..19: mol_type = other RNA
actcagcgtagcgcaggtt

SEQ ID NO: 3117 - RNA, 19 nt, synthetic construct
  misc_feature 1..19: note = Description of Artificial Sequence: Synthetic oligonucleotide
  source 1..19: mol_type = other RNA
tactcagcgtagcgcaggt

SEQ ID NO: 3118 - RNA, 19 nt, synthetic construct
  misc_feature 1..19: note = Description of Artificial Sequence: Synthetic oligonucleotide
  source 1..19: mol_type = other RNA
atactcagcgtagcgcagg

SEQ ID NO: 3119 - RNA, 19 nt, synthetic construct
  misc_feature 1..19: note = Description of Artificial Sequence: Synthetic oligonucleotide
  source 1..19: mol_type = other RNA
tatactcagcgtagcgcag

SEQ ID NO: 3120 - RNA, 19 nt, synthetic construct
  misc_feature 1..19: note = Description of Artificial Sequence: Synthetic oligonucleotide
  source 1..19: mol_type = other RNA
ctatactcagcgtagcgca

SEQ ID NO: 3121 - RNA, 19 nt, synthetic construct
  misc_feature 1..19: note = Description of Artificial Sequence: Synthetic oligonucleotide
  source 1..19: mol_type = other RNA
gctatactcagcgtagcgc

SEQ ID NO: 3122 - RNA, 19 nt, synthetic construct
  misc_feature 1..19: note = Description of Artificial Sequence: Synthetic oligonucleotide
  source 1..19: mol_type = other RNA
ggctatactcagcgtagcg

SEQ ID NO: 3123 - RNA, 19 nt, synthetic construct
  misc_feature 1..19: note = Description of Artificial Sequence: Synthetic oligonucleotide
  source 1..19: mol_type = other RNA
tggctatactcagcgtagc

SEQ ID NO: 3124 - RNA, 19 nt, synthetic construct
  misc_feature 1..19: note = Description of Artificial Sequence: Synthetic oligonucleotide
  source 1..19: mol_type = other RNA
gtggctatactcagcgtag

SEQ ID NO: 3125 - RNA, 19 nt, synthetic construct
  misc_feature 1..19: note = Description of Artificial Sequence: Synthetic oligonucleotide
  source 1..19: mol_type = other RNA
agtggctatactcagcgta

SEQ ID NO: 3126 - RNA, 19 nt, synthetic construct
  misc_feature 1..19: note = Description of Artificial Sequence: Synthetic oligonucleotide
  source 1..19: mol_type = other RNA
aagtggctatactcagcgt

SEQ ID NO: 3127 - RNA, 19 nt, synthetic construct
  misc_feature 1..19: note = Description of Artificial Sequence: Synthetic oligonucleotide
  source 1..19: mol_type = other RNA
aaagtggctatactcagcg

SEQ ID NO: 3128 - RNA, 19 nt, synthetic construct
  misc_feature 1..19: note = Description of Artificial Sequence: Synthetic oligonucleotide
  source 1..19: mol_type = other RNA
caaagtggctatactcagc

SEQ ID NO: 3129 - RNA, 19 nt, synthetic construct
  misc_feature 1..19: note = Description of Artificial Sequence: Synthetic oligonucleotide
  source 1..19: mol_type = other RNA
acaaagtggctatactcag

SEQ ID NO: 3130 - RNA, 19 nt, synthetic construct
  misc_feature 1..19: note = Description of Artificial Sequence: Synthetic oligonucleotide
  source 1..19: mol_type = other RNA
aacaaagtggctatactca

SEQ ID NO: 3131 - RNA, 19 nt, synthetic construct
  misc_feature 1..19: note = Description of Artificial Sequence: Synthetic oligonucleotide
  source 1..19: mol_type = other RNA
aaacaaagtggctatactc

SEQ ID NO: 3132 - RNA, 19 nt, synthetic construct
  misc_feature 1..19: note = Description of Artificial Sequence: Synthetic oligonucleotide
  source 1..19: mol_type = other RNA
aaaacaaagtggctatact

SEQ ID NO: 3133 - RNA, 19 nt, synthetic construct
  misc_feature 1..19: note = Description of Artificial Sequence: Synthetic oligonucleotide
  source 1..19: mol_type = other RNA
caaaacaaagtggctatac

SEQ ID NO: 3134 - RNA, 19 nt, synthetic construct
  misc_feature 1..19: note = Description of Artificial Sequence: Synthetic oligonucleotide
  source 1..19: mol_type = other RNA
ccaaaacaaagtggctata

SEQ ID NO: 3135 - RNA, 19 nt, synthetic construct
  misc_feature 1..19: note = Description of Artificial Sequence: Synthetic oligonucleotide
  source 1..19: mol_type = other RNA
cccaaaacaaagtggctat

SEQ ID NO: 3136 - RNA, 19 nt, synthetic construct
  misc_feature 1..19: note = Description of Artificial Sequence: Synthetic oligonucleotide
  source 1..19: mol_type = other RNA
gcccaaaacaaagtggcta

SEQ ID NO: 3137 - RNA, 19 nt, synthetic construct
  misc_feature 1..19: note = Description of Artificial Sequence: Synthetic oligonucleotide
  source 1..19: mol_type = other RNA
tgcccaaaacaaagtggct

SEQ ID NO: 3138 - RNA, 19 nt, synthetic construct
  misc_feature 1..19: note = Description of Artificial Sequence: Synthetic oligonucleotide
  source 1..19: mol_type = other RNA
ttgcccaaaacaaagtggc

SEQ ID NO: 3139 - RNA, 19 nt, synthetic construct
  misc_feature 1..19: note = Description of Artificial Sequence: Synthetic oligonucleotide
  source 1..19: mol_type = other RNA
attgcccaaaacaaagtgg

SEQ ID NO: 3140 - RNA, 19 nt, synthetic construct
  misc_feature 1..19: note = Description of Artificial Sequence: Synthetic oligonucleotide
  source 1..19: mol_type = other RNA
cattgcccaaaacaaagtg

SEQ ID NO: 3141 - RNA, 19 nt, synthetic construct
  misc_feature 1..19: note = Description of Artificial Sequence: Synthetic oligonucleotide
  source 1..19: mol_type = other RNA
tcattgcccaaaacaaagt

SEQ ID NO: 3142 - RNA, 19 nt, synthetic construct
  misc_feature 1..19: note = Description of Artificial Sequence: Synthetic oligonucleotide
  source 1..19: mol_type = other RNA
ttcattgcccaaaacaaag

SEQ ID NO: 3143 - RNA, 19 nt, synthetic construct
  misc_feature 1..19: note = Description of Artificial Sequence: Synthetic oligonucleotide
  source 1..19: mol_type = other RNA
gttcattgcccaaaacaaa

SEQ ID NO: 3144 - RNA, 19 nt, synthetic construct
  misc_feature 1..19: note = Description of Artificial Sequence: Synthetic oligonucleotide
  source 1..19: mol_type = other RNA
agttcattgcccaaaacaa

SEQ ID NO: 3145 - RNA, 19 nt, synthetic construct
  misc_feature 1..19: note = Description of Artificial Sequence: Synthetic oligonucleotide
  source 1..19: mol_type = other RNA
gagttcattgcccaaaaca

SEQ ID NO: 3146 - RNA, 19 nt, synthetic construct
  misc_feature 1..19: note = Description of Artificial Sequence: Synthetic oligonucleotide
  source 1..19: mol_type = other RNA
tgagttcattgcccaaaac

SEQ ID NO: 3147 - RNA, 19 nt, synthetic construct
  misc_feature 1..19: note = Description of Artificial Sequence: Synthetic oligonucleotide
  source 1..19: mol_type = other RNA
ttgagttcattgcccaaaa

SEQ ID NO: 3148 - RNA, 19 nt, synthetic construct
  misc_feature 1..19: note = Description of Artificial Sequence: Synthetic oligonucleotide
  source 1..19: mol_type = other RNA
gttgagttcattgcccaaa

SEQ ID NO: 3149 - RNA, 19 nt, synthetic construct
  misc_feature 1..19: note = Description of Artificial Sequence: Synthetic oligonucleotide
  source 1..19: mol_type = other RNA
tgttgagttcattgcccaa

SEQ ID NO: 3150 - RNA, 19 nt, synthetic construct
  misc_feature 1..19: note = Description of Artificial Sequence: Synthetic oligonucleotide
  source 1..19: mol_type = other RNA
ctgttgagttcattgccca

SEQ ID NO: 3151 - RNA, 19 nt, synthetic construct
  misc_feature 1..19: note = Description of Artificial Sequence: Synthetic oligonucleotide
  source 1..19: mol_type = other RNA
gctgttgagttcattgccc

SEQ ID NO: 3152 - RNA, 19 nt, synthetic construct
  misc_feature 1..19: note = Description of Artificial Sequence: Synthetic oligonucleotide
  source 1..19: mol_type = other RNA
agctgttgagttcattgcc

SEQ ID NO: 3153 - RNA, 19 nt, synthetic construct
  misc_feature 1..19: note = Description of Artificial Sequence: Synthetic oligonucleotide
  source 1..19: mol_type = other RNA
tagctgttgagttcattgc

SEQ ID NO: 3154 - RNA, 19 nt, synthetic construct
  misc_feature 1..19: note = Description of Artificial Sequence: Synthetic oligonucleotide
  source 1..19: mol_type = other RNA
atagctgttgagttcattg

SEQ ID NO: 3155 - RNA, 19 nt, synthetic construct
  misc_feature 1..19: note = Description of Artificial Sequence: Synthetic oligonucleotide
  source 1..19: mol_type = other RNA
gatagctgttgagttcatt

SEQ ID NO: 3156 - RNA, 19 nt, synthetic construct
  misc_feature 1..19: note = Description of Artificial Sequence: Synthetic oligonucleotide
  source 1..19: mol_type = other RNA
cgatagctgttgagttcat

SEQ ID NO: 3157 - RNA, 19 nt, synthetic construct
  misc_feature 1..19: note = Description of Artificial Sequence: Synthetic oligonucleotide
  source 1..19: mol_type = other RNA
gcgatagctgttgagttca

SEQ ID NO: 3158 - RNA, 19 nt, synthetic construct
  misc_feature 1..19: note = Description of Artificial Sequence: Synthetic oligonucleotide
  source 1..19: mol_type = other RNA
ggcgatagctgttgagttc

SEQ ID NO: 3159 - RNA, 19 nt, synthetic construct
  misc_feature 1..19: note = Description of Artificial Sequence: Synthetic oligonucleotide
  source 1..19: mol_type = other RNA
aggcgatagctgttgagtt

SEQ ID NO: 3160 - RNA, 19 nt, synthetic construct
  misc_feature 1..19: note = Description of Artificial Sequence: Synthetic oligonucleotide
  source 1..19: mol_type = other RNA
gaggcgatagctgttgagt

SEQ ID NO: 3161 - RNA, 19 nt, synthetic construct
  misc_feature 1..19: note = Description of Artificial Sequence: Synthetic oligonucleotide
  source 1..19: mol_type = other RNA
agaggcgatagctgttgag

SEQ ID NO: 3162 - RNA, 19 nt, synthetic construct
  misc_feature 1..19: note = Description of Artificial Sequence: Synthetic oligonucleotide
  source 1..19: mol_type = other RNA
aagaggcgatagctgttga

SEQ ID NO: 3163 - RNA, 19 nt, synthetic construct
  misc_feature 1..19: note = Description of Artificial Sequence: Synthetic oligonucleotide
  source 1..19: mol_type = other RNA
gaagaggcgatagctgttg

SEQ ID NO: 3164 - RNA, 19 nt, synthetic construct
  misc_feature 1..19: note = Description of Artificial Sequence: Synthetic oligonucleotide
  source 1..19: mol_type = other RNA
ggaagaggcgatagctgtt

SEQ ID NO: 3165 - RNA, 19 nt, synthetic construct
  misc_feature 1..19: note = Description of Artificial Sequence: Synthetic oligonucleotide
  source 1..19: mol_type = other RNA
aggaagaggcgatagctgt

SEQ ID NO: 3166 - RNA, 19 nt, synthetic construct
  misc_feature 1..19: note = Description of Artificial Sequence: Synthetic oligonucleotide
  source 1..19: mol_type = other RNA
caggaagaggcgatagctg

SEQ ID NO: 3167 - RNA, 19 nt, synthetic construct
  misc_feature 1..19: note = Description of Artificial Sequence: Synthetic oligonucleotide
  source 1..19: mol_type = other RNA
ccaggaagaggcgatagct

SEQ ID NO: 3168 - RNA, 19 nt, synthetic construct
  misc_feature 1..19: note = Description of Artificial Sequence: Synthetic oligonucleotide
  source 1..19: mol_type = other RNA
cccaggaagaggcgatagc

SEQ ID NO: 3169 - RNA, 19 nt, synthetic construct
  misc_feature 1..19: note = Description of Artificial Sequence: Synthetic oligonucleotide
  source 1..19: mol_type = other RNA
ccccaggaagaggcgatag

SEQ ID NO: 3170 - RNA, 19 nt, synthetic construct
  misc_feature 1..19: note = Description of Artificial Sequence: Synthetic oligonucleotide
  source 1..19: mol_type = other RNA
tccccaggaagaggcgata

SEQ ID NO: 3171 - RNA, 19 nt, synthetic construct
  misc_feature 1..19: note = Description of Artificial Sequence: Synthetic oligonucleotide
  source 1..19: mol_type = other RNA
ttccccaggaagaggcgat

SEQ ID NO: 3172 - RNA, 19 nt, synthetic construct
  misc_feature 1..19: note = Description of Artificial Sequence: Synthetic oligonucleotide
  source 1..19: mol_type = other RNA
gttccccaggaagaggcga

SEQ ID NO: 3173 - RNA, 19 nt, synthetic construct
  misc_feature 1..19: note = Description of Artificial Sequence: Synthetic oligonucleotide
  source 1..19: mol_type = other RNA
agttccccaggaagaggcg

SEQ ID NO: 3174 - RNA, 19 nt, synthetic construct
  misc_feature 1..19: note = Description of Artificial Sequence: Synthetic oligonucleotide
  source 1..19: mol_type = other RNA
tagttccccaggaagaggc

SEQ ID NO: 3175 - RNA, 19 nt, synthetic construct
  misc_feature 1..19: note = Description of Artificial Sequence: Synthetic oligonucleotide
  source 1..19: mol_type = other RNA
gtagttccccaggaagagg

SEQ ID NO: 3176 - RNA, 19 nt, synthetic construct
  misc_feature 1..19: note = Description of Artificial Sequence: Synthetic oligonucleotide
  source 1..19: mol_type = other RNA
tgtagttccccaggaagag

SEQ ID NO: 3177 - RNA, 19 nt, synthetic construct
  misc_feature 1..19: note = Description of Artificial Sequence: Synthetic oligonucleotide
  source 1..19: mol_type = other RNA
gtgtagttccccaggaaga

SEQ ID NO: 3178 - RNA, 19 nt, synthetic construct
  misc_feature 1..19: note = Description of Artificial Sequence: Synthetic oligonucleotide
  source 1..19: mol_type = other RNA
agtgtagttccccaggaag

SEQ ID NO: 3179 - RNA, 19 nt, synthetic construct
  misc_feature 1..19: note = Description of Artificial Sequence: Synthetic oligonucleotide
  source 1..19: mol_type = other RNA
cagtgtagttccccaggaa

SEQ ID NO: 3180 - RNA, 19 nt, synthetic construct
  misc_feature 1..19: note = Description of Artificial Sequence: Synthetic oligonucleotide
  source 1..19: mol_type = other RNA
ccagtgtagttccccagga

SEQ ID NO: 3181 - RNA, 19 nt, synthetic construct
  misc_feature 1..19: note = Description of Artificial Sequence: Synthetic oligonucleotide
  source 1..19: mol_type = other RNA
gccagtgtagttccccagg

SEQ ID NO: 3182 - RNA, 19 nt, synthetic construct
  misc_feature 1..19: note = Description of Artificial Sequence: Synthetic oligonucleotide
  source 1..19: mol_type = other RNA
tgccagtgtagttccccag

SEQ ID NO: 3183 - RNA, 19 nt, synthetic construct
  misc_feature 1..19: note = Description of Artificial Sequence: Synthetic oligonucleotide
  source 1..19: mol_type = other RNA
ttgccagtgtagttcccca

SEQ ID NO: 3184 - RNA, 19 nt, synthetic construct
  misc_feature 1..19: note = Description of Artificial Sequence: Synthetic oligonucleotide
  source 1..19: mol_type = other RNA
attgccagtgtagttcccc

SEQ ID NO: 3185 - RNA, 19 nt, synthetic construct
  misc_feature 1..19: note = Description of Artificial Sequence: Synthetic oligonucleotide
  source 1..19: mol_type = other RNA
cattgccagtgtagttccc

SEQ ID NO: 3186 - RNA, 19 nt, synthetic construct
  misc_feature 1..19: note = Description of Artificial Sequence: Synthetic oligonucleotide
  source 1..19: mol_type = other RNA
acattgccagtgtagttcc

SEQ ID NO: 3187 - RNA, 19 nt, synthetic construct
  misc_feature 1..19: note = Description of Artificial Sequence: Synthetic oligonucleotide
  source 1..19: mol_type = other RNA
cacattgccagtgtagttc

SEQ ID NO: 3188 - RNA, 19 nt, synthetic construct
  misc_feature 1..19: note = Description of Artificial Sequence: Synthetic oligonucleotide
  source 1..19: mol_type = other RNA
ccacattgccagtgtagtt

SEQ ID NO: 3189 - RNA, 19 nt, synthetic construct
  misc_feature 1..19: note = Description of Artificial Sequence: Synthetic oligonucleotide
  source 1..19: mol_type = other RNA
cccacattgccagtgtagt

SEQ ID NO: 3190 - RNA, 19 nt, synthetic construct
  misc_feature 1..19: note = Description of Artificial Sequence: Synthetic oligonucleotide
  source 1..19: mol_type = other RNA
ccccacattgccagtgtag

SEQ ID NO: 3191 - RNA, 19 nt, synthetic construct
  misc_feature 1..19: note = Description of Artificial Sequence: Synthetic oligonucleotide
  source 1..19: mol_type = other RNA
tccccacattgccagtgta

SEQ ID NO: 3192 - RNA, 19 nt, synthetic construct
  misc_feature 1..19: note = Description of Artificial Sequence: Synthetic oligonucleotide
  source 1..19: mol_type = other RNA
ttccccacattgccagtgt

SEQ ID NO: 3193 - RNA, 19 nt, synthetic construct
  misc_feature 1..19: note = Description of Artificial Sequence: Synthetic oligonucleotide
  source 1..19: mol_type = other RNA
gttccccacattgccagtg

SEQ ID NO: 3194 - RNA, 19 nt, synthetic construct
  misc_feature 1..19: note = Description of Artificial Sequence: Synthetic oligonucleotide
  source 1..19: mol_type = other RNA
cgttccccacattgccagt

SEQ ID NO: 3195 - RNA, 19 nt, synthetic construct
  misc_feature 1..19: note = Description of Artificial Sequence: Synthetic oligonucleotide
  source 1..19: mol_type = other RNA
tcgttccccacattgccag

SEQ ID NO: 3196 - RNA, 19 nt, synthetic construct
  misc_feature 1..19: note = Description of Artificial Sequence: Synthetic oligonucleotide
  source 1..19: mol_type = other RNA
gtcgttccccacattgcca

SEQ ID NO: 3197 - RNA, 19 nt, synthetic construct
  misc_feature 1..19: note = Description of Artificial Sequence: Synthetic oligonucleotide
  source 1..19: mol_type = other RNA
cgtcgttccccacattgcc

SEQ ID NO: 3198 - RNA, 19 nt, synthetic construct
  misc_feature 1..19: note = Description of Artificial Sequence: Synthetic oligonucleotide
  source 1..19: mol_type = other RNA
gcgtcgttccccacattgc

SEQ ID NO: 3199 - RNA, 19 nt, synthetic construct
  misc_feature 1..19: note = Description of Artificial Sequence: Synthetic oligonucleotide
  source 1..19: mol_type = other RNA
ggcgtcgttccccacattg

SEQ ID NO: 3200 - RNA, 19 nt, synthetic construct
  misc_feature 1..19: note = Description of Artificial Sequence: Synthetic oligonucleotide
  source 1..19: mol_type = other RNA
gggcgtcgttccccacatt

SEQ ID NO: 3201 - RNA, 19 nt, synthetic construct
  misc_feature 1..19: note = Description of Artificial Sequence: Synthetic oligonucleotide
  source 1..19: mol_type = other RNA
agggcgtcgttccccacat

SEQ ID NO: 3202 - RNA, 19 nt, synthetic construct
  misc_feature 1..19: note = Description of Artificial Sequence: Synthetic oligonucleotide
  source 1..19: mol_type = other RNA
gagggcgtcgttccccaca

SEQ ID NO: 3203 - RNA, 19 nt, synthetic construct
  misc_feature 1..19: note = Description of Artificial Sequence: Synthetic oligonucleotide
  source 1..19: mol_type = other RNA
ggagggcgtcgttccccac

SEQ ID NO: 3204 - RNA, 19 nt, synthetic construct
  misc_feature 1..19: note = Description of Artificial Sequence: Synthetic oligonucleotide
  source 1..19: mol_type = other RNA
tggagggcgtcgttcccca

SEQ ID NO: 3205 - RNA, 19 nt, synthetic construct
  misc_feature 1..19: note = Description of Artificial Sequence: Synthetic oligonucleotide
  source 1..19: mol_type = other RNA
ctggagggcgtcgttcccc

SEQ ID NO: 3206 - RNA, 19 nt, synthetic construct
  misc_feature 1..19: note = Description of Artificial Sequence: Synthetic oligonucleotide
  source 1..19: mol_type = other RNA
actggagggcgtcgttccc

SEQ ID NO: 3207 - RNA, 19 nt, synthetic construct
  misc_feature 1..19: note = Description of Artificial Sequence: Synthetic oligonucleotide
  source 1..19: mol_type = other RNA
tactggagggcgtcgttcc

SEQ ID NO: 3208 - RNA, 19 nt, synthetic construct
  misc_feature 1..19: note = Description of Artificial Sequence: Synthetic oligonucleotide
  source 1..19: mol_type = other RNA
atactggagggcgtcgttc

SEQ ID NO: 3209 - RNA, 19 nt, synthetic construct
  misc_feature 1..19: note = Description of Artificial Sequence: Synthetic oligonucleotide
  source 1..19: mol_type = other RNA
gatactggagggcgtcgtt

SEQ ID NO: 3210 - RNA, 19 nt, synthetic construct
  misc_feature 1..19: note = Description of Artificial Sequence: Synthetic oligonucleotide
  source 1..19: mol_type = other RNA
tgatactggagggcgtcgt

SEQ ID NO: 3211 - RNA, 19 nt, synthetic construct
  misc_feature 1..19: note = Description of Artificial Sequence: Synthetic oligonucleotide
  source 1..19: mol_type = other RNA
atgatactggagggcgtcg

SEQ ID NO: 3212 - RNA, 19 nt, synthetic construct
  misc_feature 1..19: note = Description of Artificial Sequence: Synthetic oligonucleotide
  source 1..19: mol_type = other RNA
tatgatactggagggcgtc

SEQ ID NO: 3213 - RNA, 19 nt, synthetic construct
  misc_feature 1..19: note = Description of Artificial Sequence: Synthetic oligonucleotide
  source 1..19: mol_type = other RNA
ttatgatactggagggcgt

SEQ ID NO: 3214 - RNA, 19 nt, synthetic construct
  misc_feature 1..19: note = Description of Artificial Sequence: Synthetic oligonucleotide
  source 1..19: mol_type = other RNA
gttatgatactggagggcg

SEQ ID NO: 3215 - RNA, 19 nt, synthetic construct
  misc_feature 1..19: note = Description of Artificial Sequence: Synthetic oligonucleotide
  source 1..19: mol_type = other RNA
tgttatgatactggagggc

SEQ ID NO: 3216 - RNA, 19 nt, synthetic construct
  misc_feature 1..19: note = Description of Artificial Sequence: Synthetic oligonucleotide
  source 1..19: mol_type = other RNA
ttgttatgatactggaggg

SEQ ID NO: 3217 - RNA, 19 nt, synthetic construct
  misc_feature 1..19: note = Description of Artificial Sequence: Synthetic oligonucleotide
  source 1..19: mol_type = other RNA
gttgttatgatactggagg

SEQ ID NO: 3218 - RNA, 19 nt, synthetic construct
  misc_feature 1..19: note = Description of Artificial Sequence: Synthetic oligonucleotide
  source 1..19: mol_type = other RNA
tgttgttatgatactggag

SEQ ID NO: 3219 - RNA, 19 nt, synthetic construct
  misc_feature 1..19: note = Description of Artificial Sequence: Synthetic oligonucleotide
  source 1..19: mol_type = other RNA
gtgttgttatgatactgga

SEQ ID NO: 3220 - RNA, 19 nt, synthetic construct
  misc_feature 1..19: note = Description of Artificial Sequence: Synthetic oligonucleotide
  source 1..19: mol_type = other RNA
tgtgttgttatgatactgg

SEQ ID NO: 3221 - RNA, 19 nt, synthetic construct
  misc_feature 1..19: note = Description of Artificial Sequence: Synthetic oligonucleotide
  source 1..19: mol_type = other RNA
ctgtgttgttatgatactg

SEQ ID NO: 3222 - RNA, 19 nt, synthetic construct
  misc_feature 1..19: note = Description of Artificial Sequence: Synthetic oligonucleotide
  source 1..19: mol_type = other RNA
gctgtgttgttatgatact

SEQ ID NO: 3223 - RNA, 19 nt, synthetic construct
  misc_feature 1..19: note = Description of Artificial Sequence: Synthetic oligonucleotide
  source 1..19: mol_type = other RNA
ggctgtgttgttatgatac

SEQ ID NO: 3224 - RNA, 19 nt, synthetic construct
  misc_feature 1..19: note = Description of Artificial Sequence: Synthetic oligonucleotide
  source 1..19: mol_type = other RNA
aggctgtgttgttatgata

SEQ ID NO: 3225 - RNA, 19 nt, synthetic construct
  misc_feature 1..19: note = Description of Artificial Sequence: Synthetic oligonucleotide
  source 1..19: mol_type = other RNA
aaggctgtgttgttatgat

SEQ ID NO: 3226 - RNA, 19 nt, synthetic construct
  misc_feature 1..19: note = Description of Artificial Sequence: Synthetic oligonucleotide
  source 1..19: mol_type = other RNA
gaaggctgtgttgttatga

SEQ ID NO: 3227 - RNA, 19 nt, synthetic construct
  misc_feature 1..19: note = Description of Artificial Sequence: Synthetic oligonucleotide
  source 1..19: mol_type = other RNA
tgaaggctgtgttgttatg

SEQ ID NO: 3228 - RNA, 19 nt, synthetic construct
  misc_feature 1..19: note = Description of Artificial Sequence: Synthetic oligonucleotide
  source 1..19: mol_type = other RNA
ctgaaggctgtgttgttat

SEQ ID NO: 3229 - RNA, 19 nt, synthetic construct
  misc_feature 1..19: note = Description of Artificial Sequence: Synthetic oligonucleotide
  source 1..19: mol_type = other RNA
gctgaaggctgtgttgtta

SEQ ID NO: 3230 - RNA, 19 nt, synthetic construct
  misc_feature 1..19: note = Description of Artificial Sequence: Synthetic oligonucleotide
  source 1..19: mol_type = other RNA
tgctgaaggctgtgttgtt

SEQ ID NO: 3231 - RNA, 19 nt, synthetic construct
  misc_feature 1..19: note = Description of Artificial Sequence: Synthetic oligonucleotide
  source 1..19: mol_type = other RNA
gtgctgaaggctgtgttgt

SEQ ID NO: 3232 - RNA, 19 nt, synthetic construct
  misc_feature 1..19: note = Description of Artificial Sequence: Synthetic oligonucleotide
  source 1..19: mol_type = other RNA
ggtgctgaaggctgtgttg

SEQ ID NO: 3233 - RNA, 19 nt, synthetic construct
  misc_feature 1..19: note = Description of Artificial Sequence: Synthetic oligonucleotide
  source 1..19: mol_type = other RNA
tggtgctgaaggctgtgtt

SEQ ID NO: 3234 - RNA, 19 nt, synthetic construct
  misc_feature 1..19: note = Description of Artificial Sequence: Synthetic oligonucleotide
  source 1..19: mol_type = other RNA
ttggtgctgaaggctgtgt

SEQ ID NO: 3235 - RNA, 19 nt, synthetic construct
  misc_feature 1..19: note = Description of Artificial Sequence: Synthetic oligonucleotide
  source 1..19: mol_type = other RNA
cttggtgctgaaggctgtg

SEQ ID NO: 3236 - RNA, 19 nt, synthetic construct
  misc_feature 1..19: note = Description of Artificial Sequence: Synthetic oligonucleotide
  source 1..19: mol_type = other RNA
ccttggtgctgaaggctgt

SEQ ID NO: 3237 - RNA, 19 nt, synthetic construct
  misc_feature 1..19: note = Description of Artificial Sequence: Synthetic oligonucleotide
  source 1..19: mol_type = other RNA
tccttggtgctgaaggctg

SEQ ID NO: 3238 - RNA, 19 nt, synthetic construct
  misc_feature 1..19: note = Description of Artificial Sequence: Synthetic oligonucleotide
  source 1..19: mol_type = other RNA
gtccttggtgctgaaggct

SEQ ID NO: 3239 - RNA, 19 nt, synthetic construct
  misc_feature 1..19: note = Description of Artificial Sequence: Synthetic oligonucleotide
  source 1..19: mol_type = other RNA
tgtccttggtgctgaaggc

SEQ ID NO: 3240 - RNA, 19 nt, synthetic construct
  misc_feature 1..19: note = Description of Artificial Sequence: Synthetic oligonucleotide
  source 1..19: mol_type = other RNA
ttgtccttggtgctgaagg

SEQ ID NO: 3241 - RNA, 19 nt, synthetic construct
  misc_feature 1..19: note = Description of Artificial Sequence: Synthetic oligonucleotide
  source 1..19: mol_type = other RNA
cttgtccttggtgctgaag

SEQ ID NO: 3242 - RNA, 19 nt, synthetic construct
  misc_feature 1..19: note = Description of Artificial Sequence: Synthetic oligonucleotide
  source 1..19: mol_type = other RNA
ccttgtccttggtgctgaa

SEQ ID NO: 3243 - RNA, 19 nt, synthetic construct
  misc_feature 1..19: note = Description of Artificial Sequence: Synthetic oligonucleotide
  source 1..19: mol_type = other RNA
tccttgtccttggtgctga

SEQ ID NO: 3244 - RNA, 19 nt, synthetic construct
  misc_feature 1..19: note = Description of Artificial Sequence: Synthetic oligonucleotide
  source 1..19: mol_type = other RNA
gtccttgtccttggtgctg

SEQ ID NO: 3245 - RNA, 19 nt, synthetic construct
  misc_feature 1..19: note = Description of Artificial Sequence: Synthetic oligonucleotide
  source 1..19: mol_type = other RNA
tgtccttgtccttggtgct

SEQ ID NO: 3246 - RNA, 19 nt, synthetic construct
  misc_feature 1..19: note = Description of Artificial Sequence: Synthetic oligonucleotide
  source 1..19: mol_type = other RNA
ttgtccttgtccttggtgc

SEQ ID NO: 3247 - RNA, 19 nt, synthetic construct
  misc_feature 1..19: note = Description of Artificial Sequence: Synthetic oligonucleotide
  source 1..19: mol_type = other RNA
attgtccttgtccttggtg

SEQ ID NO: 3248 - RNA, 19 nt, synthetic construct
  misc_feature 1..19: note = Description of Artificial Sequence: Synthetic oligonucleotide
  source 1..19: mol_type = other RNA
cattgtccttgtccttggt

SEQ ID NO: 3249 - RNA, 19 nt, synthetic construct
  misc_feature 1..19: note = Description of Artificial Sequence: Synthetic oligonucleotide
  source 1..19: mol_type = other RNA
tcattgtccttgtccttgg

SEQ ID NO: 3250 - RNA, 19 nt, synthetic construct
  misc_feature 1..19: note = Description of Artificial Sequence: Synthetic oligonucleotide
  source 1..19: mol_type = other RNA
gtcattgtccttgtccttg

SEQ ID NO: 3251 - RNA, 19 nt, synthetic construct
  misc_feature 1..19: note = Description of Artificial Sequence: Synthetic oligonucleotide
  source 1..19: mol_type = other RNA
tgtcattgtccttgtcctt

SEQ ID NO: 3252 - RNA, 19 nt, synthetic construct
  misc_feature 1..19: note = Description of Artificial Sequence: Synthetic oligonucleotide
  source 1..19: mol_type = other RNA
ttgtcattgtccttgtcct

SEQ ID NO: 3253 - RNA, 19 nt, synthetic construct
  misc_feature 1..19: note = Description of Artificial Sequence: Synthetic oligonucleotide
  source 1..19: mol_type = other RNA
gttgtcattgtccttgtcc

SEQ ID NO: 3254 - RNA, 19 nt, synthetic construct
  misc_feature 1..19: note = Description of Artificial Sequence: Synthetic oligonucleotide
  source 1..19: mol_type = other RNA
agttgtcattgtccttgtc

SEQ ID NO: 3255 - RNA, 19 nt, synthetic construct
  misc_feature 1..19: note = Description of Artificial Sequence: Synthetic oligonucleotide
  source 1..19: mol_type = other RNA
cagttgtcattgtccttgt

SEQ ID NO: 3256 - RNA, 19 nt, synthetic construct
  misc_feature 1..19: note = Description of Artificial Sequence: Synthetic oligonucleotide
  source 1..19: mol_type = other RNA
gcagttgtcattgtccttg

SEQ ID NO: 3257 - RNA, 19 nt, synthetic construct
  misc_feature 1..19: note = Description of Artificial Sequence: Synthetic oligonucleotide
  source 1..19: mol_type = other RNA
agcagttgtcattgtcctt

SEQ ID NO: 3258 - RNA, 19 nt, synthetic construct
  misc_feature 1..19: note = Description of Artificial Sequence: Synthetic oligonucleotide
  source 1..19: mol_type = other RNA
aagcagttgtcattgtcct

SEQ ID NO: 3259 - RNA, 19 nt, synthetic construct
  misc_feature 1..19: note = Description of Artificial Sequence: Synthetic oligonucleotide
  source 1..19: mol_type = other RNA
caagcagttgtcattgtcc

SEQ ID NO: 3260 - RNA, 19 nt, synthetic construct
  misc_feature 1..19: note = Description of Artificial Sequence: Synthetic oligonucleotide
  source 1..19: mol_type = other RNA
ccaagcagttgtcattgtc

SEQ ID NO: 3261 - RNA, 19 nt, synthetic construct
  misc_feature 1..19: note = Description of Artificial Sequence: Synthetic oligonucleotide
  source 1..19: mol_type = other RNA
tccaagcagttgtcattgt

SEQ ID NO: 3262 - RNA, 19 nt, synthetic construct
  misc_feature 1..19: note = Description of Artificial Sequence: Synthetic oligonucleotide
  source 1..19: mol_type = other RNA
gtccaagcagttgtcattg

SEQ ID NO: 3263 - RNA, 19 nt, synthetic construct
  misc_feature 1..19: note = Description of Artificial Sequence: Synthetic oligonucleotide
  source 1..19: mol_type = other RNA
tgtccaagcagttgtcatt

SEQ ID NO: 3264 - RNA, 19 nt, synthetic construct
  misc_feature 1..19: note = Description of Artificial Sequence: Synthetic oligonucleotide
  source 1..19: mol_type = other RNA
ttgtccaagcagttgtcat

SEQ ID NO: 3265 - RNA, 19 nt, synthetic construct
  misc_feature 1..19: note = Description of Artificial Sequence: Synthetic oligonucleotide
  source 1..19: mol_type = other RNA
cttgtccaagcagttgtca

SEQ ID NO: 3266 - RNA, 19 nt, synthetic construct
  misc_feature 1..19: note = Description of Artificial Sequence: Synthetic oligonucleotide
  source 1..19: mol_type = other RNA
acttgtccaagcagttgtc

SEQ ID NO: 3267 - RNA, 19 nt, synthetic construct
  misc_feature 1..19: note = Description of Artificial Sequence: Synthetic oligonucleotide
  source 1..19: mol_type = other RNA
cacttgtccaagcagttgt

SEQ ID NO: 3268 - RNA, 19 nt, synthetic construct
  misc_feature 1..19: note = Description of Artificial Sequence: Synthetic oligonucleotide
  source 1..19: mol_type = other RNA
acacttgtccaagcagttg

SEQ ID NO: 3269 - RNA, 19 nt, synthetic construct
  misc_feature 1..19: note = Description of Artificial Sequence: Synthetic oligonucleotide
  source 1..19: mol_type = other RNA
cacacttgtccaagcagtt

SEQ ID NO: 3270 - RNA, 19 nt, synthetic construct
  misc_feature 1..19: note = Description of Artificial Sequence: Synthetic oligonucleotide
  source 1..19: mol_type = other RNA
gcacacttgtccaagcagt

SEQ ID NO: 3271 - RNA, 19 nt, synthetic construct
  misc_feature 1..19: note = Description of Artificial Sequence: Synthetic oligonucleotide
  source 1..19: mol_type = other RNA
tgcacacttgtccaagcag

SEQ ID NO: 3272 - RNA, 19 nt, synthetic construct
  misc_feature 1..19: note = Description of Artificial Sequence: Synthetic oligonucleotide
  source 1..19: mol_type = other RNA
gtgcacacttgtccaagca

SEQ ID NO: 3273 - RNA, 19 nt, synthetic construct
  misc_feature 1..19: note = Description of Artificial Sequence: Synthetic oligonucleotide
  source 1..19: mol_type = other RNA
tgtgcacacttgtccaagc

SEQ ID NO: 3274 - RNA, 19 nt, synthetic construct
  misc_feature 1..19: note = Description of Artificial Sequence: Synthetic oligonucleotide
  source 1..19: mol_type = other RNA
ctgtgcacacttgtccaag

SEQ ID NO: 3275 - RNA, 19 nt, synthetic construct
  misc_feature 1..19: note = Description of Artificial Sequence: Synthetic oligonucleotide
  source 1..19: mol_type = other RNA
gctgtgcacacttgtccaa

SEQ ID NO: 3276 - RNA, 19 nt, synthetic construct
  misc_feature 1..19: note = Description of Artificial Sequence: Synthetic oligonucleotide
  source 1..19: mol_type = other RNA
agctgtgcacacttgtcca

SEQ ID NO: 3277 - RNA, 19 nt, synthetic construct
  misc_feature 1..19: note = Description of Artificial Sequence: Synthetic oligonucleotide
  source 1..19: mol_type = other RNA
gagctgtgcacacttgtcc

SEQ ID NO: 3278 - RNA, 19 nt, synthetic construct
  misc_feature 1..19: note = Description of Artificial Sequence: Synthetic oligonucleotide
  source 1..19: mol_type = other RNA
ggagctgtgcacacttgtc

SEQ ID NO: 3279 - RNA, 19 nt, synthetic construct
  misc_feature 1..19: note = Description of Artificial Sequence: Synthetic oligonucleotide
  source 1..19: mol_type = other RNA
cggagctgtgcacacttgt

SEQ ID NO: 3280 - RNA, 19 nt, synthetic construct
  misc_feature 1..19: note = Description of Artificial Sequence: Synthetic oligonucleotide
  source 1..19: mol_type = other RNA
gcggagctgtgcacacttg

SEQ ID NO: 3281 - RNA, 19 nt, synthetic construct
  misc_feature 1..19: note = Description of Artificial Sequence: Synthetic oligonucleotide
  source 1..19: mol_type = other RNA
tgcggagctgtgcacactt

SEQ ID NO: 3282 - RNA, 19 nt, synthetic construct
  misc_feature 1..19: note = Description of Artificial Sequence: Synthetic oligonucleotide
  source 1..19: mol_type = other RNA
ttgcggagctgtgcacact

SEQ ID NO: 3283 - RNA, 19 nt, synthetic construct
  misc_feature 1..19: note = Description of Artificial Sequence: Synthetic oligonucleotide
  source 1..19: mol_type = other RNA
tttgcggagctgtgcacac

SEQ ID NO: 3284 - RNA, 19 nt, synthetic construct
  misc_feature 1..19: note = Description of Artificial Sequence: Synthetic oligonucleotide
  source 1..19: mol_type = other RNA
ctttgcggagctgtgcaca

SEQ ID NO: 3285 - RNA, 19 nt, synthetic construct
  misc_feature 1..19: note = Description of Artificial Sequence: Synthetic oligonucleotide
  source 1..19: mol_type = other RNA
cctttgcggagctgtgcac

SEQ ID NO: 3286 - RNA, 19 nt, synthetic construct
  misc_feature 1..19: note = Description of Artificial Sequence: Synthetic oligonucleotide
  source 1..19: mol_type = other RNA
acctttgcggagctgtgca

SEQ ID NO: 3287 - RNA, 19 nt, synthetic construct
  misc_feature 1..19: note = Description of Artificial Sequence: Synthetic oligonucleotide
  source 1..19: mol_type = other RNA
cacctttgcggagctgtgc

SEQ ID NO: 3288 - RNA, 19 nt, synthetic construct
  misc_feature 1..19: note = Description of Artificial Sequence: Synthetic oligonucleotide
  source 1..19: mol_type = other RNA
ccacctttgcggagctgtg

SEQ ID NO: 3289 - RNA, 19 nt, synthetic construct
  misc_feature 1..19: note = Description of Artificial Sequence: Synthetic oligonucleotide
  source 1..19: mol_type = other RNA
gccacctttgcggagctgt

SEQ ID NO: 3290 - RNA, 19 nt, synthetic construct
  misc_feature 1..19: note = Description of Artificial Sequence: Synthetic oligonucleotide
  source 1..19: mol_type = other RNA
agccacctttgcggagctg

SEQ ID NO: 3291 - RNA, 19 nt, synthetic construct
  misc_feature 1..19: note = Description of Artificial Sequence: Synthetic oligonucleotide
  source 1..19: mol_type = other RNA
tagccacctttgcggagct

SEQ ID NO: 3292 - RNA, 19 nt, synthetic construct
  misc_feature 1..19: note = Description of Artificial Sequence: Synthetic oligonucleotide
  source 1..19: mol_type = other RNA
gtagccacctttgcggagc

SEQ ID NO: 3293 - RNA, 19 nt, synthetic construct
  misc_feature 1..19: note = Description of Artificial Sequence: Synthetic oligonucleotide
  source 1..19: mol_type = other RNA
agtagccacctttgcggag

SEQ ID NO: 3294 - RNA, 19 nt, synthetic construct
  misc_feature 1..19: note = Description of Artificial Sequence: Synthetic oligonucleotide
  source 1..19: mol_type = other RNA
cagtagccacctttgcgga

SEQ ID NO: 3295 - RNA, 19 nt, synthetic construct
  misc_feature 1..19: note = Description of Artificial Sequence: Synthetic oligonucleotide
  source 1..19: mol_type = other RNA
ccagtagccacctttgcgg

SEQ ID NO: 3296 - RNA, 19 nt, synthetic construct
  misc_feature 1..19: note = Description of Artificial Sequence: Synthetic oligonucleotide
  source 1..19: mol_type = other RNA
accagtagccacctttgcg

SEQ ID NO: 3297 - RNA, 19 nt, synthetic construct
  misc_feature 1..19: note = Description of Artificial Sequence: Synthetic oligonucleotide
  source 1..19: mol_type = other RNA
taccagtagccacctttgc

SEQ ID NO: 3298 - RNA, 19 nt, synthetic construct
  misc_feature 1..19: note = Description of Artificial Sequence: Synthetic oligonucleotide
  source 1..19: mol_type = other RNA
gtaccagtagccacctttg

SEQ ID NO: 3299 - RNA, 19 nt, synthetic construct
  misc_feature 1..19: note = Description of Artificial Sequence: Synthetic oligonucleotide
  source 1..19: mol_type = other RNA
tgtaccagtagccaccttt

SEQ ID NO: 3300 - RNA, 19 nt, synthetic construct
  misc_feature 1..19: note = Description of Artificial Sequence: Synthetic oligonucleotide
  source 1..19: mol_type = other RNA
ttgtaccagtagccacctt

SEQ ID NO: 3301 - RNA, 19 nt, synthetic construct
  misc_feature 1..19: note = Description of Artificial Sequence: Synthetic oligonucleotide
  source 1..19: mol_type = other RNA
gttgtaccagtagccacct

SEQ ID NO: 3302 - RNA, 19 nt, synthetic construct
  misc_feature 1..19: note = Description of Artificial Sequence: Synthetic oligonucleotide
  source 1..19: mol_type = other RNA
agttgtaccagtagccacc

SEQ ID NO: 3303 - RNA, 19 nt, synthetic construct
  misc_feature 1..19: note = Description of Artificial Sequence: Synthetic oligonucleotide
  source 1..19: mol_type = other RNA
cagttgtaccagtagccac

SEQ ID NO: 3304 - RNA, 19 nt, synthetic construct
  misc_feature 1..19: note = Description of Artificial Sequence: Synthetic oligonucleotide
  source 1..19: mol_type = other RNA
gcagttgtaccagtagcca

SEQ ID NO: 3305 - RNA, 19 nt, synthetic construct
  misc_feature 1..19: note = Description of Artificial Sequence: Synthetic oligonucleotide
  source 1..19: mol_type = other RNA
agcagttgtaccagtagcc

SEQ ID NO: 3306 - RNA, 19 nt, synthetic construct
  misc_feature 1..19: note = Description of Artificial Sequence: Synthetic oligonucleotide
  source 1..19: mol_type = other RNA
cagcagttgtaccagtagc

SEQ ID NO: 3307 - RNA, 19 nt, synthetic construct
  misc_feature 1..19: note = Description of Artificial Sequence: Synthetic oligonucleotide
  source 1..19: mol_type = other RNA
gcagcagttgtaccagtag

SEQ ID NO: 3308 - RNA, 19 nt, synthetic construct
  misc_feature 1..19: note = Description of Artificial Sequence: Synthetic oligonucleotide
  source 1..19: mol_type = other RNA
tgcagcagttgtaccagta

SEQ ID NO: 3309 - RNA, 19 nt, synthetic construct
  misc_feature 1..19: note = Description of Artificial Sequence: Synthetic oligonucleotide
  source 1..19: mol_type = other RNA
gtgcagcagttgtaccagt

SEQ ID NO: 3310 - RNA, 19 nt, synthetic construct
  misc_feature 1..19: note = Description of Artificial Sequence: Synthetic oligonucleotide
  source 1..19: mol_type = other RNA
tgtgcagcagttgtaccag

SEQ ID NO: 3311 - RNA, 19 nt, synthetic construct
  misc_feature 1..19: note = Description of Artificial Sequence: Synthetic oligonucleotide
  source 1..19: mol_type = other RNA
ctgtgcagcagttgtacca

SEQ ID NO: 3312 - RNA, 19 nt, synthetic construct
  misc_feature 1..19: note = Description of Artificial Sequence: Synthetic oligonucleotide
  source 1..19: mol_type = other RNA
tctgtgcagcagttgtacc

SEQ ID NO: 3313 - RNA, 19 nt, synthetic construct
  misc_feature 1..19: note = Description of Artificial Sequence: Synthetic oligonucleotide
  source 1..19: mol_type = other RNA
gtctgtgcagcagttgtac

SEQ ID NO: 3314 - RNA, 19 nt, synthetic construct
  misc_feature 1..19: note = Description of Artificial Sequence: Synthetic oligonucleotide
  source 1..19: mol_type = other RNA
agtctgtgcagcagttgta

SEQ ID NO: 3315 - RNA, 19 nt, synthetic construct
  misc_feature 1..19: note = Description of Artificial Sequence: Synthetic oligonucleotide
  source 1..19: mol_type = other RNA
gagtctgtgcagcagttgt

SEQ ID NO: 3316 - RNA, 19 nt, synthetic construct
  misc_feature 1..19: note = Description of Artificial Sequence: Synthetic oligonucleotide
  source 1..19: mol_type = other RNA
ggagtctgtgcagcagttg

SEQ ID NO: 3317 - RNA, 19 nt, synthetic construct
  misc_feature 1..19: note = Description of Artificial Sequence: Synthetic oligonucleotide
  source 1..19: mol_type = other RNA
tggagtctgtgcagcagtt

SEQ ID NO: 3318 - RNA, 19 nt, synthetic construct
  misc_feature 1..19: note = Description of Artificial Sequence: Synthetic oligonucleotide
  source 1..19: mol_type = other RNA
ttggagtctgtgcagcagt

SEQ ID NO: 3319 - RNA, 19 nt, synthetic construct
  misc_feature 1..19: note = Description of Artificial Sequence: Synthetic oligonucleotide
  source 1..19: mol_type = other RNA
gttggagtctgtgcagcag

SEQ ID NO: 3320 - RNA, 19 nt, synthetic construct
  misc_feature 1..19: note = Description of Artificial Sequence: Synthetic oligonucleotide
  source 1..19: mol_type = other RNA
ggttggagtctgtgcagca

SEQ ID NO: 3321 - RNA, 19 nt, synthetic construct
  misc_feature 1..19: note = Description of Artificial Sequence: Synthetic oligonucleotide
  source 1..19: mol_type = other RNA
aggttggagtctgtgcagc

SEQ ID NO: 3322 - RNA, 19 nt, synthetic construct
  misc_feature 1..19: note = Description of Artificial Sequence: Synthetic oligonucleotide
  source 1..19: mol_type = other RNA
gaggttggagtctgtgcag

SEQ ID NO: 3323 - RNA, 19 nt, synthetic construct
  misc_feature 1..19: note = Description of Artificial Sequence: Synthetic oligonucleotide
  source 1..19: mol_type = other RNA
tgaggttggagtctgtgca

SEQ ID NO: 3324 - RNA, 19 nt, synthetic construct
  misc_feature 1..19: note = Description of Artificial Sequence: Synthetic oligonucleotide
  source 1..19: mol_type = other RNA
ttgaggttggagtctgtgc

SEQ ID NO: 3325 - RNA, 19 nt, synthetic construct
  misc_feature 1..19: note = Description of Artificial Sequence: Synthetic oligonucleotide
  source 1..19: mol_type = other RNA
attgaggttggagtctgtg

SEQ ID NO: 3326 - RNA, 19 nt, synthetic construct
  misc_feature 1..19: note = Description of Artificial Sequence: Synthetic oligonucleotide
  source 1..19: mol_type = other RNA
cattgaggttggagtctgt

SEQ ID NO: 3327 - RNA, 19 nt, synthetic construct
  misc_feature 1..19: note = Description of Artificial Sequence: Synthetic oligonucleotide
  source 1..19: mol_type = other RNA
ccattgaggttggagtctg

SEQ ID NO: 3328 - RNA, 19 nt, synthetic construct
  misc_feature 1..19: note = Description of Artificial Sequence: Synthetic oligonucleotide
  source 1..19: mol_type = other RNA
tccattgaggttggagtct

SEQ ID NO: 3329 - RNA, 19 nt, synthetic construct
  misc_feature 1..19: note = Description of Artificial Sequence: Synthetic oligonucleotide
  source 1..19: mol_type = other RNA
ctccattgaggttggagtc

SEQ ID NO: 3330 - RNA, 19 nt, synthetic construct
  misc_feature 1..19: note = Description of Artificial Sequence: Synthetic oligonucleotide
  source 1..19: mol_type = other RNA
actccattgaggttggagt

SEQ ID NO: 3331 - RNA, 19 nt, synthetic construct
  misc_feature 1..19: note = Description of Artificial Sequence: Synthetic oligonucleotide
  source 1..19: mol_type = other RNA
cactccattgaggttggag

SEQ ID NO: 3332 - RNA, 19 nt, synthetic construct
  misc_feature 1..19: note = Description of Artificial Sequence: Synthetic oligonucleotide
  source 1..19: mol_type = other RNA
acactccattgaggttgga

SEQ ID NO: 3333 - RNA, 19 nt, synthetic construct
  misc_feature 1..19: note = Description of Artificial Sequence: Synthetic oligonucleotide
  source 1..19: mol_type = other RNA
tacactccattgaggttgg

SEQ ID NO: 3334 - RNA, 19 nt, synthetic construct
  misc_feature 1..19: note = Description of Artificial Sequence: Synthetic oligonucleotide
  source 1..19: mol_type = other RNA
gtacactccattgaggttg

SEQ ID NO: 3335 - RNA, 19 nt, synthetic construct
  misc_feature 1..19: note = Description of Artificial Sequence: Synthetic oligonucleotide
  source 1..19: mol_type = other RNA
agtacactccattgaggtt

SEQ ID NO: 3336 - RNA, 19 nt, synthetic construct
  misc_feature 1..19: note = Description of Artificial Sequence: Synthetic oligonucleotide
  source 1..19: mol_type = other RNA
tagtacactccattgaggt

SEQ ID NO: 3337 - RNA, 19 nt, synthetic construct
  misc_feature 1..19: note = Description of Artificial Sequence: Synthetic oligonucleotide
  source 1..19: mol_type = other RNA
gtagtacactccattgagg

SEQ ID NO: 3338 - RNA, 19 nt, synthetic construct
  misc_feature 1..19: note = Description of Artificial Sequence: Synthetic oligonucleotide
  source 1..19: mol_type = other RNA
ggtagtacactccattgag

SEQ ID NO: 3339 - RNA, 19 nt, synthetic construct
  misc_feature 1..19: note = Description of Artificial Sequence: Synthetic oligonucleotide
  source 1..19: mol_type = other RNA
cggtagtacactccattga

SEQ ID NO: 3340 - RNA, 19 nt, synthetic construct
  misc_feature 1..19: note = Description of Artificial Sequence: Synthetic oligonucleotide
  source 1..19: mol_type = other RNA
gcggtagtacactccattg

SEQ ID NO: 3341 - RNA, 19 nt, synthetic construct
  misc_feature 1..19: note = Description of Artificial Sequence: Synthetic oligonucleotide
  source 1..19: mol_type = other RNA
ggcggtagtacactccatt

SEQ ID NO: 3342 - RNA, 19 nt, synthetic construct
  misc_feature 1..19: note = Description of Artificial Sequence: Synthetic oligonucleotide
  source 1..19: mol_type = other RNA
aggcggtagtacactccat

SEQ ID NO: 3343 - RNA, 19 nt, synthetic construct
  misc_feature 1..19: note = Description of Artificial Sequence: Synthetic oligonucleotide
  source 1..19: mol_type = other RNA
caggcggtagtacactcca

SEQ ID NO: 3344 - RNA, 19 nt, synthetic construct
  misc_feature 1..19: note = Description of Artificial Sequence: Synthetic oligonucleotide
  source 1..19: mol_type = other RNA
ccaggcggtagtacactcc

SEQ ID NO: 3345 - RNA, 19 nt, synthetic construct
  misc_feature 1..19: note = Description of Artificial Sequence: Synthetic oligonucleotide
  source 1..19: mol_type = other RNA
cccaggcggtagtacactc

SEQ ID NO: 3346 - RNA, 19 nt, synthetic construct
  misc_feature 1..19: note = Description of Artificial Sequence: Synthetic oligonucleotide
  source 1..19: mol_type = other RNA
acccaggcggtagtacact

SEQ ID NO: 3347 - RNA, 19 nt, synthetic construct
  misc_feature 1..19: note = Description of Artificial Sequence: Synthetic oligonucleotide
  source 1..19: mol_type = other RNA
cacccaggcggtagtacac

SEQ ID NO: 3348 - RNA, 19 nt, synthetic construct
  misc_feature 1..19: note = Description of Artificial Sequence: Synthetic oligonucleotide
  source 1..19: mol_type = other RNA
tcacccaggcggtagtaca

SEQ ID NO: 3349 - RNA, 19 nt, synthetic construct
  misc_feature 1..19: note = Description of Artificial Sequence: Synthetic oligonucleotide
  source 1..19: mol_type = other RNA
ctcacccaggcggtagtac

SEQ ID NO: 3350 - RNA, 19 nt, synthetic construct
  misc_feature 1..19: note = Description of Artificial Sequence: Synthetic oligonucleotide
  source 1..19: mol_type = other RNA
gctcacccaggcggtagta

SEQ ID NO: 3351 - RNA, 19 nt, synthetic construct
  misc_feature 1..19: note = Description of Artificial Sequence: Synthetic oligonucleotide
  source 1..19: mol_type = other RNA
tgctcacccaggcggtagt

SEQ ID NO: 3352 - RNA, 19 nt, synthetic construct
  misc_feature 1..19: note = Description of Artificial Sequence: Synthetic oligonucleotide
  source 1..19: mol_type = other RNA
gtgctcacccaggcggtag

SEQ ID NO: 3353 - RNA, 19 nt, synthetic construct
  misc_feature 1..19: note = Description of Artificial Sequence: Synthetic oligonucleotide
  source 1..19: mol_type = other RNA
tgtgctcacccaggcggta

SEQ ID NO: 3354 - RNA, 19 nt, synthetic construct
  misc_feature 1..19: note = Description of Artificial Sequence: Synthetic oligonucleotide
  source 1..19: mol_type = other RNA
ttgtgctcacccaggcggt

SEQ ID NO: 3355 - RNA, 19 nt, synthetic construct
  misc_feature 1..19: note = Description of Artificial Sequence: Synthetic oligonucleotide
  source 1..19: mol_type = other RNA
attgtgctcacccaggcgg

SEQ ID NO: 3356 - RNA, 19 nt, synthetic construct
  misc_feature 1..19: note = Description of Artificial Sequence: Synthetic oligonucleotide
  source 1..19: mol_type = other RNA
tattgtgctcacccaggcg

SEQ ID NO: 3357 - RNA, 19 nt, synthetic construct
  misc_feature 1..19: note = Description of Artificial Sequence: Synthetic oligonucleotide
  source 1..19: mol_type = other RNA
ttattgtgctcacccaggc

SEQ ID NO: 3358 - RNA, 19 nt, synthetic construct
  misc_feature 1..19: note = Description of Artificial Sequence: Synthetic oligonucleotide
  source 1..19: mol_type = other RNA
cttattgtgctcacccagg

SEQ ID NO: 3359 - RNA, 19 nt, synthetic construct
  misc_feature 1..19: note = Description of Artificial Sequence: Synthetic oligonucleotide
  source 1..19: mol_type = other RNA
gcttattgtgctcacccag

SEQ ID NO: 3360 - RNA, 19 nt, synthetic construct
  misc_feature 1..19: note = Description of Artificial Sequence: Synthetic oligonucleotide
  source 1..19: mol_type = other RNA
tgcttattgtgctcaccca

SEQ ID NO: 3361 - RNA, 19 nt, synthetic construct
  misc_feature 1..19: note = Description of Artificial Sequence: Synthetic oligonucleotide
  source 1..19: mol_type = other RNA
gtgcttattgtgctcaccc

SEQ ID NO: 3362 - RNA, 19 nt, synthetic construct
  misc_feature 1..19: note = Description of Artificial Sequence: Synthetic oligonucleotide
  source 1..19: mol_type = other RNA
ggtgcttattgtgctcacc

SEQ ID NO: 3363 - RNA, 19 nt, synthetic construct
  misc_feature 1..19: note = Description of Artificial Sequence: Synthetic oligonucleotide
  source 1..19: mol_type = other RNA
aggtgcttattgtgctcac

SEQ ID NO: 3364 - RNA, 19 nt, synthetic construct
  misc_feature 1..19: note = Description of Artificial Sequence: Synthetic oligonucleotide
  source 1..19: mol_type = other RNA
caggtgcttattgtgctca

SEQ ID NO: 3365 - RNA, 19 nt, synthetic construct
  misc_feature 1..19: note = Description of Artificial Sequence: Synthetic oligonucleotide
  source 1..19: mol_type = other RNA
ccaggtgcttattgtgctc

SEQ ID NO: 3366 - RNA, 19 nt, synthetic construct
  misc_feature 1..19: note = Description of Artificial Sequence: Synthetic oligonucleotide
  source 1..19: mol_type = other RNA
tccaggtgcttattgtgct

SEQ ID NO: 3367 - RNA, 19 nt, synthetic construct
  misc_feature 1..19: note = Description of Artificial Sequence: Synthetic oligonucleotide
  source 1..19: mol_type = other RNA
atccaggtgcttattgtgc

SEQ ID NO: 3368 - RNA, 19 nt, synthetic construct
  misc_feature 1..19: note = Description of Artificial Sequence: Synthetic oligonucleotide
  source 1..19: mol_type = other RNA
catccaggtgcttattgtg

SEQ ID NO: 3369 - RNA, 19 nt, synthetic construct
  misc_feature 1..19: note = Description of Artificial Sequence: Synthetic oligonucleotide
  source 1..19: mol_type = other RNA
ccatccaggtgcttattgt

SEQ ID NO: 3370 - RNA, 19 nt, synthetic construct
  misc_feature 1..19: note = Description of Artificial Sequence: Synthetic oligonucleotide
  source 1..19: mol_type = other RNA
gccatccaggtgcttattg

SEQ ID NO: 3371 - RNA, 19 nt, synthetic construct
  misc_feature 1..19: note = Description of Artificial Sequence: Synthetic oligonucleotide
  source 1..19: mol_type = other RNA
tgccatccaggtgcttatt

SEQ ID NO: 3372 - RNA, 19 nt, synthetic construct
  misc_feature 1..19: note = Description of Artificial Sequence: Synthetic oligonucleotide
  source 1..19: mol_type = other RNA
atgccatccaggtgcttat

SEQ ID NO: 3373 - RNA, 19 nt, synthetic construct
  misc_feature 1..19: note = Description of Artificial Sequence: Synthetic oligonucleotide
  source 1..19: mol_type = other RNA
gatgccatccaggtgctta

SEQ ID NO: 3374 - RNA, 19 nt, synthetic construct
  misc_feature 1..19: note = Description of Artificial Sequence: Synthetic oligonucleotide
  source 1..19: mol_type = other RNA
tgatgccatccaggtgctt

SEQ ID NO: 3375 - RNA, 19 nt, synthetic construct
  misc_feature 1..19: note = Description of Artificial Sequence: Synthetic oligonucleotide
  source 1..19: mol_type = other RNA
gtgatgccatccaggtgct

SEQ ID NO: 3376 - RNA, 19 nt, synthetic construct
  misc_feature 1..19: note = Description of Artificial Sequence: Synthetic oligonucleotide
  source 1..19: mol_type = other RNA
ggtgatgccatccaggtgc

SEQ ID NO: 3377 - RNA, 19 nt, synthetic construct
  misc_feature 1..19: note = Description of Artificial Sequence: Synthetic oligonucleotide
  source 1..19: mol_type = other RNA
aggtgatgccatccaggtg

SEQ ID NO: 3378 - RNA, 19 nt, synthetic construct
  misc_feature 1..19: note = Description of Artificial Sequence: Synthetic oligonucleotide
  source 1..19: mol_type = other RNA
caggtgatgccatccaggt

SEQ ID NO: 3379 - RNA, 19 nt, synthetic construct
  misc_feature 1..19: note = Description of Artificial Sequence: Synthetic oligonucleotide
  source 1..19: mol_type = other RNA
ccaggtgatgccatccagg

SEQ ID NO: 3380 - RNA, 19 nt, synthetic construct
  misc_feature 1..19: note = Description of Artificial Sequence: Synthetic oligonucleotide
  source 1..19: mol_type = other RNA
accaggtgatgccatccag

SEQ ID NO: 3381 - RNA, 19 nt, synthetic construct
  misc_feature 1..19: note = Description of Artificial Sequence: Synthetic oligonucleotide
  source 1..19: mol_type = other RNA
taccaggtgatgccatcca

SEQ ID NO: 3382 - RNA, 19 nt, synthetic construct
  misc_feature 1..19: note = Description of Artificial Sequence: Synthetic oligonucleotide
  source 1..19: mol_type = other RNA
ataccaggtgatgccatcc

SEQ ID NO: 3383 - RNA, 19 nt, synthetic construct
  misc_feature 1..19: note = Description of Artificial Sequence: Synthetic oligonucleotide
  source 1..19: mol_type = other RNA
cataccaggtgatgccatc

SEQ ID NO: 3384 - RNA, 19 nt, synthetic construct
  misc_feature 1..19: note = Description of Artificial Sequence: Synthetic oligonucleotide
  source 1..19: mol_type = other RNA
ccataccaggtgatgccat

SEQ ID NO: 3385 - RNA, 19 nt, synthetic construct
  misc_feature 1..19: note = Description of Artificial Sequence: Synthetic oligonucleotide
  source 1..19: mol_type = other RNA
gccataccaggtgatgcca

SEQ ID NO: 3386 - RNA, 19 nt, synthetic construct
  misc_feature 1..19: note = Description of Artificial Sequence: Synthetic oligonucleotide
  source 1..19: mol_type = other RNA
agccataccaggtgatgcc

SEQ ID NO: 3387 - RNA, 19 nt, synthetic construct
  misc_feature 1..19: note = Description of Artificial Sequence: Synthetic oligonucleotide
  source 1..19: mol_type = other RNA
cagccataccaggtgatgc

SEQ ID NO: 3388 - RNA, 19 nt, synthetic construct
  misc_feature 1..19: note = Description of Artificial Sequence: Synthetic oligonucleotide
  source 1..19: mol_type = other RNA
ccagccataccaggtgatg

SEQ ID NO: 3389 - RNA, 19 nt, synthetic construct
  misc_feature 1..19: note = Description of Artificial Sequence: Synthetic oligonucleotide
  source 1..19: mol_type = other RNA
gccagccataccaggtgat

SEQ ID NO: 3390 - RNA, 19 nt, synthetic construct
  misc_feature 1..19: note = Description of Artificial Sequence: Synthetic oligonucleotide
  source 1..19: mol_type = other RNA
tgccagccataccaggtga

SEQ ID NO: 3391 - RNA, 19 nt, synthetic construct
  misc_feature 1..19: note = Description of Artificial Sequence: Synthetic oligonucleotide
  source 1..19: mol_type = other RNA
atgccagccataccaggtg

SEQ ID NO: 3392 - RNA, 19 nt, synthetic construct
  misc_feature 1..19: note = Description of Artificial Sequence: Synthetic oligonucleotide
  source 1..19: mol_type = other RNA
catgccagccataccaggt

SEQ ID NO: 3393 - RNA, 19 nt, synthetic construct
  misc_feature 1..19: note = Description of Artificial Sequence: Synthetic oligonucleotide
  source 1..19: mol_type = other RNA
ccatgccagccataccagg

SEQ ID NO: 3394 - RNA, 19 nt, synthetic construct
  misc_feature 1..19: note = Description of Artificial Sequence: Synthetic oligonucleotide
  source 1..19: mol_type = other RNA
tccatgccagccataccag

SEQ ID NO: 3395 - RNA, 19 nt, synthetic construct
  misc_feature 1..19: note = Description of Artificial Sequence: Synthetic oligonucleotide
  source 1..19: mol_type = other RNA
atccatgccagccatacca

SEQ ID NO: 3396 - RNA, 19 nt, synthetic construct
  misc_feature 1..19: note = Description of Artificial Sequence: Synthetic oligonucleotide
  source 1..19: mol_type = other RNA
gatccatgccagccatacc

SEQ ID NO: 3397 - RNA, 19 nt, synthetic construct
  misc_feature 1..19: note = Description of Artificial Sequence: Synthetic oligonucleotide
  source 1..19: mol_type = other RNA
agatccatgccagccatac

SEQ ID NO: 3398 - RNA, 19 nt, synthetic construct
  misc_feature 1..19: note = Description of Artificial Sequence: Synthetic oligonucleotide
  source 1..19: mol_type = other RNA
tagatccatgccagccata

SEQ ID NO: 3399 - RNA, 19 nt, synthetic construct
  misc_feature 1..19: note = Description of Artificial Sequence: Synthetic oligonucleotide
  source 1..19: mol_type = other RNA
gtagatccatgccagccat

SEQ ID NO: 3400 - RNA, 19 nt, synthetic construct
  misc_feature 1..19: note = Description of Artificial Sequence: Synthetic oligonucleotide
  source 1..19: mol_type = other RNA
ggtagatccatgccagcca

SEQ ID NO: 3401 - RNA, 19 nt, synthetic construct
  misc_feature 1..19: note = Description of Artificial Sequence: Synthetic oligonucleotide
  source 1..19: mol_type = other RNA
aggtagatccatgccagcc

SEQ ID NO: 3402 - RNA, 19 nt, synthetic construct
  misc_feature 1..19: note = Description of Artificial Sequence: Synthetic oligonucleotide
  source 1..19: mol_type = other RNA
taggtagatccatgccagc

SEQ ID NO: 3403 - RNA, 19 nt, synthetic construct
  misc_feature 1..19: note = Description of Artificial Sequence: Synthetic oligonucleotide
  source 1..19: mol_type = other RNA
gtaggtagatccatgccag

SEQ ID NO: 3404 - RNA, 19 nt, synthetic construct
  misc_feature 1..19: note = Description of Artificial Sequence: Synthetic oligonucleotide
  source 1..19: mol_type = other RNA
agtaggtagatccatgcca

SEQ ID NO: 3405 - RNA, 19 nt, synthetic construct
  misc_feature 1..19: note = Description of Artificial Sequence: Synthetic oligonucleotide
  source 1..19: mol_type = other RNA
gagtaggtagatccatgcc

SEQ ID NO: 3406 - RNA, 19 nt, synthetic construct
  misc_feature 1..19: note = Description of Artificial Sequence: Synthetic oligonucleotide
  source 1..19: mol_type = other RNA
ggagtaggtagatccatgc

SEQ ID NO: 3407 - RNA, 19 nt, synthetic construct
  misc_feature 1..19: note = Description of Artificial Sequence: Synthetic oligonucleotide
  source 1..19: mol_type = other RNA
gggagtaggtagatccatg

SEQ ID NO: 3408 - RNA, 19 nt, synthetic construct
  misc_feature 1..19: note = Description of Artificial Sequence: Synthetic oligonucleotide
  source 1..19: mol_type = other RNA
agggagtaggtagatccat

SEQ ID NO: 3409 - RNA, 19 nt, synthetic construct
  misc_feature 1..19: note = Description of Artificial Sequence: Synthetic oligonucleotide
  source 1..19: mol_type = other RNA
gagggagtaggtagatcca

SEQ ID NO: 3410 - RNA, 19 nt, synthetic construct
  misc_feature 1..19: note = Description of Artificial Sequence: Synthetic oligonucleotide
  source 1..19: mol_type = other RNA
tgagggagtaggtagatcc

SEQ ID NO: 3411 - RNA, 19 nt, synthetic construct
  misc_feature 1..19: note = Description of Artificial Sequence: Synthetic oligonucleotide
  source 1..19: mol_type = other RNA
ttgagggagtaggtagatc

SEQ ID NO: 3412 - RNA, 19 nt, synthetic construct
  misc_feature 1..19: note = Description of Artificial Sequence: Synthetic oligonucleotide
  source 1..19: mol_type = other RNA
tttgagggagtaggtagat

SEQ ID NO: 3413 - RNA, 19 nt, synthetic construct
  misc_feature 1..19: note = Description of Artificial Sequence: Synthetic oligonucleotide
  source 1..19: mol_type = other RNA
gtttgagggagtaggtaga

SEQ ID NO: 3414 - RNA, 19 nt, synthetic construct
  misc_feature 1..19: note = Description of Artificial Sequence: Synthetic oligonucleotide
  source 1..19: mol_type = other RNA
cgtttgagggagtaggtag

SEQ ID NO: 3415 - RNA, 19 nt, synthetic construct
  misc_feature 1..19: note = Description of Artificial Sequence: Synthetic oligonucleotide
  source 1..19: mol_type = other RNA
ccgtttgagggagtaggta

SEQ ID NO: 3416 - RNA, 19 nt, synthetic construct
  misc_feature 1..19: note = Description of Artificial Sequence: Synthetic oligonucleotide
  source 1..19: mol_type = other RNA
cccgtttgagggagtaggt

SEQ ID NO: 3417 - RNA, 19 nt, synthetic construct
  misc_feature 1..19: note = Description of Artificial Sequence: Synthetic oligonucleotide
  source 1..19: mol_type = other RNA
acccgtttgagggagtagg

SEQ ID NO: 3418 - RNA, 19 nt, synthetic construct
  misc_feature 1..19: note = Description of Artificial Sequence: Synthetic oligonucleotide
  source 1..19: mol_type = other RNA
cacccgtttgagggagtag

SEQ ID NO: 3419 - RNA, 19 nt, synthetic construct
  misc_feature 1..19: note = Description of Artificial Sequence: Synthetic oligonucleotide
  source 1..19: mol_type = other RNA
ccacccgtttgagggagta

SEQ ID NO: 3420 - RNA, 19 nt, synthetic construct
  misc_feature 1..19: note = Description of Artificial Sequence: Synthetic oligonucleotide
  source 1..19: mol_type = other RNA
tccacccgtttgagggagt

SEQ ID NO: 3421 - RNA, 19 nt, synthetic construct
  misc_feature 1..19: note = Description of Artificial Sequence: Synthetic oligonucleotide
  source 1..19: mol_type = other RNA
ctccacccgtttgagggag

SEQ ID NO: 3422 - RNA, 19 nt, synthetic construct
  misc_feature 1..19: note = Description of Artificial Sequence: Synthetic oligonucleotide
  source 1..19: mol_type = other RNA
tctccacccgtttgaggga

SEQ ID NO: 3423 - RNA, 19 nt, synthetic construct
  misc_feature 1..19: note = Description of Artificial Sequence: Synthetic oligonucleotide
  source 1..19: mol_type = other RNA
atctccacccgtttgaggg

SEQ ID NO: 3424 - RNA, 19 nt, synthetic construct
  misc_feature 1..19: note = Description of Artificial Sequence: Synthetic oligonucleotide
  source 1..19: mol_type = other RNA
catctccacccgtttgagg

SEQ ID NO: 3425 - RNA, 19 nt, synthetic construct
  misc_feature 1..19: note = Description of Artificial Sequence: Synthetic oligonucleotide
  source 1..19: mol_type = other RNA
tcatctccacccgtttgag

SEQ ID NO: 3426 - RNA, 19 nt, synthetic construct
  misc_feature 1..19: note = Description of Artificial Sequence: Synthetic oligonucleotide
  source 1..19: mol_type = other RNA
ttcatctccacccgtttga

SEQ ID NO: 3427 - RNA, 19 nt, synthetic construct
  misc_feature 1..19: note = Description of Artificial Sequence: Synthetic oligonucleotide
  source 1..19: mol_type = other RNA
tttcatctccacccgtttg

SEQ ID NO: 3428 - RNA, 19 nt, synthetic construct
  misc_feature 1..19: note = Description of Artificial Sequence: Synthetic oligonucleotide
  source 1..19: mol_type = other RNA
ttttcatctccacccgttt

SEQ ID NO: 3429 - RNA, 19 nt, synthetic construct
  misc_feature 1..19: note = Description of Artificial Sequence: Synthetic oligonucleotide
  source 1..19: mol_type = other RNA
attttcatctccacccgtt

SEQ ID NO: 3430 - RNA, 19 nt, synthetic construct
  misc_feature 1..19: note = Description of Artificial Sequence: Synthetic oligonucleotide
  source 1..19: mol_type = other RNA
gattttcatctccacccgt

SEQ ID NO: 3431 - RNA, 19 nt, synthetic construct
  misc_feature 1..19: note = Description of Artificial Sequence: Synthetic oligonucleotide
  source 1..19: mol_type = other RNA
ggattttcatctccacccg

SEQ ID NO: 3432 - RNA, 19 nt, synthetic construct
  misc_feature 1..19: note = Description of Artificial Sequence: Synthetic oligonucleotide
  source 1..19: mol_type = other RNA
cggattttcatctccaccc

SEQ ID NO: 3433 - RNA, 19 nt, synthetic construct
  misc_feature 1..19: note = Description of Artificial Sequence: Synthetic oligonucleotide
  source 1..19: mol_type = other RNA
gcggattttcatctccacc

SEQ ID NO: 3434 - RNA, 19 nt, synthetic construct
  misc_feature 1..19: note = Description of Artificial Sequence: Synthetic oligonucleotide
  source 1..19: mol_type = other RNA
ggcggattttcatctccac

SEQ ID NO: 3435 - RNA, 19 nt, synthetic construct
  misc_feature 1..19: note = Description of Artificial Sequence: Synthetic oligonucleotide
  source 1..19: mol_type = other RNA
gggcggattttcatctcca

SEQ ID NO: 3436 - RNA, 19 nt, synthetic construct
  misc_feature 1..19: note = Description of Artificial Sequence: Synthetic oligonucleotide
  source 1..19: mol_type = other RNA
tgggcggattttcatctcc

SEQ ID NO: 3437 - RNA, 19 nt, synthetic construct
  misc_feature 1..19: note = Description of Artificial Sequence: Synthetic oligonucleotide
  source 1..19: mol_type = other RNA
ctgggcggattttcatctc

SEQ ID NO: 3438 - RNA, 19 nt, synthetic construct
  misc_feature 1..19: note = Description of Artificial Sequence: Synthetic oligonucleotide
  source 1..19: mol_type = other RNA
tctgggcggattttcatct

SEQ ID NO: 3439 - RNA, 19 nt, synthetic construct
  misc_feature 1..19: note = Description of Artificial Sequence: Synthetic oligonucleotide
  source 1..19: mol_type = other RNA
ttctgggcggattttcatc

SEQ ID NO: 3440 - RNA, 19 nt, synthetic construct
  misc_feature 1..19: note = Description of Artificial Sequence: Synthetic oligonucleotide
  source 1..19: mol_type = other RNA
cttctgggcggattttcat

SEQ ID NO: 3441 - RNA, 19 nt, synthetic construct
  misc_feature 1..19: note = Description of Artificial Sequence: Synthetic oligonucleotide
  source 1..19: mol_type = other RNA
tcttctgggcggattttca

SEQ ID NO: 3442 - RNA, 19 nt, synthetic construct
  misc_feature 1..19: note = Description of Artificial Sequence: Synthetic oligonucleotide
  source 1..19: mol_type = other RNA
gtcttctgggcggattttc

SEQ ID NO: 3443 - RNA, 19 nt, synthetic construct
  misc_feature 1..19: note = Description of Artificial Sequence: Synthetic oligonucleotide
  source 1..19: mol_type = other RNA
agtcttctgggcggatttt

SEQ ID NO: 3444 - RNA, 19 nt, synthetic construct
  misc_feature 1..19: note = Description of Artificial Sequence: Synthetic oligonucleotide
  source 1..19: mol_type = other RNA
aagtcttctgggcggattt

SEQ ID NO: 3445 - RNA, 19 nt, synthetic construct
  misc_feature 1..19: note = Description of Artificial Sequence: Synthetic oligonucleotide
  source 1..19: mol_type = other RNA
gaagtcttctgggcggatt

SEQ ID NO: 3446 - RNA, 19 nt, synthetic construct
  misc_feature 1..19: note = Description of Artificial Sequence: Synthetic oligonucleotide
  source 1..19: mol_type = other RNA
tgaagtcttctgggcggat

SEQ ID NO: 3447 - RNA, 19 nt, synthetic construct
  misc_feature 1..19: note = Description of Artificial Sequence: Synthetic oligonucleotide
  source 1..19: mol_type = other RNA
ttgaagtcttctgggcgga

SEQ ID NO: 3448 - RNA, 19 nt, synthetic construct
  misc_feature 1..19: note = Description of Artificial Sequence: Synthetic oligonucleotide
  source 1..19: mol_type = other RNA
cttgaagtcttctgggcgg

SEQ ID NO: 3449 - RNA, 19 nt, synthetic construct
  misc_feature 1..19: note = Description of Artificial Sequence: Synthetic oligonucleotide
  source 1..19: mol_type = other RNA
gcttgaagtcttctgggcg

SEQ ID NO: 3450 - RNA, 19 nt, synthetic construct
  misc_feature 1..19: note = Description of Artificial Sequence: Synthetic oligonucleotide
  source 1..19: mol_type = other RNA
ggcttgaagtcttctgggc

SEQ ID NO: 3451 - RNA, 19 nt, synthetic construct
  misc_feature 1..19: note = Description of Artificial Sequence: Synthetic oligonucleotide
  source 1..19: mol_type = other RNA
aggcttgaagtcttctggg

SEQ ID NO: 3452 - RNA, 19 nt, synthetic construct
  misc_feature 1..19: note = Description of Artificial Sequence: Synthetic oligonucleotide
  source 1..19: mol_type = other RNA
aaggcttgaagtcttctgg

SEQ ID NO: 3453 - RNA, 19 nt, synthetic construct
  misc_feature 1..19: note = Description of Artificial Sequence: Synthetic oligonucleotide
  source 1..19: mol_type = other RNA
taaggcttgaagtcttctg

SEQ ID NO: 3454 - RNA, 19 nt, synthetic construct
  misc_feature 1..19: note = Description of Artificial Sequence: Synthetic oligonucleotide
  source 1..19: mol_type = other RNA
ttaaggcttgaagtcttct

SEQ ID NO: 3455 - RNA, 19 nt, synthetic construct
  misc_feature 1..19: note = Description of Artificial Sequence: Synthetic oligonucleotide
  source 1..19: mol_type = other RNA
tttaaggcttgaagtcttc

SEQ ID NO: 3456 - RNA, 19 nt, synthetic construct
  misc_feature 1..19: note = Description of Artificial Sequence: Synthetic oligonucleotide
  source 1..19: mol_type = other RNA
ttttaaggcttgaagtctt

SEQ ID NO: 3457 - RNA, 19 nt, synthetic construct
  misc_feature 1..19: note = Description of Artificial Sequence: Synthetic oligonucleotide
  source 1..19: mol_type = other RNA
cttttaaggcttgaagtct

SEQ ID NO: 3458 - RNA, 19 nt, synthetic construct
  misc_feature 1..19: note = Description of Artificial Sequence: Synthetic oligonucleotide
  source 1..19: mol_type = other RNA
ccttttaaggcttgaagtc

SEQ ID NO: 3459 - RNA, 19 nt, synthetic construct
  misc_feature 1..19: note = Description of Artificial Sequence: Synthetic oligonucleotide
  source 1..19: mol_type = other RNA
tccttttaaggcttgaagt

SEQ ID NO: 3460 - RNA, 19 nt, synthetic construct
  misc_feature 1..19: note = Description of Artificial Sequence: Synthetic oligonucleotide
  source 1..19: mol_type = other RNA
ctccttttaaggcttgaag

SEQ ID NO: 3461 - RNA, 19 nt, synthetic construct
  misc_feature 1..19: note = Description of Artificial Sequence: Synthetic oligonucleotide
  source 1..19: mol_type = other RNA
cctccttttaaggcttgaa

SEQ ID NO: 3462 - RNA, 19 nt, synthetic construct
  misc_feature 1..19: note = Description of Artificial Sequence: Synthetic oligonucleotide
  source 1..19: mol_type = other RNA
gcctccttttaaggcttga

SEQ ID NO: 3463 - RNA, 19 nt, synthetic construct
  misc_feature 1..19: note = Description of Artificial Sequence: Synthetic oligonucleotide
  source 1..19: mol_type = other RNA
agcctccttttaaggcttg

SEQ ID NO: 3464 - RNA, 19 nt, synthetic construct
  misc_feature 1..19: note = Description of Artificial Sequence: Synthetic oligonucleotide
  source 1..19: mol_type = other RNA
cagcctccttttaaggctt

SEQ ID NO: 3465 - RNA, 19 nt, synthetic construct
  misc_feature 1..19: note = Description of Artificial Sequence: Synthetic oligonucleotide
  source 1..19: mol_type = other RNA
gcagcctccttttaaggct

SEQ ID NO: 3466 - RNA, 19 nt, synthetic construct
  misc_feature 1..19: note = Description of Artificial Sequence: Synthetic oligonucleotide
  source 1..19: mol_type = other RNA
ggcagcctccttttaaggc

SEQ ID NO: 3467 - RNA, 19 nt, synthetic construct
  misc_feature 1..19: note = Description of Artificial Sequence: Synthetic oligonucleotide
  source 1..19: mol_type = other RNA
cggcagcctccttttaagg

SEQ ID NO: 3468 - RNA, 19 nt, synthetic construct
  misc_feature 1..19: note = Description of Artificial Sequence: Synthetic oligonucleotide
  source 1..19: mol_type = other RNA
acggcagcctccttttaag

SEQ ID NO: 3469 - RNA, 19 nt, synthetic construct
  misc_feature 1..19: note = Description of Artificial Sequence: Synthetic oligonucleotide
  source 1..19: mol_type = other RNA
cacggcagcctccttttaa

SEQ ID NO: 3470 - RNA, 19 nt, synthetic construct
  misc_feature 1..19: note = Description of Artificial Sequence: Synthetic oligonucleotide
  source 1..19: mol_type = other RNA
ccacggcagcctcctttta

SEQ ID NO: 3471 - RNA, 19 nt, synthetic construct
  misc_feature 1..19: note = Description of Artificial Sequence: Synthetic oligonucleotide
  source 1..19: mol_type = other RNA
tccacggcagcctcctttt

SEQ ID NO: 3472 - RNA, 19 nt, synthetic construct
  misc_feature 1..19: note = Description of Artificial Sequence: Synthetic oligonucleotide
  source 1..19: mol_type = other RNA
ctccacggcagcctccttt

SEQ ID NO: 3473 - RNA, 19 nt, synthetic construct
  misc_feature 1..19: note = Description of Artificial Sequence: Synthetic oligonucleotide
  source 1..19: mol_type = other RNA
gctccacggcagcctcctt

SEQ ID NO: 3474 - RNA, 19 nt, synthetic construct
  misc_feature 1..19: note = Description of Artificial Sequence: Synthetic oligonucleotide
  source 1..19: mol_type = other RNA
tgctccacggcagcctcct

SEQ ID NO: 3475 - RNA, 19 nt, synthetic construct
  misc_feature 1..19: note = Description of Artificial Sequence: Synthetic oligonucleotide
  source 1..19: mol_type = other RNA
gtgctccacggcagcctcc

SEQ ID NO: 3476 - RNA, 19 nt, synthetic construct
  misc_feature 1..19: note = Description of Artificial Sequence: Synthetic oligonucleotide
  source 1..19: mol_type = other RNA
cgtgctccacggcagcctc

SEQ ID NO: 3477 - RNA, 19 nt, synthetic construct
  misc_feature 1..19: note = Description of Artificial Sequence: Synthetic oligonucleotide
  source 1..19: mol_type = other RNA
ccgtgctccacggcagcct

SEQ ID NO: 3478 - RNA, 19 nt, synthetic construct
  misc_feature 1..19: note = Description of Artificial Sequence: Synthetic oligonucleotide
  source 1..19: mol_type = other RNA
tccgtgctccacggcagcc

SEQ ID NO: 3479 - RNA, 19 nt, synthetic construct
  misc_feature 1..19: note = Description of Artificial Sequence: Synthetic oligonucleotide
  source 1..19: mol_type = other RNA
atccgtgctccacggcagc

SEQ ID NO: 3480 - RNA, 19 nt, synthetic construct
  misc_feature 1..19: note = Description of Artificial Sequence: Synthetic oligonucleotide
  source 1..19: mol_type = other RNA
tatccgtgctccacggcag

SEQ ID NO: 3481 - RNA, 19 nt, synthetic construct
  misc_feature 1..19: note = Description of Artificial Sequence: Synthetic oligonucleotide
  source 1..19: mol_type = other RNA
gtatccgtgctccacggca

SEQ ID NO: 3482 - RNA, 19 nt, synthetic construct
  misc_feature 1..19: note = Description of Artificial Sequence: Synthetic oligonucleotide
  source 1..19: mol_type = other RNA
tgtatccgtgctccacggc

SEQ ID NO: 3483 - RNA, 19 nt, synthetic construct
  misc_feature 1..19: note = Description of Artificial Sequence: Synthetic oligonucleotide
  source 1..19: mol_type = other RNA
ctgtatccgtgctccacgg

SEQ ID NO: 3484 - RNA, 19 nt, synthetic construct
  misc_feature 1..19: note = Description of Artificial Sequence: Synthetic oligonucleotide
  source 1..19: mol_type = other RNA
tctgtatccgtgctccacg

SEQ ID NO: 3485 - RNA, 19 nt, synthetic construct
  misc_feature 1..19: note = Description of Artificial Sequence: Synthetic oligonucleotide
  source 1..19: mol_type = other RNA
ttctgtatccgtgctccac

SEQ ID NO: 3486 - RNA, 19 nt, synthetic construct
  misc_feature 1..19: note = Description of Artificial Sequence: Synthetic oligonucleotide
  source 1..19: mol_type = other RNA
tttctgtatccgtgctcca

SEQ ID NO: 3487 - RNA, 19 nt, synthetic construct
  misc_feature 1..19: note = Description of Artificial Sequence: Synthetic oligonucleotide
  source 1..19: mol_type = other RNA
gtttctgtatccgtgctcc

SEQ ID NO: 3488 - RNA, 19 nt, synthetic construct
  misc_feature 1..19: note = Description of Artificial Sequence: Synthetic oligonucleotide
  source 1..19: mol_type = other RNA
agtttctgtatccgtgctc

SEQ ID NO: 3489 - RNA, 19 nt, synthetic construct
  misc_feature 1..19: note = Description of Artificial Sequence: Synthetic oligonucleotide
  source 1..19: mol_type = other RNA
cagtttctgtatccgtgct

SEQ ID NO: 3490 - RNA, 19 nt, synthetic construct
  misc_feature 1..19: note = Description of Artificial Sequence: Synthetic oligonucleotide
  source 1..19: mol_type = other RNA
tcagtttctgtatccgtgc

SEQ ID NO: 3491 - RNA, 19 nt, synthetic construct
  misc_feature 1..19: note = Description of Artificial Sequence: Synthetic oligonucleotide
  source 1..19: mol_type = other RNA
ctcagtttctgtatccgtg

SEQ ID NO: 3492 - RNA, 19 nt, synthetic construct
  misc_feature 1..19: note = Description of Artificial Sequence: Synthetic oligonucleotide
  source 1..19: mol_type = other RNA
tctcagtttctgtatccgt

SEQ ID NO: 3493 - RNA, 19 nt, synthetic construct
  misc_feature 1..19: note = Description of Artificial Sequence: Synthetic oligonucleotide
  source 1..19: mol_type = other RNA
gtctcagtttctgtatccg

SEQ ID NO: 3494 - RNA, 19 nt, synthetic construct
  misc_feature 1..19: note = Description of Artificial Sequence: Synthetic oligonucleotide
  source 1..19: mol_type = other RNA
tgtctcagtttctgtatcc

SEQ ID NO: 3495 - RNA, 19 nt, synthetic construct
  misc_feature 1..19: note = Description of Artificial Sequence: Synthetic oligonucleotide
  source 1..19: mol_type = other RNA
gtgtctcagtttctgtatc

SEQ ID NO: 3496 - RNA, 19 nt, synthetic construct
  misc_feature 1..19: note = Description of Artificial Sequence: Synthetic oligonucleotide
  source 1..19: mol_type = other RNA
cgtgtctcagtttctgtat

SEQ ID NO: 3497 - RNA, 19 nt, synthetic construct
  misc_feature 1..19: note = Description of Artificial Sequence: Synthetic oligonucleotide
  source 1..19: mol_type = other RNA
acgtgtctcagtttctgta

SEQ ID NO: 3498 - RNA, 19 nt, synthetic construct
  misc_feature 1..19: note = Description of Artificial Sequence: Synthetic oligonucleotide
  source 1..19: mol_type = other RNA
cacgtgtctcagtttctgt

SEQ ID NO: 3499 - RNA, 19 nt, synthetic construct
  misc_feature 1..19: note = Description of Artificial Sequence: Synthetic oligonucleotide
  source 1..19: mol_type = other RNA
ccacgtgtctcagtttctg

SEQ ID NO: 3500 - RNA, 19 nt, synthetic construct
  misc_feature 1..19: note = Description of Artificial Sequence: Synthetic oligonucleotide
  source 1..19: mol_type = other RNA
tccacgtgtctcagtttct

SEQ ID NO: 3501 - RNA, 19 nt, synthetic construct
  misc_feature 1..19: note = Description of Artificial Sequence: Synthetic oligonucleotide
  source 1..19: mol_type = other RNA
ctccacgtgtctcagtttc

SEQ ID NO: 3502 - RNA, 19 nt, synthetic construct
  misc_feature 1..19: note = Description of Artificial Sequence: Synthetic oligonucleotide
  source 1..19: mol_type = other RNA
tctccacgtgtctcagttt

SEQ ID NO: 3503 - RNA, 19 nt, synthetic construct
  misc_feature 1..19: note = Description of Artificial Sequence: Synthetic oligonucleotide
  source 1..19: mol_type = other RNA
gtctccacgtgtctcagtt

SEQ ID NO: 3504 - RNA, 19 nt, synthetic construct
  misc_feature 1..19: note = Description of Artificial Sequence: Synthetic oligonucleotide
  source 1..19: mol_type = other RNA
agtctccacgtgtctcagt

SEQ ID NO: 3505 - RNA, 19 nt, synthetic construct
  misc_feature 1..19: note = Description of Artificial Sequence: Synthetic oligonucleotide
  source 1..19: mol_type = other RNA
cagtctccacgtgtctcag

SEQ ID NO: 3506 - RNA, 19 nt, synthetic construct
  misc_feature 1..19: note = Description of Artificial Sequence: Synthetic oligonucleotide
  source 1..19: mol_type = other RNA
ccagtctccacgtgtctca

SEQ ID NO: 3507 - RNA, 19 nt, synthetic construct
  misc_feature 1..19: note = Description of Artificial Sequence: Synthetic oligonucleotide
  source 1..19: mol_type = other RNA
tccagtctccacgtgtctc

SEQ ID NO: 3508 - RNA, 19 nt, synthetic construct
  misc_feature 1..19: note = Description of Artificial Sequence: Synthetic oligonucleotide
  source 1..19: mol_type = other RNA
atccagtctccacgtgtct

SEQ ID NO: 3509 - RNA, 19 nt, synthetic construct
  misc_feature 1..19: note = Description of Artificial Sequence: Synthetic oligonucleotide
  source 1..19: mol_type = other RNA
catccagtctccacgtgtc

SEQ ID NO: 3510 - RNA, 19 nt, synthetic construct
  misc_feature 1..19: note = Description of Artificial Sequence: Synthetic oligonucleotide
  source 1..19: mol_type = other RNA
tcatccagtctccacgtgt

SEQ ID NO: 3511 - RNA, 19 nt, synthetic construct
  misc_feature 1..19: note = Description of Artificial Sequence: Synthetic oligonucleotide
  source 1..19: mol_type = other RNA
ctcatccagtctccacgtg

SEQ ID NO: 3512 - RNA, 19 nt, synthetic construct
  misc_feature 1..19: note = Description of Artificial Sequence: Synthetic oligonucleotide
  source 1..19: mol_type = other RNA
cctcatccagtctccacgt

SEQ ID NO: 3513 - RNA, 19 nt, synthetic construct
  misc_feature 1..19: note = Description of Artificial Sequence: Synthetic oligonucleotide
  source 1..19: mol_type = other RNA
ccctcatccagtctccacg

SEQ ID NO: 3514 - RNA, 19 nt, synthetic construct
  misc_feature 1..19: note = Description of Artificial Sequence: Synthetic oligonucleotide
  source 1..19: mol_type = other RNA
gccctcatccagtctccac

SEQ ID NO: 3515 - RNA, 19 nt, synthetic construct
  misc_feature 1..19: note = Description of Artificial Sequence: Synthetic oligonucleotide
  source 1..19: mol_type = other RNA
tgccctcatccagtctcca

SEQ ID NO: 3516 - RNA, 19 nt, synthetic construct
  misc_feature 1..19: note = Description of Artificial Sequence: Synthetic oligonucleotide
  source 1..19: mol_type = other RNA
ctgccctcatccagtctcc

SEQ ID NO: 3517 - RNA, 19 nt, synthetic construct
  misc_feature 1..19: note = Description of Artificial Sequence: Synthetic oligonucleotide
  source 1..19: mol_type = other RNA
tctgccctcatccagtctc

SEQ ID NO: 3518 - RNA, 19 nt, synthetic construct
  misc_feature 1..19: note = Description of Artificial Sequence: Synthetic oligonucleotide
  source 1..19: mol_type = other RNA
atctgccctcatccagtct

SEQ ID NO: 3519 - RNA, 19 nt, synthetic construct
  misc_feature 1..19: note = Description of Artificial Sequence: Synthetic oligonucleotide
  source 1..19: mol_type = other RNA
catctgccctcatccagtc

SEQ ID NO: 3520 - RNA, 19 nt, synthetic construct
  misc_feature 1..19: note = Description of Artificial Sequence: Synthetic oligonucleotide
  source 1..19: mol_type = other RNA
tcatctgccctcatccagt

SEQ ID NO: 3521 - RNA, 19 nt, synthetic construct
  misc_feature 1..19: note = Description of Artificial Sequence: Synthetic oligonucleotide
  source 1..19: mol_type = other RNA
ctcatctgccctcatccag

SEQ ID NO: 3522 - RNA, 19 nt, synthetic construct
  misc_feature 1..19: note = Description of Artificial Sequence: Synthetic oligonucleotide
  source 1..19: mol_type = other RNA
cctcatctgccctcatcca

SEQ ID NO: 3523 - RNA, 19 nt, synthetic construct
  misc_feature 1..19: note = Description of Artificial Sequence: Synthetic oligonucleotide
  source 1..19: mol_type = other RNA
tcctcatctgccctcatcc

SEQ ID NO: 3524 - RNA, 19 nt, synthetic construct
  misc_feature 1..19: note = Description of Artificial Sequence: Synthetic oligonucleotide
  source 1..19: mol_type = other RNA
gtcctcatctgccctcatc

SEQ ID NO: 3525 - RNA, 19 nt, synthetic construct
  misc_feature 1..19: note = Description of Artificial Sequence: Synthetic oligonucleotide
  source 1..19: mol_type = other RNA
tgtcctcatctgccctcat

SEQ ID NO: 3526 - RNA, 19 nt, synthetic construct
  misc_feature 1..19: note = Description of Artificial Sequence: Synthetic oligonucleotide
  source 1..19: mol_type = other RNA
ctgtcctcatctgccctca

SEQ ID NO: 3527 - RNA, 19 nt, synthetic construct
  misc_feature 1..19: note = Description of Artificial Sequence: Synthetic oligonucleotide
  source 1..19: mol_type = other RNA
cctgtcctcatctgccctc

SEQ ID NO: 3528 - RNA, 19 nt, synthetic construct
  misc_feature 1..19: note = Description of Artificial Sequence: Synthetic oligonucleotide
  source 1..19: mol_type = other RNA
tcctgtcctcatctgccct

SEQ ID NO: 3529 - RNA, 19 nt, synthetic construct
  misc_feature 1..19: note = Description of Artificial Sequence: Synthetic oligonucleotide
  source 1..19: mol_type = other RNA
ttcctgtcctcatctgccc

SEQ ID NO: 3530 - RNA, 19 nt, synthetic construct
  misc_feature 1..19: note = Description of Artificial Sequence: Synthetic oligonucleotide
  source 1..19: mol_type = other RNA
cttcctgtcctcatctgcc

SEQ ID NO: 3531 - RNA, 19 nt, synthetic construct
  misc_feature 1..19: note = Description of Artificial Sequence: Synthetic oligonucleotide
  source 1..19: mol_type = other RNA
tcttcctgtcctcatctgc

SEQ ID NO: 3532 - RNA, 19 nt, synthetic construct
  misc_feature 1..19: note = Description of Artificial Sequence: Synthetic oligonucleotide
  source 1..19: mol_type = other RNA
ctcttcctgtcctcatctg

SEQ ID NO: 3533 - RNA, 19 nt, synthetic construct
  misc_feature 1..19: note = Description of Artificial Sequence: Synthetic oligonucleotide
  source 1..19: mol_type = other RNA
tctcttcctgtcctcatct

SEQ ID NO: 3534 - RNA, 19 nt, synthetic construct
  misc_feature 1..19: note = Description of Artificial Sequence: Synthetic oligonucleotide
  source 1..19: mol_type = other RNA
ctctcttcctgtcctcatc

SEQ ID NO: 3535 - RNA, 19 nt, synthetic construct
  misc_feature 1..19: note = Description of Artificial Sequence: Synthetic oligonucleotide
  source 1..19: mol_type = other RNA
actctcttcctgtcctcat

SEQ ID NO: 3536 - RNA, 19 nt, synthetic construct
  misc_feature 1..19: note = Description of Artificial Sequence: Synthetic oligonucleotide
  source 1..19: mol_type = other RNA
cactctcttcctgtcctca

SEQ ID NO: 3537 - RNA, 19 nt, synthetic construct
  misc_feature 1..19: note = Description of Artificial Sequence: Synthetic oligonucleotide
  source 1..19: mol_type = other RNA
acactctcttcctgtcctc

SEQ ID NO: 3538 - RNA, 19 nt, synthetic construct
  misc_feature 1..19: note = Description of Artificial Sequence: Synthetic oligonucleotide
  source 1..19: mol_type = other RNA
aacactctcttcctgtcct

SEQ ID NO: 3539 - RNA, 19 nt, synthetic construct
  misc_feature 1..19: note = Description of Artificial Sequence: Synthetic oligonucleotide
  source 1..19: mol_type = other RNA
taacactctcttcctgtcc

SEQ ID NO: 3540 - RNA, 19 nt, synthetic construct
  misc_feature 1..19: note = Description of Artificial Sequence: Synthetic oligonucleotide
  source 1..19: mol_type = other RNA
ctaacactctcttcctgtc

SEQ ID NO: 3541 - RNA, 19 nt, synthetic construct
  misc_feature 1..19: note = Description of Artificial Sequence: Synthetic oligonucleotide
  source 1..19: mol_type = other RNA
tctaacactctcttcctgt

SEQ ID NO: 3542 - RNA, 19 nt, synthetic construct
  misc_feature 1..19: note = Description of Artificial Sequence: Synthetic oligonucleotide
  source 1..19: mol_type = other RNA
ttctaacactctcttcctg

SEQ ID NO: 3543 - RNA, 19 nt, synthetic construct
  misc_feature 1..19: note = Description of Artificial Sequence: Synthetic oligonucleotide
  source 1..19: mol_type = other RNA
tttctaacactctcttcct

SEQ ID NO: 3544 - RNA, 19 nt, synthetic construct
  misc_feature 1..19: note = Description of Artificial Sequence: Synthetic oligonucleotide
  source 1..19: mol_type = other RNA
ctttctaacactctcttcc

SEQ ID NO: 3545 - RNA, 19 nt, synthetic construct
  misc_feature 1..19: note = Description of Artificial Sequence: Synthetic oligonucleotide
  source 1..19: mol_type = other RNA
cctttctaacactctcttc

SEQ ID NO: 3546 - RNA, 19 nt, synthetic construct
  misc_feature 1..19: note = Description of Artificial Sequence: Synthetic oligonucleotide
  source 1..19: mol_type = other RNA
ccctttctaacactctctt

SEQ ID NO: 3547 - RNA, 19 nt, synthetic construct
  misc_feature 1..19: note = Description of Artificial Sequence: Synthetic oligonucleotide
  source 1..19: mol_type = other RNA
accctttctaacactctct

SEQ ID NO: 3548 - RNA, 19 nt, synthetic construct
  misc_feature 1..19: note = Description of Artificial Sequence: Synthetic oligonucleotide
  source 1..19: mol_type = other RNA
taccctttctaacactctc

SEQ ID NO: 3549 - RNA, 19 nt, synthetic construct
  misc_feature 1..19: note = Description of Artificial Sequence: Synthetic oligonucleotide
  source 1..19: mol_type = other RNA
ctaccctttctaacactct

SEQ ID NO: 3550 - RNA, 19 nt, synthetic construct
  misc_feature 1..19: note = Description of Artificial Sequence: Synthetic oligonucleotide
  source 1..19: mol_type = other RNA
cctaccctttctaacactc

SEQ ID NO: 3551 - RNA, 19 nt, synthetic construct
  misc_feature 1..19: note = Description of Artificial Sequence: Synthetic oligonucleotide
  source 1..19: mol_type = other RNA
tcctaccctttctaacact

SEQ ID NO: 3552 - RNA, 19 nt, synthetic construct
  misc_feature 1..19: note = Description of Artificial Sequence: Synthetic oligonucleotide
  source 1..19: mol_type = other RNA
gtcctaccctttctaacac

SEQ ID NO: 3553 - RNA, 19 nt, synthetic construct
  misc_feature 1..19: note = Description of Artificial Sequence: Synthetic oligonucleotide
  source 1..19: mol_type = other RNA
agtcctaccctttctaaca

SEQ ID NO: 3554 - RNA, 19 nt, synthetic construct
  misc_feature 1..19: note = Description of Artificial Sequence: Synthetic oligonucleotide
  source 1..19: mol_type = other RNA
cagtcctaccctttctaac

SEQ ID NO: 3555 - RNA, 19 nt, synthetic construct
  misc_feature 1..19: note = Description of Artificial Sequence: Synthetic oligonucleotide
  source 1..19: mol_type = other RNA
tcagtcctaccctttctaa

SEQ ID NO: 3556 - RNA, 19 nt, synthetic construct
  misc_feature 1..19: note = Description of Artificial Sequence: Synthetic oligonucleotide
  source 1..19: mol_type = other RNA
ctcagtcctaccctttcta

SEQ ID NO: 3557 - RNA, 19 nt, synthetic construct
  misc_feature 1..19: note = Description of Artificial Sequence: Synthetic oligonucleotide
  source 1..19: mol_type = other RNA
tctcagtcctaccctttct

SEQ ID NO: 3558 - RNA, 19 nt, synthetic construct
  misc_feature 1..19: note = Description of Artificial Sequence: Synthetic oligonucleotide
  source 1..19: mol_type = other RNA
ttctcagtcctaccctttc

SEQ ID NO: 3559 - RNA, 19 nt, synthetic construct
  misc_feature 1..19: note = Description of Artificial Sequence: Synthetic oligonucleotide
  source 1..19: mol_type = other RNA
tttctcagtcctacccttt

SEQ ID NO: 3560 - RNA, 19 nt, synthetic construct
  misc_feature 1..19: note = Description of Artificial Sequence: Synthetic oligonucleotide
  source 1..19: mol_type = other RNA
gtttctcagtcctaccctt

SEQ ID NO: 3561 - RNA, 19 nt, synthetic construct
  misc_feature 1..19: note = Description of Artificial Sequence: Synthetic oligonucleotide
  source 1..19: mol_type = other RNA
tgtttctcagtcctaccct

SEQ ID NO: 3562 - RNA, 19 nt, synthetic construct
  misc_feature 1..19: note = Description of Artificial Sequence: Synthetic oligonucleotide
  source 1..19: mol_type = other RNA
ctgtttctcagtcctaccc

SEQ ID NO: 3563 - RNA, 19 nt, synthetic construct
  misc_feature 1..19: note = Description of Artificial Sequence: Synthetic oligonucleotide
  source 1..19: mol_type = other RNA
gctgtttctcagtcctacc

SEQ ID NO: 3564 - RNA, 19 nt, synthetic construct
  misc_feature 1..19: note = Description of Artificial Sequence: Synthetic oligonucleotide
  source 1..19: mol_type = other RNA
ggctgtttctcagtcctac

SEQ ID NO: 3565 - RNA, 19 nt, synthetic construct
  misc_feature 1..19: note = Description of Artificial Sequence: Synthetic oligonucleotide
  source 1..19: mol_type = other RNA
aggctgtttctcagtccta

SEQ ID NO: 3566 - RNA, 19 nt, synthetic construct
  misc_feature 1..19: note = Description of Artificial Sequence: Synthetic oligonucleotide
  source 1..19: mol_type = other RNA
taggctgtttctcagtcct

SEQ ID NO: 3567 - RNA, 19 nt, synthetic construct
  misc_feature 1..19: note = Description of Artificial Sequence: Synthetic oligonucleotide
  source 1..19: mol_type = other RNA
ataggctgtttctcagtcc

SEQ ID NO: 3568 - RNA, 19 nt, synthetic construct
  misc_feature 1..19: note = Description of Artificial Sequence: Synthetic oligonucleotide
  source 1..19: mol_type = other RNA
tataggctgtttctcagtc

SEQ ID NO: 3569 - RNA, 19 nt, synthetic construct
  misc_feature 1..19: note = Description of Artificial Sequence: Synthetic oligonucleotide
  source 1..19: mol_type = other RNA
ttataggctgtttctcagt

SEQ ID NO: 3570 - RNA, 19 nt, synthetic construct
  misc_feature 1..19: note = Description of Artificial Sequence: Synthetic oligonucleotide
  source 1..19: mol_type = other RNA
attataggctgtttctcag

SEQ ID NO: 3571 - RNA, 19 nt, synthetic construct
  misc_feature 1..19: note = Description of Artificial Sequence: Synthetic oligonucleotide
  source 1..19: mol_type = other RNA
gattataggctgtttctca

SEQ ID NO: 3572 - RNA, 19 nt, synthetic construct
  misc_feature 1..19: note = Description of Artificial Sequence: Synthetic oligonucleotide
  source 1..19: mol_type = other RNA
agattataggctgtttctc

SEQ ID NO: 3573 - RNA, 19 nt, synthetic construct
  misc_feature 1..19: note = Description of Artificial Sequence: Synthetic oligonucleotide
  source 1..19: mol_type = other RNA
gagattataggctgtttct

SEQ ID NO: 3574 - RNA, 19 nt, synthetic construct
  misc_feature 1..19: note = Description of Artificial Sequence: Synthetic oligonucleotide
  source 1..19: mol_type = other RNA
ggagattataggctgtttc

SEQ ID NO: 3575 - RNA, 19 nt, synthetic construct
  misc_feature 1..19: note = Description of Artificial Sequence: Synthetic oligonucleotide
  source 1..19: mol_type = other RNA
tggagattataggctgttt

SEQ ID NO: 3576 - RNA, 19 nt, synthetic construct
  misc_feature 1..19: note = Description of Artificial Sequence: Synthetic oligonucleotide
  source 1..19: mol_type = other RNA
ttggagattataggctgtt

SEQ ID NO: 3577 - RNA, 19 nt, synthetic construct
  misc_feature 1..19: note = Description of Artificial Sequence: Synthetic oligonucleotide
  source 1..19: mol_type = other RNA
tttggagattataggctgt

SEQ ID NO: 3578 - RNA, 19 nt, synthetic construct
  misc_feature 1..19: note = Description of Artificial Sequence: Synthetic oligonucleotide
  source 1..19: mol_type = other RNA
ctttggagattataggctg

SEQ ID NO: 3579 - RNA, 19 nt, synthetic construct
  misc_feature 1..19: note = Description of Artificial Sequence: Synthetic oligonucleotide
  source 1..19: mol_type = other RNA
tctttggagattataggct

SEQ ID NO: 3580 - RNA, 19 nt, synthetic construct
  misc_feature 1..19: note = Description of Artificial Sequence: Synthetic oligonucleotide
  source 1..19: mol_type = other RNA
ttctttggagattataggc

SEQ ID NO: 3581 - RNA, 19 nt, synthetic construct
  misc_feature 1..19: note = Description of Artificial Sequence: Synthetic oligonucleotide
  source 1..19: mol_type = other RNA
tttctttggagattatagg

SEQ ID NO: 3582 - RNA, 19 nt, synthetic construct
  misc_feature 1..19: note = Description of Artificial Sequence: Synthetic oligonucleotide
  source 1..19: mol_type = other RNA
ctttctttggagattatag

SEQ ID NO: 3583 - RNA, 19 nt, synthetic construct
  misc_feature 1..19: note = Description of Artificial Sequence: Synthetic oligonucleotide
  source 1..19: mol_type = other RNA
tctttctttggagattata

SEQ ID NO: 3584 - RNA, 19 nt, synthetic construct
  misc_feature 1..19: note = Description of Artificial Sequence: Synthetic oligonucleotide
  source 1..19: mol_type = other RNA
ttctttctttggagattat

SEQ ID NO: 3585 - RNA, 19 nt, synthetic construct
  misc_feature 1..19: note = Description of Artificial Sequence: Synthetic oligonucleotide
  source 1..19: mol_type = other RNA
attctttctttggagatta

SEQ ID NO: 3586 - RNA, 19 nt, synthetic construct
  misc_feature 1..19: note = Description of Artificial Sequence: Synthetic oligonucleotide
  source 1..19: mol_type = other RNA
tattctttctttggagatt

SEQ ID NO: 3587 - RNA, 19 nt, synthetic construct
  misc_feature 1..19: note = Description of Artificial Sequence: Synthetic oligonucleotide
  source 1..19: mol_type = other RNA
ttattctttctttggagat

SEQ ID NO: 3588 - RNA, 19 nt, synthetic construct
  misc_feature 1..19: note = Description of Artificial Sequence: Synthetic oligonucleotide
  source 1..19: mol_type = other RNA
cttattctttctttggaga

SEQ ID NO: 3589 - RNA, 19 nt, synthetic construct
  misc_feature 1..19: note = Description of Artificial Sequence: Synthetic oligonucleotide
  source 1..19: mol_type = other RNA
acttattctttctttggag

SEQ ID NO: 3590 - RNA, 19 nt, synthetic construct
  misc_feature 1..19: note = Description of Artificial Sequence: Synthetic oligonucleotide
  source 1..19: mol_type = other RNA
gacttattctttctttgga

SEQ ID NO: 3591 - RNA, 19 nt, synthetic construct
  misc_feature 1..19: note = Description of Artificial Sequence: Synthetic oligonucleotide
  source 1..19: mol_type = other RNA
agacttattctttctttgg

SEQ ID NO: 3592 - RNA, 19 nt, synthetic construct
  misc_feature 1..19: note = Description of Artificial Sequence: Synthetic oligonucleotide
  source 1..19: mol_type = other RNA
gagacttattctttctttg

SEQ ID NO: 3593 - RNA, 19 nt, synthetic construct
  misc_feature 1..19: note = Description of Artificial Sequence: Synthetic oligonucleotide
  source 1..19: mol_type = other RNA
ggagacttattctttcttt

SEQ ID NO: 3594 - RNA, 19 nt, synthetic construct
  misc_feature 1..19: note = Description of Artificial Sequence: Synthetic oligonucleotide
  source 1..19: mol_type = other RNA
tggagacttattctttctt

SEQ ID NO: 3595 - RNA, 19 nt, synthetic construct
  misc_feature 1..19: note = Description of Artificial Sequence: Synthetic oligonucleotide
  source 1..19: mol_type = other RNA
ttggagacttattctttct

SEQ ID NO: 3596 - RNA, 19 nt, synthetic construct
  misc_feature 1..19: note = Description of Artificial Sequence: Synthetic oligonucleotide
  source 1..19: mol_type = other RNA
cttggagacttattctttc

SEQ ID NO: 3597 - RNA, 19 nt, synthetic construct
  misc_feature 1..19: note = Description of Artificial Sequence: Synthetic oligonucleotide
  source 1..19: mol_type = other RNA
ccttggagacttattcttt

SEQ ID NO: 3598 - RNA, 19 nt, synthetic construct
  misc_feature 1..19: note = Description of Artificial Sequence: Synthetic oligonucleotide
  source 1..19: mol_type = other RNA
tccttggagacttattctt

SEQ ID NO: 3599 - RNA, 19 nt, synthetic construct
  misc_feature 1..19: note = Description of Artificial Sequence: Synthetic oligonucleotide
  source 1..19: mol_type = other RNA
ctccttggagacttattct

SEQ ID NO: 3600 - RNA, 19 nt, synthetic construct
  misc_feature 1..19: note = Description of Artificial Sequence: Synthetic oligonucleotide
  source 1..19: mol_type = other RNA
gctccttggagacttattc

SEQ ID NO: 3601 - RNA, 19 nt, synthetic construct
  misc_feature 1..19: note = Description of Artificial Sequence: Synthetic oligonucleotide
  source 1..19: mol_type = other RNA
tgctccttggagacttatt

SEQ ID NO: 3602 - RNA, 19 nt, synthetic construct
  misc_feature 1..19: note = Description of Artificial Sequence: Synthetic oligonucleotide
  source 1..19: mol_type = other RNA
gtgctccttggagacttat

SEQ ID NO: 3603 - RNA, 19 nt, synthetic construct
  misc_feature 1..19: note = Description of Artificial Sequence: Synthetic oligonucleotide
  source 1..19: mol_type = other RNA
tgtgctccttggagactta

SEQ ID NO: 3604 - RNA, 19 nt, synthetic construct
  misc_feature 1..19: note = Description of Artificial Sequence: Synthetic oligonucleotide
  source 1..19: mol_type = other RNA
ttgtgctccttggagactt

SEQ ID NO: 3605 - RNA, 19 nt, synthetic construct
  misc_feature 1..19: note = Description of Artificial Sequence: Synthetic oligonucleotide
  source 1..19: mol_type = other RNA
tttgtgctccttggagact

SEQ ID NO: 3606 - RNA, 19 nt, synthetic construct
  misc_feature 1..19: note = Description of Artificial Sequence: Synthetic oligonucleotide
  source 1..19: mol_type = other RNA
ttttgtgctccttggagac

SEQ ID NO: 3607 - RNA, 19 nt, synthetic construct
  misc_feature 1..19: note = Description of Artificial Sequence: Synthetic oligonucleotide
  source 1..19: mol_type = other RNA
tttttgtgctccttggaga

SEQ ID NO: 3608 - RNA, 19 nt, synthetic construct
  misc_feature 1..19: note = Description of Artificial Sequence: Synthetic oligonucleotide
  source 1..19: mol_type = other RNA
ttttttgtgctccttggag

SEQ ID NO: 3609 - RNA, 19 nt, synthetic construct
  misc_feature 1..19: note = Description of Artificial Sequence: Synthetic oligonucleotide
  source 1..19: mol_type = other RNA
tttttttgtgctccttgga

SEQ ID NO: 3610 - RNA, 19 nt, synthetic construct
  misc_feature 1..19: note = Description of Artificial Sequence: Synthetic oligonucleotide
  source 1..19: mol_type = other RNA
atttttttgtgctccttgg

SEQ ID NO: 3611 - RNA, 19 nt, synthetic construct
  misc_feature 1..19: note = Description of Artificial Sequence: Synthetic oligonucleotide
  source 1..19: mol_type = other RNA
gatttttttgtgctccttg

SEQ ID NO: 3612 - RNA, 19 nt, synthetic construct
  misc_feature 1..19: note = Description of Artificial Sequence: Synthetic oligonucleotide
  source 1..19: mol_type = other RNA
tgatttttttgtgctcctt

SEQ ID NO: 3613 - RNA, 19 nt, synthetic construct
  misc_feature 1..19: note = Description of Artificial Sequence: Synthetic oligonucleotide
  source 1..19: mol_type = other RNA
atgatttttttgtgctcct

SEQ ID NO: 3614 - RNA, 19 nt, synthetic construct
  misc_feature 1..19: note = Description of Artificial Sequence: Synthetic oligonucleotide
  source 1..19: mol_type = other RNA
tatgatttttttgtgctcc

SEQ ID NO: 3615 - RNA, 19 nt, synthetic construct
  misc_feature 1..19: note = Description of Artificial Sequence: Synthetic oligonucleotide
  source 1..19: mol_type = other RNA
atatgatttttttgtgctc

SEQ ID NO: 3616 - RNA, 19 nt, synthetic construct
  misc_feature 1..19: note = Description of Artificial Sequence: Synthetic oligonucleotide
  source 1..19: mol_type = other RNA
catatgatttttttgtgct

SEQ ID NO: 3617 - RNA, 19 nt, synthetic construct
  misc_feature 1..19: note = Description of Artificial Sequence: Synthetic oligonucleotide
  source 1..19: mol_type = other RNA
acatatgatttttttgtgc

SEQ ID NO: 3618 - RNA, 19 nt, synthetic construct
  misc_feature 1..19: note = Description of Artificial Sequence: Synthetic oligonucleotide
  source 1..19: mol_type = other RNA
tacatatgatttttttgtg

SEQ ID NO: 3619 - RNA, 19 nt, synthetic construct
  misc_feature 1..19: note = Description of Artificial Sequence: Synthetic oligonucleotide
  source 1..19: mol_type = other RNA
gtacatatgatttttttgt

SEQ ID NO: 3620 - RNA, 19 nt, synthetic construct
  misc_feature 1..19: note = Description of Artificial Sequence: Synthetic oligonucleotide
  source 1..19: mol_type = other RNA
ggtacatatgatttttttg

SEQ ID NO: 3621 - RNA, 19 nt, synthetic construct
  misc_feature 1..19: note = Description of Artificial Sequence: Synthetic oligonucleotide
  source 1..19: mol_type = other RNA
tggtacatatgattttttt

SEQ ID NO: 3622 - RNA, 19 nt, synthetic construct
  misc_feature 1..19: note = Description of Artificial Sequence: Synthetic oligonucleotide
  source 1..19: mol_type = other RNA
ttggtacatatgatttttt

SEQ ID NO: 3623 - RNA, 19 nt, synthetic construct
  misc_feature 1..19: note = Description of Artificial Sequence: Synthetic oligonucleotide
  source 1..19: mol_type = other RNA
cttggtacatatgattttt

SEQ ID NO: 3624 - RNA, 19 nt, synthetic construct
  misc_feature 1..19: note = Description of Artificial Sequence: Synthetic oligonucleotide
  source 1..19: mol_type = other RNA
ccttggtacatatgatttt

SEQ ID NO: 3625 - RNA, 19 nt, synthetic construct
  misc_feature 1..19: note = Description of Artificial Sequence: Synthetic oligonucleotide
  source 1..19: mol_type = other RNA
tccttggtacatatgattt

SEQ ID NO: 3626 - RNA, 19 nt, synthetic construct
  misc_feature 1..19: note = Description of Artificial Sequence: Synthetic oligonucleotide
  source 1..19: mol_type = other RNA
atccttggtacatatgatt

SEQ ID NO: 3627 - RNA, 19 nt, synthetic construct
  misc_feature 1..19: note = Description of Artificial Sequence: Synthetic oligonucleotide
  source 1..19: mol_type = other RNA
catccttggtacatatgat

SEQ ID NO: 3628 - RNA, 19 nt, synthetic construct
  misc_feature 1..19: note = Description of Artificial Sequence: Synthetic oligonucleotide
  source 1..19: mol_type = other RNA
acatccttggtacatatga

SEQ ID NO: 3629 - RNA, 19 nt, synthetic construct
  misc_feature 1..19: note = Description of Artificial Sequence: Synthetic oligonucleotide
  source 1..19: mol_type = other RNA
aacatccttggtacatatg

SEQ ID NO: 3630 - RNA, 19 nt, synthetic construct
  misc_feature 1..19: note = Description of Artificial Sequence: Synthetic oligonucleotide
  source 1..19: mol_type = other RNA
taacatccttggtacatat

SEQ ID NO: 3631 - RNA, 19 nt, synthetic construct
  misc_feature 1..19: note = Description of Artificial Sequence: Synthetic oligonucleotide
  source 1..19: mol_type = other RNA
gtaacatccttggtacata

SEQ ID NO: 3632 - RNA, 19 nt, synthetic construct
  misc_feature 1..19: note = Description of Artificial Sequence: Synthetic oligonucleotide
  source 1..19: mol_type = other RNA
tgtaacatccttggtacat

SEQ ID NO: 3633 - RNA, 19 nt, synthetic construct
  misc_feature 1..19: note = Description of Artificial Sequence: Synthetic oligonucleotide
  source 1..19: mol_type = other RNA
ctgtaacatccttggtaca

SEQ ID NO: 3634 - RNA, 19 nt, synthetic construct
  misc_feature 1..19: note = Description of Artificial Sequence: Synthetic oligonucleotide
  source 1..19: mol_type = other RNA
actgtaacatccttggtac

SEQ ID NO: 3635 - RNA, 19 nt, synthetic construct
  misc_feature 1..19: note = Description of Artificial Sequence: Synthetic oligonucleotide
  source 1..19: mol_type = other RNA
tactgtaacatccttggta

SEQ ID NO: 3636 - RNA, 19 nt, synthetic construct
  misc_feature 1..19: note = Description of Artificial Sequence: Synthetic oligonucleotide
  source 1..19: mol_type = other RNA
ttactgtaacatccttggt

SEQ ID NO: 3637 - RNA, 19 nt, synthetic construct
  misc_feature 1..19: note = Description of Artificial Sequence: Synthetic oligonucleotide
  source 1..19: mol_type = other RNA
tttactgtaacatccttgg

SEQ ID NO: 3638 - RNA, 19 nt, synthetic construct
  misc_feature 1..19: note = Description of Artificial Sequence: Synthetic oligonucleotide
  source 1..19: mol_type = other RNA
gtttactgtaacatccttg

SEQ ID NO: 3639 - RNA, 19 nt, synthetic construct
  misc_feature 1..19: note = Description of Artificial Sequence: Synthetic oligonucleotide
  source 1..19: mol_type = other RNA
tgtttactgtaacatcctt

SEQ ID NO: 3640 - RNA, 19 nt, synthetic construct
  misc_feature 1..19: note = Description of Artificial Sequence: Synthetic oligonucleotide
  source 1..19: mol_type = other RNA
ctgtttactgtaacatcct

SEQ ID NO: 3641 - RNA, 19 nt, synthetic construct
  misc_feature 1..19: note = Description of Artificial Sequence: Synthetic oligonucleotide
  source 1..19: mol_type = other RNA
cctgtttactgtaacatcc

SEQ ID NO: 3642 - RNA, 19 nt, synthetic construct
  misc_feature 1..19: note = Description of Artificial Sequence: Synthetic oligonucleotide
  source 1..19: mol_type = other RNA
tcctgtttactgtaacatc

SEQ ID NO: 3643 - RNA, 19 nt, synthetic construct
  misc_feature 1..19: note = Description of Artificial Sequence: Synthetic oligonucleotide
  source 1..19: mol_type = other RNA
atcctgtttactgtaacat

SEQ ID NO: 3644 - RNA, 19 nt, synthetic construct
  misc_feature 1..19: note = Description of Artificial Sequence: Synthetic oligonucleotide
  source 1..19: mol_type = other RNA
catcctgtttactgtaaca

SEQ ID NO: 3645 - RNA, 19 nt, synthetic construct
  misc_feature 1..19: note = Description of Artificial Sequence: Synthetic oligonucleotide
  source 1..19: mol_type = other RNA
tcatcctgtttactgtaac

SEQ ID NO: 3646 - RNA, 19 nt, synthetic construct
  misc_feature 1..19: note = Description of Artificial Sequence: Synthetic oligonucleotide
  source 1..19: mol_type = other RNA
ttcatcctgtttactgtaa

SEQ ID NO: 3647 - RNA, 19 nt, synthetic construct
  misc_feature 1..19: note = Description of Artificial Sequence: Synthetic oligonucleotide
  source 1..19: mol_type = other RNA
gttcatcctgtttactgta

SEQ ID NO: 3648 - RNA, 19 nt, synthetic construct
  misc_feature 1..19: note = Description of Artificial Sequence: Synthetic oligonucleotide
  source 1..19: mol_type = other RNA
agttcatcctgtttactgt

SEQ ID NO: 3649 - RNA, 19 nt, synthetic construct
  misc_feature 1..19: note = Description of Artificial Sequence: Synthetic oligonucleotide
  source 1..19: mol_type = other RNA
tagttcatcctgtttactg

SEQ ID NO: 3650 - RNA, 19 nt, synthetic construct
  misc_feature 1..19: note = Description of Artificial Sequence: Synthetic oligonucleotide
  source 1..19: mol_type = other RNA
atagttcatcctgtttact

SEQ ID NO: 3651 - RNA, 19 nt, synthetic construct
  misc_feature 1..19: note = Description of Artificial Sequence: Synthetic oligonucleotide
  source 1..19: mol_type = other RNA
aatagttcatcctgtttac

SEQ ID NO: 3652 - RNA, 19 nt, synthetic construct
  misc_feature 1..19: note = Description of Artificial Sequence: Synthetic oligonucleotide
  source 1..19: mol_type = other RNA
aaatagttcatcctgttta

SEQ ID NO: 3653 - RNA, 19 nt, synthetic construct
  misc_feature 1..19: note = Description of Artificial Sequence: Synthetic oligonucleotide
  source 1..19: mol_type = other RNA
taaatagttcatcctgttt

SEQ ID NO: 3654 - RNA, 19 nt, synthetic construct
  misc_feature 1..19: note = Description of Artificial Sequence: Synthetic oligonucleotide
  source 1..19: mol_type = other RNA
ttaaatagttcatcctgtt

SEQ ID NO: 3655 - RNA, 19 nt, synthetic construct
  misc_feature 1..19: note = Description of Artificial Sequence: Synthetic oligonucleotide
  source 1..19: mol_type = other RNA
tttaaatagttcatcctgt

SEQ ID NO: 3656 - RNA, 19 nt, synthetic construct
  misc_feature 1..19: note = Description of Artificial Sequence: Synthetic oligonucleotide
  source 1..19: mol_type = other RNA
gtttaaatagttcatcctg

SEQ ID NO: 3657 - RNA, 19 nt, synthetic construct
  misc_feature 1..19: note = Description of Artificial Sequence: Synthetic oligonucleotide
  source 1..19: mol_type = other RNA
ggtttaaatagttcatcct

SEQ ID NO: 3658 - RNA, 19 nt, synthetic construct
  misc_feature 1..19: note = Description of Artificial Sequence: Synthetic oligonucleotide
  source 1..19: mol_type = other RNA
gggtttaaatagttcatcc

SEQ ID NO: 3659 - RNA, 19 nt, synthetic construct
  misc_feature 1..19: note = Description of Artificial Sequence: Synthetic oligonucleotide
  source 1..19: mol_type = other RNA
tgggtttaaatagttcatc

SEQ ID NO: 3660 - RNA, 19 nt, synthetic construct
  misc_feature 1..19: note = Description of Artificial Sequence: Synthetic oligonucleotide
  source 1..19: mol_type = other RNA
gtgggtttaaatagttcat

SEQ ID NO: 3661 - RNA, 19 nt, synthetic construct
  misc_feature 1..19: note = Description of Artificial Sequence: Synthetic oligonucleotide
  source 1..19: mol_type = other RNA
agtgggtttaaatagttca

SEQ ID NO: 3662 - RNA, 19 nt, synthetic construct
  misc_feature 1..19: note = Description of Artificial Sequence: Synthetic oligonucleotide
  source 1..19: mol_type = other RNA
cagtgggtttaaatagttc

SEQ ID NO: 3663 - RNA, 19 nt, synthetic construct
  misc_feature 1..19: note = Description of Artificial Sequence: Synthetic oligonucleotide
  source 1..19: mol_type = other RNA
ccagtgggtttaaatagtt

SEQ ID NO: 3664 - RNA, 19 nt, synthetic construct
  misc_feature 1..19: note = Description of Artificial Sequence: Synthetic oligonucleotide
  source 1..19: mol_type = other RNA
cccagtgggtttaaatagt

SEQ ID NO: 3665 - RNA, 19 nt, synthetic construct
  misc_feature 1..19: note = Description of Artificial Sequence: Synthetic oligonucleotide
  source 1..19: mol_type = other RNA
acccagtgggtttaaatag

SEQ ID NO: 3666 - RNA, 19 nt, synthetic construct
  misc_feature 1..19: note = Description of Artificial Sequence: Synthetic oligonucleotide
  source 1..19: mol_type = other RNA
gacccagtgggtttaaata

SEQ ID NO: 3667 - RNA, 19 nt, synthetic construct
  misc_feature 1..19: note = Description of Artificial Sequence: Synthetic oligonucleotide
  source 1..19: mol_type = other RNA
ggacccagtgggtttaaat

SEQ ID NO: 3668 - RNA, 19 nt, synthetic construct
  misc_feature 1..19: note = Description of Artificial Sequence: Synthetic oligonucleotide
  source 1..19: mol_type = other RNA
aggacccagtgggtttaaa

SEQ ID NO: 3669 - RNA, 19 nt, synthetic construct
  misc_feature 1..19: note = Description of Artificial Sequence: Synthetic oligonucleotide
  source 1..19: mol_type = other RNA
caggacccagtgggtttaa

SEQ ID NO: 3670 - RNA, 19 nt, synthetic construct
  misc_feature 1..19: note = Description of Artificial Sequence: Synthetic oligonucleotide
  source 1..19: mol_type = other RNA
gcaggacccagtgggttta

SEQ ID NO: 3671 - RNA, 19 nt, synthetic construct
  misc_feature 1..19: note = Description of Artificial Sequence: Synthetic oligonucleotide
  source 1..19: mol_type = other RNA
ggcaggacccagtgggttt

SEQ ID NO: 3672 - RNA, 19 nt, synthetic construct
  misc_feature 1..19: note = Description of Artificial Sequence: Synthetic oligonucleotide
  source 1..19: mol_type = other RNA
tggcaggacccagtgggtt

SEQ ID NO: 3673 - RNA, 19 nt, synthetic construct
  misc_feature 1..19: note = Description of Artificial Sequence: Synthetic oligonucleotide
  source 1..19: mol_type = other RNA
gtggcaggacccagtgggt

SEQ ID NO: 3674 - RNA, 19 nt, synthetic construct
  misc_feature 1..19: note = Description of Artificial Sequence: Synthetic oligonucleotide
  source 1..19: mol_type = other RNA
tgtggcaggacccagtggg

SEQ ID NO: 3675 - RNA, 19 nt, synthetic construct
  misc_feature 1..19: note = Description of Artificial Sequence: Synthetic oligonucleotide
  source 1..19: mol_type = other RNA
atgtggcaggacccagtgg

SEQ ID NO: 3676 - RNA, 19 nt, synthetic construct
  misc_feature 1..19: note = Description of Artificial Sequence: Synthetic oligonucleotide
  source 1..19: mol_type = other RNA
gatgtggcaggacccagtg

SEQ ID NO: 3677 - RNA, 19 nt, synthetic construct
  misc_feature 1..19: note = Description of Artificial Sequence: Synthetic oligonucleotide
  source 1..19: mol_type = other RNA
ggatgtggcaggacccagt

SEQ ID NO: 3678 - RNA, 19 nt, synthetic construct
  misc_feature 1..19: note = Description of Artificial Sequence: Synthetic oligonucleotide
  source 1..19: mol_type = other RNA
aggatgtggcaggacccag

SEQ ID NO: 3679 - RNA, 19 nt, synthetic construct
  misc_feature 1..19: note = Description of Artificial Sequence: Synthetic oligonucleotide
  source 1..19: mol_type = other RNA
aaggatgtggcaggaccca

SEQ ID NO: 3680 - RNA, 19 nt, synthetic construct
  misc_feature 1..19: note = Description of Artificial Sequence: Synthetic oligonucleotide
  source 1..19: mol_type = other RNA
gaaggatgtggcaggaccc

SEQ ID NO: 3681 - RNA, 19 nt, synthetic construct
  misc_feature 1..19: note = Description of Artificial Sequence: Synthetic oligonucleotide
  source 1..19: mol_type = other RNA
agaaggatgtggcaggacc

SEQ ID NO: 3682 - RNA, 19 nt, synthetic construct
  misc_feature 1..19: note = Description of Artificial Sequence: Synthetic oligonucleotide
  source 1..19: mol_type = other RNA
gagaaggatgtggcaggac

SEQ ID NO: 3683 - RNA, 19 nt, synthetic construct
  misc_feature 1..19: note = Description of Artificial Sequence: Synthetic oligonucleotide
  source 1..19: mol_type = other RNA
tgagaaggatgtggcagga

SEQ ID NO: 3684 - RNA, 19 nt, synthetic construct
  misc_feature 1..19: note = Description of Artificial Sequence: Synthetic oligonucleotide
  source 1..19: mol_type = other RNA
ttgagaaggatgtggcagg

SEQ ID NO: 3685 - RNA, 19 nt, synthetic construct
  misc_feature 1..19: note = Description of Artificial Sequence: Synthetic oligonucleotide
  source 1..19: mol_type = other RNA
cttgagaaggatgtggcag

SEQ ID NO: 3686 - RNA, 19 nt, synthetic construct
  misc_feature 1..19: note = Description of Artificial Sequence: Synthetic oligonucleotide
  source 1..19: mol_type = other RNA
ccttgagaaggatgtggca

SEQ ID NO: 3687 - RNA, 19 nt, synthetic construct
  misc_feature 1..19: note = Description of Artificial Sequence: Synthetic oligonucleotide
  source 1..19: mol_type = other RNA
accttgagaaggatgtggc

SEQ ID NO: 3688 - RNA, 19 nt, synthetic construct
  misc_feature 1..19: note = Description of Artificial Sequence: Synthetic oligonucleotide
  source 1..19: mol_type = other RNA
caccttgagaaggatgtgg

SEQ ID NO: 3689 - RNA, 19 nt, synthetic construct
  misc_feature 1..19: note = Description of Artificial Sequence: Synthetic oligonucleotide
  source 1..19: mol_type = other RNA
ccaccttgagaaggatgtg

SEQ ID NO: 3690 - RNA, 19 nt, synthetic construct
  misc_feature 1..19: note = Description of Artificial Sequence: Synthetic oligonucleotide
  source 1..19: mol_type = other RNA
accaccttgagaaggatgt

SEQ ID NO: 3691 - RNA, 19 nt, synthetic construct
  misc_feature 1..19: note = Description of Artificial Sequence: Synthetic oligonucleotide
  source 1..19: mol_type = other RNA
taccaccttgagaaggatg

SEQ ID NO: 3692 - RNA, 19 nt, synthetic construct
  misc_feature 1..19: note = Description of Artificial Sequence: Synthetic oligonucleotide
  source 1..19: mol_type = other RNA
ctaccaccttgagaaggat

SEQ ID NO: 3693 - RNA, 19 nt, synthetic construct
  misc_feature 1..19: note = Description of Artificial Sequence: Synthetic oligonucleotide
  source 1..19: mol_type = other RNA
tctaccaccttgagaagga

SEQ ID NO: 3694 - RNA, 19 nt, synthetic construct
  misc_feature 1..19: note = Description of Artificial Sequence: Synthetic oligonucleotide
  source 1..19: mol_type = other RNA
gtctaccaccttgagaagg

SEQ ID NO: 3695 - RNA, 19 nt, synthetic construct
  misc_feature 1..19: note = Description of Artificial Sequence: Synthetic oligonucleotide
  source 1..19: mol_type = other RNA
agtctaccaccttgagaag

SEQ ID NO: 3696 - RNA, 19 nt, synthetic construct
  misc_feature 1..19: note = Description of Artificial Sequence: Synthetic oligonucleotide
  source 1..19: mol_type = other RNA
cagtctaccaccttgagaa

SEQ ID NO: 3697 - RNA, 19 nt, synthetic construct
  misc_feature 1..19: note = Description of Artificial Sequence: Synthetic oligonucleotide
  source 1..19: mol_type = other RNA
tcagtctaccaccttgaga

SEQ ID NO: 3698 - RNA, 19 nt, synthetic construct
  misc_feature 1..19: note = Description of Artificial Sequence: Synthetic oligonucleotide
  source 1..19: mol_type = other RNA
ctcagtctaccaccttgag

SEQ ID NO: 3699 - RNA, 19 nt, synthetic construct
  misc_feature 1..19: note = Description of Artificial Sequence: Synthetic oligonucleotide
  source 1..19: mol_type = other RNA
actcagtctaccaccttga

SEQ ID NO: 3700 - RNA, 19 nt, synthetic construct
  misc_feature 1..19: note = Description of Artificial Sequence: Synthetic oligonucleotide
  source 1..19: mol_type = other RNA
cactcagtctaccaccttg

SEQ ID NO: 3701 - RNA, 19 nt, synthetic construct
  misc_feature 1..19: note = Description of Artificial Sequence: Synthetic oligonucleotide
  source 1..19: mol_type = other RNA
ccactcagtctaccacctt

SEQ ID NO: 3702 - RNA, 19 nt, synthetic construct
  misc_feature 1..19: note = Description of Artificial Sequence: Synthetic oligonucleotide
  source 1..19: mol_type = other RNA
cccactcagtctaccacct

SEQ ID NO: 3703 - RNA, 19 nt, synthetic construct
  misc_feature 1..19: note = Description of Artificial Sequence: Synthetic oligonucleotide
  source 1..19: mol_type = other RNA
ccccactcagtctaccacc

SEQ ID NO: 3704 - RNA, 19 nt, synthetic construct
  misc_feature 1..19: note = Description of Artificial Sequence: Synthetic oligonucleotide
  source 1..19: mol_type = other RNA
accccactcagtctaccac

SEQ ID NO: 3705 - RNA, 19 nt, synthetic construct
  misc_feature 1..19: note = Description of Artificial Sequence: Synthetic oligonucleotide
  source 1..19: mol_type = other RNA
gaccccactcagtctacca

SEQ ID NO: 3706 - RNA, 19 nt, synthetic construct
  misc_feature 1..19: note = Description of Artificial Sequence: Synthetic oligonucleotide
  source 1..19: mol_type = other RNA
agaccccactcagtctacc

SEQ ID NO: 3707 - RNA, 19 nt, synthetic construct
  misc_feature 1..19: note = Description of Artificial Sequence: Synthetic oligonucleotide
  source 1..19: mol_type = other RNA
gagaccccactcagtctac

SEQ ID NO: 3708 - RNA, 19 nt, synthetic construct
  misc_feature 1..19: note = Description of Artificial Sequence: Synthetic oligonucleotide
  source 1..19: mol_type = other RNA
agagaccccactcagtcta

SEQ ID NO: 3709 - RNA, 19 nt, synthetic construct
  misc_feature 1..19: note = Description of Artificial Sequence: Synthetic oligonucleotide
  source 1..19: mol_type = other RNA
gagagaccccactcagtct

SEQ ID NO: 3710 - RNA, 19 nt, synthetic construct
  misc_feature 1..19: note = Description of Artificial Sequence: Synthetic oligonucleotide
  source 1..19: mol_type = other RNA
agagagaccccactcagtc

SEQ ID NO: 3711 - RNA, 19 nt, synthetic construct
  misc_feature 1..19: note = Description of Artificial Sequence: Synthetic oligonucleotide
  source 1..19: mol_type = other RNA
cagagagaccccactcagt

SEQ ID NO: 3712 - RNA, 19 nt, synthetic construct
  misc_feature 1..19: note = Description of Artificial Sequence: Synthetic oligonucleotide
  source 1..19: mol_type = other RNA
gcagagagaccccactcag

SEQ ID NO: 3713 - RNA, 19 nt, synthetic construct
  misc_feature 1..19: note = Description of Artificial Sequence: Synthetic oligonucleotide
  source 1..19: mol_type = other RNA
ggcagagagaccccactca

SEQ ID NO: 3714 - RNA, 19 nt, synthetic construct
  misc_feature 1..19: note = Description of Artificial Sequence: Synthetic oligonucleotide
  source 1..19: mol_type = other RNA
gggcagagagaccccactc

SEQ ID NO: 3715 - RNA, 19 nt, synthetic construct
  misc_feature 1..19: note = Description of Artificial Sequence: Synthetic oligonucleotide
  source 1..19: mol_type = other RNA
tgggcagagagaccccact

SEQ ID NO: 3716 - RNA, 19 nt, synthetic construct
  misc_feature 1..19: note = Description of Artificial Sequence: Synthetic oligonucleotide
  source 1..19: mol_type = other RNA
ttgggcagagagaccccac

SEQ ID NO: 3717 - RNA, 19 nt, synthetic construct
  misc_feature 1..19: note = Description of Artificial Sequence: Synthetic oligonucleotide
  source 1..19: mol_type = other RNA
cttgggcagagagacccca

SEQ ID NO: 3718 - RNA, 19 nt, synthetic construct
  misc_feature 1..19: note = Description of Artificial Sequence: Synthetic oligonucleotide
  source 1..19: mol_type = other RNA
tcttgggcagagagacccc

SEQ ID NO: 3719 - RNA, 19 nt, synthetic construct
  misc_feature 1..19: note = Description of Artificial Sequence: Synthetic oligonucleotide
  source 1..19: mol_type = other RNA
atcttgggcagagagaccc

SEQ ID NO: 3720 - RNA, 19 nt, synthetic construct
  misc_feature 1..19: note = Description of Artificial Sequence: Synthetic oligonucleotide
  source 1..19: mol_type = other RNA
gatcttgggcagagagacc

SEQ ID NO: 3721 - RNA, 19 nt, synthetic construct
  misc_feature 1..19: note = Description of Artificial Sequence: Synthetic oligonucleotide
  source 1..19: mol_type = other RNA
ggatcttgggcagagagac

SEQ ID NO: 3722 - RNA, 19 nt, synthetic construct
  misc_feature 1..19: note = Description of Artificial Sequence: Synthetic oligonucleotide
  source 1..19: mol_type = other RNA
gggatcttgggcagagaga

SEQ ID NO: 3723 - RNA, 19 nt, synthetic construct
  misc_feature 1..19: note = Description of Artificial Sequence: Synthetic oligonucleotide
  source 1..19: mol_type = other RNA
agggatcttgggcagagag

SEQ ID NO: 3724 - RNA, 19 nt, synthetic construct
  misc_feature 1..19: note = Description of Artificial Sequence: Synthetic oligonucleotide
  source 1..19: mol_type = other RNA
cagggatcttgggcagaga

SEQ ID NO: 3725 - RNA, 19 nt, synthetic construct
  misc_feature 1..19: note = Description of Artificial Sequence: Synthetic oligonucleotide
  source 1..19: mol_type = other RNA
tcagggatcttgggcagag

SEQ ID NO: 3726 - RNA, 19 nt, synthetic construct
  misc_feature 1..19: note = Description of Artificial Sequence: Synthetic oligonucleotide
  source 1..19: mol_type = other RNA
gtcagggatcttgggcaga

SEQ ID NO: 3727 - RNA, 19 nt, synthetic construct
  misc_feature 1..19: note = Description of Artificial Sequence: Synthetic oligonucleotide
  source 1..19: mol_type = other RNA
tgtcagggatcttgggcag

SEQ ID NO: 3728 - RNA, 19 nt, synthetic construct
  misc_feature 1..19: note = Description of Artificial Sequence: Synthetic oligonucleotide
  source 1..19: mol_type = other RNA
atgtcagggatcttgggca

SEQ ID NO: 3729 - RNA, 19 nt, synthetic construct
  misc_feature 1..19: note = Description of Artificial Sequence: Synthetic oligonucleotide
  source 1..19: mol_type = other RNA
tatgtcagggatcttgggc

SEQ ID NO: 3730 - RNA, 19 nt, synthetic construct
  misc_feature 1..19: note = Description of Artificial Sequence: Synthetic oligonucleotide
  source 1..19: mol_type = other RNA
ctatgtcagggatcttggg

SEQ ID NO: 3731 - RNA, 19 nt, synthetic construct
  misc_feature 1..19: note = Description of Artificial Sequence: Synthetic oligonucleotide
  source 1..19: mol_type = other RNA
gctatgtcagggatcttgg

SEQ ID NO: 3732 - RNA, 19 nt, synthetic construct
  misc_feature 1..19: note = Description of Artificial Sequence: Synthetic oligonucleotide
  source 1..19: mol_type = other RNA
tgctatgtcagggatcttg

SEQ ID NO: 3733 - RNA, 19 nt, synthetic construct
  misc_feature 1..19: note = Description of Artificial Sequence: Synthetic oligonucleotide
  source 1..19: mol_type = other RNA
ctgctatgtcagggatctt

SEQ ID NO: 3734 - RNA, 19 nt, synthetic construct
  misc_feature 1..19: note = Description of Artificial Sequence: Synthetic oligonucleotide
  source 1..19: mol_type = other RNA
actgctatgtcagggatct

SEQ ID NO: 3735 - RNA, 19 nt, synthetic construct
  misc_feature 1..19: note = Description of Artificial Sequence: Synthetic oligonucleotide
  source 1..19: mol_type = other RNA
tactgctatgtcagggatc

SEQ ID NO: 3736 - RNA, 19 nt, synthetic construct
  misc_feature 1..19: note = Description of Artificial Sequence: Synthetic oligonucleotide
  source 1..19: mol_type = other RNA
ctactgctatgtcagggat

SEQ ID NO: 3737 - RNA, 19 nt, synthetic construct
  misc_feature 1..19: note = Description of Artificial Sequence: Synthetic oligonucleotide
  source 1..19: mol_type = other RNA
gctactgctatgtcaggga

SEQ ID NO: 3738 - RNA, 19 nt, synthetic construct
  misc_feature 1..19: note = Description of Artificial Sequence: Synthetic oligonucleotide
  source 1..19: mol_type = other RNA
agctactgctatgtcaggg

SEQ ID NO: 3739 - RNA, 19 nt, synthetic construct
  misc_feature 1..19: note = Description of Artificial Sequence: Synthetic oligonucleotide
  source 1..19: mol_type = other RNA
aagctactgctatgtcagg

SEQ ID NO: 3740 - RNA, 19 nt, synthetic construct
  misc_feature 1..19: note = Description of Artificial Sequence: Synthetic oligonucleotide
  source 1..19: mol_type = other RNA
caagctactgctatgtcag

SEQ ID NO: 3741 - RNA, 19 nt, synthetic construct
  misc_feature 1..19: note = Description of Artificial Sequence: Synthetic oligonucleotide
  source 1..19: mol_type = other RNA
acaagctactgctatgtca

SEQ ID NO: 3742 - RNA, 19 nt, synthetic construct
  misc_feature 1..19: note = Description of Artificial Sequence: Synthetic oligonucleotide
  source 1..19: mol_type = other RNA
gacaagctactgctatgtc

SEQ ID NO: 3743 - RNA, 19 nt, synthetic construct
  misc_feature 1..19: note = Description of Artificial Sequence: Synthetic oligonucleotide
  source 1..19: mol_type = other RNA
agacaagctactgctatgt

SEQ ID NO: 3744 - RNA, 19 nt, synthetic construct
  misc_feature 1..19: note = Description of Artificial Sequence: Synthetic oligonucleotide
  source 1..19: mol_type = other RNA
aagacaagctactgctatg

SEQ ID NO: 3745 - RNA, 19 nt, synthetic construct
  misc_feature 1..19: note = Description of Artificial Sequence: Synthetic oligonucleotide
  source 1..19: mol_type = other RNA
aaagacaagctactgctat

SEQ ID NO: 3746 - RNA, 19 nt, synthetic construct
  misc_feature 1..19: note = Description of Artificial Sequence: Synthetic oligonucleotide
  source 1..19: mol_type = other RNA
aaaagacaagctactgcta

SEQ ID NO: 3747 - RNA, 19 nt, synthetic construct
  misc_feature 1..19: note = Description of Artificial Sequence: Synthetic oligonucleotide
  source 1..19: mol_type = other RNA
gaaaagacaagctactgct

SEQ ID NO: 3748 - RNA, 19 nt, synthetic construct
  misc_feature 1..19: note = Description of Artificial Sequence: Synthetic oligonucleotide
  source 1..19: mol_type = other RNA
ggaaaagacaagctactgc

SEQ ID NO: 3749 - RNA, 19 nt, synthetic construct
  misc_feature 1..19: note = Description of Artificial Sequence: Synthetic oligonucleotide
  source 1..19: mol_type = other RNA
tggaaaagacaagctactg

SEQ ID NO: 3750 - RNA, 19 nt, synthetic construct
  misc_feature 1..19: note = Description of Artificial Sequence: Synthetic oligonucleotide
  source 1..19: mol_type = other RNA
gtggaaaagacaagctact

SEQ ID NO: 3751 - RNA, 19 nt, synthetic construct
  misc_feature 1..19: note = Description of Artificial Sequence: Synthetic oligonucleotide
  source 1..19: mol_type = other RNA
tgtggaaaagacaagctac

SEQ ID NO: 3752 - RNA, 19 nt, synthetic construct
  misc_feature 1..19: note = Description of Artificial Sequence: Synthetic oligonucleotide
  source 1..19: mol_type = other RNA
atgtggaaaagacaagcta

SEQ ID NO: 3753 - RNA, 19 nt, synthetic construct
  misc_feature 1..19: note = Description of Artificial Sequence: Synthetic oligonucleotide
  source 1..19: mol_type = other RNA
catgtggaaaagacaagct

SEQ ID NO: 3754 - RNA, 19 nt, synthetic construct
  misc_feature 1..19: note = Description of Artificial Sequence: Synthetic oligonucleotide
  source 1..19: mol_type = other RNA
tcatgtggaaaagacaagc

SEQ ID NO: 3755 - RNA, 19 nt, synthetic construct
  misc_feature 1..19: note = Description of Artificial Sequence: Synthetic oligonucleotide
  source 1..19: mol_type = other RNA
atcatgtggaaaagacaag

SEQ ID NO: 3756 - RNA, 19 nt, synthetic construct
  misc_feature 1..19: note = Description of Artificial Sequence: Synthetic oligonucleotide
  source 1..19: mol_type = other RNA
aatcatgtggaaaagacaa

SEQ ID NO: 3757 - RNA, 19 nt, synthetic construct
  misc_feature 1..19: note = Description of Artificial Sequence: Synthetic oligonucleotide
  source 1..19: mol_type = other RNA
aaatcatgtggaaaagaca

SEQ ID NO: 3758 - RNA, 19 nt, synthetic construct
  misc_feature 1..19: note = Description of Artificial Sequence: Synthetic oligonucleotide
  source 1..19: mol_type = other RNA
caaatcatgtggaaaagac

SEQ ID NO: 3759 - RNA, 19 nt, synthetic construct
  misc_feature 1..19: note = Description of Artificial Sequence: Synthetic oligonucleotide
  source 1..19: mol_type = other RNA
acaaatcatgtggaaaaga

SEQ ID NO: 3760 - RNA, 19 nt, synthetic construct
  misc_feature 1..19: note = Description of Artificial Sequence: Synthetic oligonucleotide
  source 1..19: mol_type = other RNA
gacaaatcatgtggaaaag

SEQ ID NO: 3761 - RNA, 19 nt, synthetic construct
  misc_feature 1..19: note = Description of Artificial Sequence: Synthetic oligonucleotide
  source 1..19: mol_type = other RNA
agacaaatcatgtggaaaa

SEQ ID NO: 3762 - RNA, 19 nt, synthetic construct
  misc_feature 1..19: note = Description of Artificial Sequence: Synthetic oligonucleotide
  source 1..19: mol_type = other RNA
cagacaaatcatgtggaaa

SEQ ID NO: 3763 - RNA, 19 nt, synthetic construct
  misc_feature 1..19: note = Description of Artificial Sequence: Synthetic oligonucleotide
  source 1..19: mol_type = other RNA
acagacaaatcatgtggaa

SEQ ID NO: 3764 - RNA, 19 nt, synthetic construct
  misc_feature 1..19: note = Description of Artificial Sequence: Synthetic oligonucleotide
  source 1..19: mol_type = other RNA
cacagacaaatcatgtgga

SEQ ID NO: 3765 - RNA, 19 nt, synthetic construct
  misc_feature 1..19: note = Description of Artificial Sequence: Synthetic oligonucleotide
  source 1..19: mol_type = other RNA
tcacagacaaatcatgtgg

SEQ ID NO: 3766 - RNA, 19 nt, synthetic construct
  misc_feature 1..19: note = Description of Artificial Sequence: Synthetic oligonucleotide
  source 1..19: mol_type = other RNA
ttcacagacaaatcatgtg

SEQ ID NO: 3767 - RNA, 19 nt, synthetic construct
  misc_feature 1..19: note = Description of Artificial Sequence: Synthetic oligonucleotide
  source 1..19: mol_type = other RNA
tttcacagacaaatcatgt

SEQ ID NO: 3768 - RNA, 19 nt, synthetic construct
  misc_feature 1..19: note = Description of Artificial Sequence: Synthetic oligonucleotide
  source 1..19: mol_type = other RNA
ctttcacagacaaatcatg

SEQ ID NO: 3769 - RNA, 19 nt, synthetic construct
  misc_feature 1..19: note = Description of Artificial Sequence: Synthetic oligonucleotide
  source 1..19: mol_type = other RNA
tctttcacagacaaatcat

SEQ ID NO: 3770 - RNA, 19 nt, synthetic construct
  misc_feature 1..19: note = Description of Artificial Sequence: Synthetic oligonucleotide
  source 1..19: mol_type = other RNA
ttctttcacagacaaatca

SEQ ID NO: 3771 - RNA, 19 nt, synthetic construct
  misc_feature 1..19: note = Description of Artificial Sequence: Synthetic oligonucleotide
  source 1..19: mol_type = other RNA
tttctttcacagacaaatc

SEQ ID NO: 3772 - RNA, 19 nt, synthetic construct
  misc_feature 1..19: note = Description of Artificial Sequence: Synthetic oligonucleotide
  source 1..19: mol_type = other RNA
ttttctttcacagacaaat

SEQ ID NO: 3773 - RNA, 19 nt, synthetic construct
  misc_feature 1..19: note = Description of Artificial Sequence: Synthetic oligonucleotide
  source 1..19: mol_type = other RNA
attttctttcacagacaaa

SEQ ID NO: 3774 - RNA, 19 nt, synthetic construct
  misc_feature 1..19: note = Description of Artificial Sequence: Synthetic oligonucleotide
  source 1..19: mol_type = other RNA
tattttctttcacagacaa

SEQ ID NO: 3775 - RNA, 19 nt, synthetic construct
  misc_feature 1..19: note = Description of Artificial Sequence: Synthetic oligonucleotide
  source 1..19: mol_type = other RNA
ttattttctttcacagaca

SEQ ID NO: 3776 - RNA, 19 nt, synthetic construct
  misc_feature 1..19: note = Description of Artificial Sequence: Synthetic oligonucleotide
  source 1..19: mol_type = other RNA
attattttctttcacagac

SEQ ID NO: 3777 - RNA, 19 nt, synthetic construct
  misc_feature 1..19: note = Description of Artificial Sequence: Synthetic oligonucleotide
  source 1..19: mol_type = other RNA
aattattttctttcacaga

SEQ ID NO: 3778 - RNA, 19 nt, synthetic construct
  misc_feature 1..19: note = Description of Artificial Sequence: Synthetic oligonucleotide
  source 1..19: mol_type = other RNA
aaattattttctttcacag

SEQ ID NO: 3779 - RNA, 19 nt, synthetic construct
  misc_feature 1..19: note = Description of Artificial Sequence: Synthetic oligonucleotide
  source 1..19: mol_type = other RNA
aaaattattttctttcaca

SEQ ID NO: 3780 - RNA, 19 nt, synthetic construct
  misc_feature 1..19: note = Description of Artificial Sequence: Synthetic oligonucleotide
  source 1..19: mol_type = other RNA
caaaattattttctttcac

SEQ ID NO: 3781 - RNA, 19 nt, synthetic construct
  misc_feature 1..19: note = Description of Artificial Sequence: Synthetic oligonucleotide
  source 1..19: mol_type = other RNA
tcaaaattattttctttca

SEQ ID NO: 3782 - RNA, 19 nt, synthetic construct
  misc_feature 1..19: note = Description of Artificial Sequence: Synthetic oligonucleotide
  source 1..19: mol_type = other RNA
ctcaaaattattttctttc

SEQ ID NO: 3783 - RNA, 19 nt, synthetic construct
  misc_feature 1..19: note = Description of Artificial Sequence: Synthetic oligonucleotide
  source 1..19: mol_type = other RNA
tctcaaaattattttcttt

SEQ ID NO: 3784 - RNA, 19 nt, synthetic construct
  misc_feature 1..19: note = Description of Artificial Sequence: Synthetic oligonucleotide
  source 1..19: mol_type = other RNA
atctcaaaattattttctt

SEQ ID NO: 3785 - RNA, 19 nt, synthetic construct
  misc_feature 1..19: note = Description of Artificial Sequence: Synthetic oligonucleotide
  source 1..19: mol_type = other RNA
gatctcaaaattattttct

SEQ ID NO: 3786 - RNA, 19 nt, synthetic construct
  misc_feature 1..19: note = Description of Artificial Sequence: Synthetic oligonucleotide
  source 1..19: mol_type = other RNA
cgatctcaaaattattttc

SEQ ID NO: 3787 - RNA, 19 nt, synthetic construct
  misc_feature 1..19: note = Description of Artificial Sequence: Synthetic oligonucleotide
  source 1..19: mol_type = other RNA
acgatctcaaaattatttt

SEQ ID NO: 3788 - RNA, 19 nt, synthetic construct
  misc_feature 1..19: note = Description of Artificial Sequence: Synthetic oligonucleotide
  source 1..19: mol_type = other RNA
aacgatctcaaaattattt

SEQ ID NO: 3789 - RNA, 19 nt, synthetic construct
  misc_feature 1..19: note = Description of Artificial Sequence: Synthetic oligonucleotide
  source 1..19: mol_type = other RNA
aaacgatctcaaaattatt

SEQ ID NO: 3790 - RNA, 19 nt, synthetic construct
  misc_feature 1..19: note = Description of Artificial Sequence: Synthetic oligonucleotide
  source 1..19: mol_type = other RNA
aaaacgatctcaaaattat

SEQ ID NO: 3791 - RNA, 19 nt, synthetic construct
  misc_feature 1..19: note = Description of Artificial Sequence: Synthetic oligonucleotide
  source 1..19: mol_type = other RNA
taaaacgatctcaaaatta

SEQ ID NO: 3792 - RNA, 19 nt, synthetic construct
  misc_feature 1..19: note = Description of Artificial Sequence: Synthetic oligonucleotide
  source 1..19: mol_type = other RNA
ataaaacgatctcaaaatt

SEQ ID NO: 3793 - RNA, 19 nt, synthetic construct
  misc_feature 1..19: note = Description of Artificial Sequence: Synthetic oligonucleotide
  source 1..19: mol_type = other RNA
gataaaacgatctcaaaat

SEQ ID NO: 3794 - RNA, 19 nt, synthetic construct
  misc_feature 1..19: note = Description of Artificial Sequence: Synthetic oligonucleotide
  source 1..19: mol_type = other RNA
agataaaacgatctcaaaa

SEQ ID NO: 3795 - RNA, 19 nt, synthetic construct
  misc_feature 1..19: note = Description of Artificial Sequence: Synthetic oligonucleotide
  source 1..19: mol_type = other RNA
tagataaaacgatctcaaa

SEQ ID NO: 3796 - RNA, 19 nt, synthetic construct
  misc_feature 1..19: note = Description of Artificial Sequence: Synthetic oligonucleotide
  source 1..19: mol_type = other RNA
atagataaaacgatctcaa

SEQ ID NO: 3797 - RNA, 19 nt, synthetic construct
  misc_feature 1..19: note = Description of Artificial Sequence: Synthetic oligonucleotide
  source 1..19: mol_type = other RNA
aatagataaaacgatctca

SEQ ID NO: 3798 - RNA, 19 nt, synthetic construct
  misc_feature 1..19: note = Description of Artificial Sequence: Synthetic oligonucleotide
  source 1..19: mol_type = other RNA
aaatagataaaacgatctc

SEQ ID NO: 3799 - RNA, 19 nt, synthetic construct
  misc_feature 1..19: note = Description of Artificial Sequence: Synthetic oligonucleotide
  source 1..19: mol_type = other RNA
aaaatagataaaacgatct

SEQ ID NO: 3800 - RNA, 19 nt, synthetic construct
  misc_feature 1..19: note = Description of Artificial Sequence: Synthetic oligonucleotide
  source 1..19: mol_type = other RNA
gaaaatagataaaacgatc

SEQ ID NO: 3801 - RNA, 19 nt, synthetic construct
  misc_feature 1..19: note = Description of Artificial Sequence: Synthetic oligonucleotide
  source 1..19: mol_type = other RNA
agaaaatagataaaacgat

SEQ ID NO: 3802 - RNA, 19 nt, synthetic construct
  misc_feature 1..19: note = Description of Artificial Sequence: Synthetic oligonucleotide
  source 1..19: mol_type = other RNA
gagaaaatagataaaacga

SEQ ID NO: 3803 - RNA, 19 nt, synthetic construct
  misc_feature 1..19: note = Description of Artificial Sequence: Synthetic oligonucleotide
  source 1..19: mol_type = other RNA
agagaaaatagataaaacg

SEQ ID NO: 3804 - RNA, 19 nt, synthetic construct
  misc_feature 1..19: note = Description of Artificial Sequence: Synthetic oligonucleotide
  source 1..19: mol_type = other RNA
tagagaaaatagataaaac

SEQ ID NO: 3805 - RNA, 19 nt, synthetic construct
  misc_feature 1..19: note = Description of Artificial Sequence: Synthetic oligonucleotide
  source 1..19: mol_type = other RNA
gtagagaaaatagataaaa

SEQ ID NO: 3806 - RNA, 19 nt, synthetic construct
  misc_feature 1..19: note = Description of Artificial Sequence: Synthetic oligonucleotide
  source 1..19: mol_type = other RNA
cgtagagaaaatagataaa

SEQ ID NO: 3807 - RNA, 19 nt, synthetic construct
  misc_feature 1..19: note = Description of Artificial Sequence: Synthetic oligonucleotide
  source 1..19: mol_type = other RNA
ccgtagagaaaatagataa

SEQ ID NO: 3808 - RNA, 19 nt, synthetic construct
  misc_feature 1..19: note = Description of Artificial Sequence: Synthetic oligonucleotide
  source 1..19: mol_type = other RNA
gccgtagagaaaatagata

SEQ ID NO: 3809 - RNA, 19 nt, synthetic construct
  misc_feature 1..19: note = Description of Artificial Sequence: Synthetic oligonucleotide
  source 1..19: mol_type = other RNA
agccgtagagaaaatagat

SEQ ID NO: 3810 - RNA, 19 nt, synthetic construct
  misc_feature 1..19: note = Description of Artificial Sequence: Synthetic oligonucleotide
  source 1..19: mol_type = other RNA
aagccgtagagaaaataga

SEQ ID NO: 3811 - RNA, 19 nt, synthetic construct
  misc_feature 1..19: note = Description of Artificial Sequence: Synthetic oligonucleotide
  source 1..19: mol_type = other RNA
taagccgtagagaaaatag

SEQ ID NO: 3812 - RNA, 19 nt, synthetic construct
  misc_feature 1..19: note = Description of Artificial Sequence: Synthetic oligonucleotide
  source 1..19: mol_type = other RNA
ctaagccgtagagaaaata

SEQ ID NO: 3813 - RNA, 19 nt, synthetic construct
  misc_feature 1..19: note = Description of Artificial Sequence: Synthetic oligonucleotide
  source 1..19: mol_type = other RNA
cctaagccgtagagaaaat

SEQ ID NO: 3814 - RNA, 19 nt, synthetic construct
  misc_feature 1..19: note = Description of Artificial Sequence: Synthetic oligonucleotide
  source 1..19: mol_type = other RNA
gcctaagccgtagagaaaa

SEQ ID NO: 3815 - RNA, 19 nt, synthetic construct
  misc_feature 1..19: note = Description of Artificial Sequence: Synthetic oligonucleotide
  source 1..19: mol_type = other RNA
agcctaagccgtagagaaa

SEQ ID NO: 3816 - RNA, 19 nt, synthetic construct
  misc_feature 1..19: note = Description of Artificial Sequence: Synthetic oligonucleotide
  source 1..19: mol_type = other RNA
tagcctaagccgtagagaa

SEQ ID NO: 3817 - RNA, 19 nt, synthetic construct
  misc_feature 1..19: note = Description of Artificial Sequence: Synthetic oligonucleotide
  source 1..19: mol_type = other RNA
atagcctaagccgtagaga

SEQ ID NO: 3818 - RNA, 19 nt, synthetic construct
  misc_feature 1..19: note = Description of Artificial Sequence: Synthetic oligonucleotide
  source 1..19: mol_type = other RNA
catagcctaagccgtagag

SEQ ID NO: 3819 - RNA, 19 nt, synthetic construct
  misc_feature 1..19: note = Description of Artificial Sequence: Synthetic oligonucleotide
  source 1..19: mol_type = other RNA
acatagcctaagccgtaga

SEQ ID NO: 3820 - RNA, 19 nt, synthetic construct
  misc_feature 1..19: note = Description of Artificial Sequence: Synthetic oligonucleotide
  source 1..19: mol_type = other RNA
cacatagcctaagccgtag

SEQ ID NO: 3821 - RNA, 19 nt, synthetic construct
  misc_feature 1..19: note = Description of Artificial Sequence: Synthetic oligonucleotide
  source 1..19: mol_type = other RNA
tcacatagcctaagccgta

SEQ ID NO: 3822 - RNA, 19 nt, synthetic construct
  misc_feature 1..19: note = Description of Artificial Sequence: Synthetic oligonucleotide
  source 1..19: mol_type = other RNA
ctcacatagcctaagccgt

SEQ ID NO: 3823 - RNA, 19 nt, synthetic construct
  misc_feature 1..19: note = Description of Artificial Sequence: Synthetic oligonucleotide
  source 1..19: mol_type = other RNA
cctcacatagcctaagccg

SEQ ID NO: 3824 - RNA, 19 nt, synthetic construct
  misc_feature 1..19: note = Description of Artificial Sequence: Synthetic oligonucleotide
  source 1..19: mol_type = other RNA
ccctcacatagcctaagcc

SEQ ID NO: 3825 - RNA, 19 nt, synthetic construct
  misc_feature 1..19: note = Description of Artificial Sequence: Synthetic oligonucleotide
  source 1..19: mol_type = other RNA
gccctcacatagcctaagc

SEQ ID NO: 3826 - RNA, 19 nt, synthetic construct
  misc_feature 1..19: note = Description of Artificial Sequence: Synthetic oligonucleotide
  source 1..19: mol_type = other RNA
tgccctcacatagcctaag

SEQ ID NO: 3827 - RNA, 19 nt, synthetic construct
  misc_feature 1..19: note = Description of Artificial Sequence: Synthetic oligonucleotide
  source 1..19: mol_type = other RNA
ttgccctcacatagcctaa

SEQ ID NO: 3828 - RNA, 19 nt, synthetic construct
  misc_feature 1..19: note = Description of Artificial Sequence: Synthetic oligonucleotide
  source 1..19: mol_type = other RNA
tttgccctcacatagccta

SEQ ID NO: 3829 - RNA, 19 nt, synthetic construct
  misc_feature 1..19: note = Description of Artificial Sequence: Synthetic oligonucleotide
  source 1..19: mol_type = other RNA
ttttgccctcacatagcct

SEQ ID NO: 3830 - RNA, 19 nt, synthetic construct
  misc_feature 1..19: note = Description of Artificial Sequence: Synthetic oligonucleotide
  source 1..19: mol_type = other RNA
gttttgccctcacatagcc

SEQ ID NO: 3831 - RNA, 19 nt, synthetic construct
  misc_feature 1..19: note = Description of Artificial Sequence: Synthetic oligonucleotide
  source 1..19: mol_type = other RNA
tgttttgccctcacatagc

SEQ ID NO: 3832 - RNA, 19 nt, synthetic construct
  misc_feature 1..19: note = Description of Artificial Sequence: Synthetic oligonucleotide
  source 1..19: mol_type = other RNA
gtgttttgccctcacatag

SEQ ID NO: 3833 - RNA, 19 nt, synthetic construct
  misc_feature 1..19: note = Description of Artificial Sequence: Synthetic oligonucleotide
  source 1..19: mol_type = other RNA
tgtgttttgccctcacata

SEQ ID NO: 3834 - RNA, 19 nt, synthetic construct
  misc_feature 1..19: note = Description of Artificial Sequence: Synthetic oligonucleotide
  source 1..19: mol_type = other RNA
ttgtgttttgccctcacat

SEQ ID NO: 3835 - RNA, 19 nt, synthetic construct
  misc_feature 1..19: note = Description of Artificial Sequence: Synthetic oligonucleotide
  source 1..19: mol_type = other RNA
tttgtgttttgccctcaca

SEQ ID NO: 3836 - RNA, 19 nt, synthetic construct
  misc_feature 1..19: note = Description of Artificial Sequence: Synthetic oligonucleotide
  source 1..19: mol_type = other RNA
atttgtgttttgccctcac

SEQ ID NO: 3837 - RNA, 19 nt, synthetic construct
  misc_feature 1..19: note = Description of Artificial Sequence: Synthetic oligonucleotide
  source 1..19: mol_type = other RNA
gatttgtgttttgccctca

SEQ ID NO: 3838 - RNA, 19 nt, synthetic construct
  misc_feature 1..19: note = Description of Artificial Sequence: Synthetic oligonucleotide
  source 1..19: mol_type = other RNA
ggatttgtgttttgccctc

SEQ ID NO: 3839 - RNA, 19 nt, synthetic construct
  misc_feature 1..19: note = Description of Artificial Sequence: Synthetic oligonucleotide
  source 1..19: mol_type = other RNA
gggatttgtgttttgccct

SEQ ID NO: 3840 - RNA, 19 nt, synthetic construct
  misc_feature 1..19: note = Description of Artificial Sequence: Synthetic oligonucleotide
  source 1..19: mol_type = other RNA
agggatttgtgttttgccc

SEQ ID NO: 3841 - RNA, 19 nt, synthetic construct
  misc_feature 1..19: note = Description of Artificial Sequence: Synthetic oligonucleotide
  source 1..19: mol_type = other RNA
aagggatttgtgttttgcc

SEQ ID NO: 3842 - RNA, 19 nt, synthetic construct
  misc_feature 1..19: note = Description of Artificial Sequence: Synthetic oligonucleotide
  source 1..19: mol_type = other RNA
aaagggatttgtgttttgc

SEQ ID NO: 3843 - RNA, 19 nt, synthetic construct
  misc_feature 1..19: note = Description of Artificial Sequence: Synthetic oligonucleotide
  source 1..19: mol_type = other RNA
caaagggatttgtgttttg

SEQ ID NO: 3844 - RNA, 19 nt, synthetic construct
  misc_feature 1..19: note = Description of Artificial Sequence: Synthetic oligonucleotide
  source 1..19: mol_type = other RNA
gcaaagggatttgtgtttt

SEQ ID NO: 3845 - RNA, 19 nt, synthetic construct
  misc_feature 1..19: note = Description of Artificial Sequence: Synthetic oligonucleotide
  source 1..19: mol_type = other RNA
agcaaagggatttgtgttt

SEQ ID NO: 3846 - RNA, 19 nt, synthetic construct
  misc_feature 1..19: note = Description of Artificial Sequence: Synthetic oligonucleotide
  source 1..19: mol_type = other RNA
tagcaaagggatttgtgtt

SEQ ID NO: 3847 - RNA, 19 nt, synthetic construct
  misc_feature 1..19: note = Description of Artificial Sequence: Synthetic oligonucleotide
  source 1..19: mol_type = other RNA
ttagcaaagggatttgtgt

SEQ ID NO: 3848 - RNA, 19 nt, synthetic construct
  misc_feature 1..19: note = Description of Artificial Sequence: Synthetic oligonucleotide
  source 1..19: mol_type = other RNA
tttagcaaagggatttgtg

SEQ ID NO: 3849 - RNA, 19 nt, synthetic construct
  misc_feature 1..19: note = Description of Artificial Sequence: Synthetic oligonucleotide
  source 1..19: mol_type = other RNA
ttttagcaaagggatttgt

SEQ ID NO: 3850 - RNA, 19 nt, synthetic construct
  misc_feature 1..19: note = Description of Artificial Sequence: Synthetic oligonucleotide
  source 1..19: mol_type = other RNA
tttttagcaaagggatttg

SEQ ID NO: 3851 - RNA, 19 nt, synthetic construct
  misc_feature 1..19: note = Description of Artificial Sequence: Synthetic oligonucleotide
  source 1..19: mol_type = other RNA
ctttttagcaaagggattt

SEQ ID NO: 3852 - RNA, 19 nt, synthetic construct
  misc_feature 1..19: note = Description of Artificial Sequence: Synthetic oligonucleotide
  source 1..19: mol_type = other RNA
tctttttagcaaagggatt

SEQ ID NO: 3853 - RNA, 19 nt, synthetic construct
  misc_feature 1..19: note = Description of Artificial Sequence: Synthetic oligonucleotide
  source 1..19: mol_type = other RNA
ttctttttagcaaagggat

SEQ ID NO: 3854 - RNA, 19 nt, synthetic construct
  misc_feature 1..19: note = Description of Artificial Sequence: Synthetic oligonucleotide
  source 1..19: mol_type = other RNA
gttctttttagcaaaggga

SEQ ID NO: 3855 - RNA, 19 nt, synthetic construct
  misc_feature 1..19: note = Description of Artificial Sequence: Synthetic oligonucleotide
  source 1..19: mol_type = other RNA
ggttctttttagcaaaggg

SEQ ID NO: 3856 - RNA, 19 nt, synthetic construct
  misc_feature 1..19: note = Description of Artificial Sequence: Synthetic oligonucleotide
  source 1..19: mol_type = other RNA
tggttctttttagcaaagg

SEQ ID NO: 3857 - RNA, 19 nt, synthetic construct
  misc_feature 1..19: note = Description of Artificial Sequence: Synthetic oligonucleotide
  source 1..19: mol_type = other RNA
atggttctttttagcaaag

SEQ ID NO: 3858 - RNA, 19 nt, synthetic construct
  misc_feature 1..19: note = Description of Artificial Sequence: Synthetic oligonucleotide
  source 1..19: mol_type = other RNA
tatggttctttttagcaaa

SEQ ID NO: 3859 - RNA, 19 nt, synthetic construct
  misc_feature 1..19: note = Description of Artificial Sequence: Synthetic oligonucleotide
  source 1..19: mol_type = other RNA
atatggttctttttagcaa

SEQ ID NO: 3860 - RNA, 19 nt, synthetic construct
  misc_feature 1..19: note = Description of Artificial Sequence: Synthetic oligonucleotide
  source 1..19: mol_type = other RNA
aatatggttctttttagca

SEQ ID NO: 3861 - RNA, 19 nt, synthetic construct
  misc_feature 1..19: note = Description of Artificial Sequence: Synthetic oligonucleotide
  source 1..19: mol_type = other RNA
taatatggttctttttagc

SEQ ID NO: 3862 - RNA, 19 nt, synthetic construct
  misc_feature 1..19: note = Description of Artificial Sequence: Synthetic oligonucleotide
  source 1..19: mol_type = other RNA
ataatatggttctttttag

SEQ ID NO: 3863 - RNA, 19 nt, synthetic construct
  misc_feature 1..19: note = Description of Artificial Sequence: Synthetic oligonucleotide
  source 1..19: mol_type = other RNA
aataatatggttcttttta

SEQ ID NO: 3864 - RNA, 19 nt, synthetic construct
  misc_feature 1..19: note = Description of Artificial Sequence: Synthetic oligonucleotide
  source 1..19: mol_type = other RNA
aaataatatggttcttttt

SEQ ID NO: 3865 - RNA, 19 nt, synthetic construct
  misc_feature 1..19: note = Description of Artificial Sequence: Synthetic oligonucleotide
  source 1..19: mol_type = other RNA
aaaataatatggttctttt

SEQ ID NO: 3866 - RNA, 19 nt, synthetic construct
  misc_feature 1..19: note = Description of Artificial Sequence: Synthetic oligonucleotide
  source 1..19: mol_type = other RNA
caaaataatatggttcttt

SEQ ID NO: 3867 - RNA, 19 nt, synthetic construct
  misc_feature 1..19: note = Description of Artificial Sequence: Synthetic oligonucleotide
  source 1..19: mol_type = other RNA
tcaaaataatatggttctt

SEQ ID NO: 3868 - RNA, 19 nt, synthetic construct
  misc_feature 1..19: note = Description of Artificial Sequence: Synthetic oligonucleotide
  source 1..19: mol_type = other RNA
atcaaaataatatggttct

SEQ ID NO: 3869 - RNA, 19 nt, synthetic construct
  misc_feature 1..19: note = Description of Artificial Sequence: Synthetic oligonucleotide
  source 1..19: mol_type = other RNA
aatcaaaataatatggttc

SEQ ID NO: 3870 - RNA, 19 nt, synthetic construct
  misc_feature 1..19: note = Description of Artificial Sequence: Synthetic oligonucleotide
  source 1..19: mol_type = other RNA
gaatcaaaataatatggtt

SEQ ID NO: 3871 - RNA, 19 nt, synthetic construct
  misc_feature 1..19: note = Description of Artificial Sequence: Synthetic oligonucleotide
  source 1..19: mol_type = other RNA
agaatcaaaataatatggt

SEQ ID NO: 3872 - RNA, 19 nt, synthetic construct
  misc_feature 1..19: note = Description of Artificial Sequence: Synthetic oligonucleotide
  source 1..19: mol_type = other RNA
gagaatcaaaataatatgg

SEQ ID NO: 3873 - RNA, 19 nt, synthetic construct
  misc_feature 1..19: note = Description of Artificial Sequence: Synthetic oligonucleotide
  source 1..19: mol_type = other RNA
tgagaatcaaaataatatg

SEQ ID NO: 3874 - RNA, 19 nt, synthetic construct
  misc_feature 1..19: note = Description of Artificial Sequence: Synthetic oligonucleotide
  source 1..19: mol_type = other RNA
ttgagaatcaaaataatat

SEQ ID NO: 3875 - RNA, 19 nt, synthetic construct
  misc_feature 1..19: note = Description of Artificial Sequence: Synthetic oligonucleotide
  source 1..19: mol_type = other RNA
tttgagaatcaaaataata

SEQ ID NO: 3876 - RNA, 19 nt, synthetic construct
  misc_feature 1..19: note = Description of Artificial Sequence: Synthetic oligonucleotide
  source 1..19: mol_type = other RNA
ctttgagaatcaaaataat

SEQ ID NO: 3877 - RNA, 19 nt, synthetic construct
  misc_feature 1..19: note = Description of Artificial Sequence: Synthetic oligonucleotide
  source 1..19: mol_type = other RNA
cctttgagaatcaaaataa

SEQ ID NO: 3878 - RNA, 19 nt, synthetic construct
  misc_feature 1..19: note = Description of Artificial Sequence: Synthetic oligonucleotide
  source 1..19: mol_type = other RNA
tcctttgagaatcaaaata

SEQ ID NO: 3879 - RNA, 19 nt, synthetic construct
  misc_feature 1..19: note = Description of Artificial Sequence: Synthetic oligonucleotide
  source 1..19: mol_type = other RNA
atcctttgagaatcaaaat

SEQ ID NO: 3880 - RNA, 19 nt, synthetic construct
  misc_feature 1..19: note = Description of Artificial Sequence: Synthetic oligonucleotide
  source 1..19: mol_type = other RNA
tatcctttgagaatcaaaa

SEQ ID NO: 3881 - RNA, 19 nt, synthetic construct
  misc_feature 1..19: note = Description of Artificial Sequence: Synthetic oligonucleotide
  source 1..19: mol_type = other RNA
ctatcctttgagaatcaaa

SEQ ID NO: 3882 - RNA, 19 nt, synthetic construct
  misc_feature 1..19: note = Description of Artificial Sequence: Synthetic oligonucleotide
  source 1..19: mol_type = other RNA
cctatcctttgagaatcaa

SEQ ID NO: 3883 - RNA, 19 nt, synthetic construct
  misc_feature 1..19: note = Description of Artificial Sequence: Synthetic oligonucleotide
  source 1..19: mol_type = other RNA
gcctatcctttgagaatca

SEQ ID NO: 3884 - RNA, 19 nt, synthetic construct
  misc_feature 1..19: note = Description of Artificial Sequence: Synthetic oligonucleotide
  source 1..19: mol_type = other RNA
ggcctatcctttgagaatc

SEQ ID NO: 3885 - RNA, 19 nt, synthetic construct
  misc_feature 1..19: note = Description of Artificial Sequence: Synthetic oligonucleotide
  source 1..19: mol_type = other RNA
aggcctatcctttgagaat

SEQ ID NO: 3886 - RNA, 19 nt, synthetic construct
  misc_feature 1..19: note = Description of Artificial Sequence: Synthetic oligonucleotide
  source 1..19: mol_type = other RNA
aaggcctatcctttgagaa

SEQ ID NO: 3887 - RNA, 19 nt, synthetic construct
  misc_feature 1..19: note = Description of Artificial Sequence: Synthetic oligonucleotide
  source 1..19: mol_type = other RNA
aaaggcctatcctttgaga

SEQ ID NO: 3888 - RNA, 19 nt, synthetic construct
  misc_feature 1..19: note = Description of Artificial Sequence: Synthetic oligonucleotide
  source 1..19: mol_type = other RNA
caaaggcctatcctttgag

SEQ ID NO: 3889 - RNA, 19 nt, synthetic construct
  misc_feature 1..19: note = Description of Artificial Sequence: Synthetic oligonucleotide
  source 1..19: mol_type = other RNA
tcaaaggcctatcctttga

SEQ ID NO: 3890 - RNA, 19 nt, synthetic construct
  misc_feature 1..19: note = Description of Artificial Sequence: Synthetic oligonucleotide
  source 1..19: mol_type = other RNA
ctcaaaggcctatcctttg

SEQ ID NO: 3891 - RNA, 19 nt, synthetic construct
  misc_feature 1..19: note = Description of Artificial Sequence: Synthetic oligonucleotide
  source 1..19: mol_type = other RNA
actcaaaggcctatccttt

SEQ ID NO: 3892 - RNA, 19 nt, synthetic construct
  misc_feature 1..19: note = Description of Artificial Sequence: Synthetic oligonucleotide
  source 1..19: mol_type = other RNA
cactcaaaggcctatcctt

SEQ ID NO: 3893 - RNA, 19 nt, synthetic construct
  misc_feature 1..19: note = Description of Artificial Sequence: Synthetic oligonucleotide
  source 1..19: mol_type = other RNA
acactcaaaggcctatcct

SEQ ID NO: 3894 - RNA, 19 nt, synthetic construct
  misc_feature 1..19: note = Description of Artificial Sequence: Synthetic oligonucleotide
  source 1..19: mol_type = other RNA
aacactcaaaggcctatcc

SEQ ID NO: 3895 - RNA, 19 nt, synthetic construct
  misc_feature 1..19: note = Description of Artificial Sequence: Synthetic oligonucleotide
  source 1..19: mol_type = other RNA
taacactcaaaggcctatc

SEQ ID NO: 3896 - RNA, 19 nt, synthetic construct
  misc_feature 1..19: note = Description of Artificial Sequence: Synthetic oligonucleotide
  source 1..19: mol_type = other RNA
ctaacactcaaaggcctat

SEQ ID NO: 3897 - RNA, 19 nt, synthetic construct
  misc_feature 1..19: note = Description of Artificial Sequence: Synthetic oligonucleotide
  source 1..19: mol_type = other RNA
tctaacactcaaaggccta

SEQ ID NO: 3898 - RNA, 19 nt, synthetic construct
  misc_feature 1..19: note = Description of Artificial Sequence: Synthetic oligonucleotide
  source 1..19: mol_type = other RNA
ctctaacactcaaaggcct

SEQ ID NO: 3899 - RNA, 19 nt, synthetic construct
  misc_feature 1..19: note = Description of Artificial Sequence: Synthetic oligonucleotide
  source 1..19: mol_type = other RNA
tctctaacactcaaaggcc

SEQ ID NO: 3900 - RNA, 19 nt, synthetic construct
  misc_feature 1..19: note = Description of Artificial Sequence: Synthetic oligonucleotide
  source 1..19: mol_type = other RNA
ttctctaacactcaaaggc

SEQ ID NO: 3901 - RNA, 19 nt, synthetic construct
  misc_feature 1..19: note = Description of Artificial Sequence: Synthetic oligonucleotide
  source 1..19: mol_type = other RNA
tttctctaacactcaaagg

SEQ ID NO: 3902 - RNA, 19 nt, synthetic construct
  misc_feature 1..19: note = Description of Artificial Sequence: Synthetic oligonucleotide
  source 1..19: mol_type = other RNA
ctttctctaacactcaaag

SEQ ID NO: 3903 - RNA, 19 nt, synthetic construct
  misc_feature 1..19: note = Description of Artificial Sequence: Synthetic oligonucleotide
  source 1..19: mol_type = other RNA
cctttctctaacactcaaa

SEQ ID NO: 3904 - RNA, 19 nt, synthetic construct
  misc_feature 1..19: note = Description of Artificial Sequence: Synthetic oligonucleotide
  source 1..19: mol_type = other RNA
tcctttctctaacactcaa

SEQ ID NO: 3905 - RNA, 19 nt, synthetic construct
  misc_feature 1..19: note = Description of Artificial Sequence: Synthetic oligonucleotide
  source 1..19: mol_type = other RNA
ctcctttctctaacactca

SEQ ID NO: 3906 - RNA, 19 nt, synthetic construct
  misc_feature 1..19: note = Description of Artificial Sequence: Synthetic oligonucleotide
  source 1..19: mol_type = other RNA
actcctttctctaacactc

SEQ ID NO: 3907 - RNA, 19 nt, synthetic construct
  misc_feature 1..19: note = Description of Artificial Sequence: Synthetic oligonucleotide
  source 1..19: mol_type = other RNA
cactcctttctctaacact

SEQ ID NO: 3908 - RNA, 19 nt, synthetic construct
  misc_feature 1..19: note = Description of Artificial Sequence: Synthetic oligonucleotide
  source 1..19: mol_type = other RNA
tcactcctttctctaacac

SEQ ID NO: 3909 - RNA, 19 nt, synthetic construct
  misc_feature 1..19: note = Description of Artificial Sequence: Synthetic oligonucleotide
  source 1..19: mol_type = other RNA
ttcactcctttctctaaca

SEQ ID NO: 3910 - RNA, 19 nt, synthetic construct
  misc_feature 1..19: note = Description of Artificial Sequence: Synthetic oligonucleotide
  source 1..19: mol_type = other RNA
cttcactcctttctctaac

SEQ ID NO: 3911 - RNA, 19 nt, synthetic construct
  misc_feature 1..19: note = Description of Artificial Sequence: Synthetic oligonucleotide
  source 1..19: mol_type = other RNA
ccttcactcctttctctaa

SEQ ID NO: 3912 - RNA, 19 nt, synthetic construct
  misc_feature 1..19: note = Description of Artificial Sequence: Synthetic oligonucleotide
  source 1..19: mol_type = other RNA
tccttcactcctttctcta

SEQ ID NO: 3913 - RNA, 19 nt, synthetic construct
  misc_feature 1..19: note = Description of Artificial Sequence: Synthetic oligonucleotide
  source 1..19: mol_type = other RNA
ctccttcactcctttctct

SEQ ID NO: 3914 - RNA, 19 nt, synthetic construct
  misc_feature 1..19: note = Description of Artificial Sequence: Synthetic oligonucleotide
  source 1..19: mol_type = other RNA
cctccttcactcctttctc

SEQ ID NO: 3915 - RNA, 19 nt, synthetic construct
  misc_feature 1..19: note = Description of Artificial Sequence: Synthetic oligonucleotide
  source 1..19: mol_type = other RNA
gcctccttcactcctttct

SEQ ID NO: 3916 - RNA, 19 nt, synthetic construct
  misc_feature 1..19: note = Description of Artificial Sequence: Synthetic oligonucleotide
  source 1..19: mol_type = other RNA
tgcctccttcactcctttc

SEQ ID NO: 3917 - RNA, 19 nt, synthetic construct
  misc_feature 1..19: note = Description of Artificial Sequence: Synthetic oligonucleotide
  source 1..19: mol_type = other RNA
ctgcctccttcactccttt

SEQ ID NO: 3918 - RNA, 19 nt, synthetic construct
  misc_feature 1..19: note = Description of Artificial Sequence: Synthetic oligonucleotide
  source 1..19: mol_type = other RNA
cctgcctccttcactcctt

SEQ ID NO: 3919 - RNA, 19 nt, synthetic construct
  misc_feature 1..19: note = Description of Artificial Sequence: Synthetic oligonucleotide
  source 1..19: mol_type = other RNA
acctgcctccttcactcct

SEQ ID NO: 3920 - RNA, 19 nt, synthetic construct
  misc_feature 1..19: note = Description of Artificial Sequence: Synthetic oligonucleotide
  source 1..19: mol_type = other RNA
cacctgcctccttcactcc

SEQ ID NO: 3921 - RNA, 19 nt, synthetic construct
  misc_feature 1..19: note = Description of Artificial Sequence: Synthetic oligonucleotide
  source 1..19: mol_type = other RNA
ccacctgcctccttcactc

SEQ ID NO: 3922 - RNA, 19 nt, synthetic construct
  misc_feature 1..19: note = Description of Artificial Sequence: Synthetic oligonucleotide
  source 1..19: mol_type = other RNA
cccacctgcctccttcact

SEQ ID NO: 3923 - RNA, 19 nt, synthetic construct
  misc_feature 1..19: note = Description of Artificial Sequence: Synthetic oligonucleotide
  source 1..19: mol_type = other RNA
tcccacctgcctccttcac

SEQ ID NO: 3924 - RNA, 19 nt, synthetic construct
  misc_feature 1..19: note = Description of Artificial Sequence: Synthetic oligonucleotide
  source 1..19: mol_type = other RNA
ttcccacctgcctccttca

SEQ ID NO: 3925 - RNA, 19 nt, synthetic construct
  misc_feature 1..19: note = Description of Artificial Sequence: Synthetic oligonucleotide
  source 1..19: mol_type = other RNA
tttcccacctgcctccttc

SEQ ID NO: 3926 - RNA, 19 nt, synthetic construct
  misc_feature 1..19: note = Description of Artificial Sequence: Synthetic oligonucleotide
  source 1..19: mol_type = other RNA
atttcccacctgcctcctt

SEQ ID NO: 3927 - RNA, 19 nt, synthetic construct
  misc_feature 1..19: note = Description of Artificial Sequence: Synthetic oligonucleotide
  source 1..19: mol_type = other RNA
catttcccacctgcctcct

SEQ ID NO: 3928 - RNA, 19 nt, synthetic construct
  misc_feature 1..19: note = Description of Artificial Sequence: Synthetic oligonucleotide
  source 1..19: mol_type = other RNA
ccatttcccacctgcctcc

SEQ ID NO: 3929 - RNA, 19 nt, synthetic construct
  misc_feature 1..19: note = Description of Artificial Sequence: Synthetic oligonucleotide
  source 1..19: mol_type = other RNA
accatttcccacctgcctc

SEQ ID NO: 3930 - RNA, 19 nt, synthetic construct
  misc_feature 1..19: note = Description of Artificial Sequence: Synthetic oligonucleotide
  source 1..19: mol_type = other RNA
taccatttcccacctgcct

SEQ ID NO: 3931 - RNA, 19 nt, synthetic construct
  misc_feature 1..19: note = Description of Artificial Sequence: Synthetic oligonucleotide
  source 1..19: mol_type = other RNA
ataccatttcccacctgcc

SEQ ID NO: 3932 - RNA, 19 nt, synthetic construct
  misc_feature 1..19: note = Description of Artificial Sequence: Synthetic oligonucleotide
  source 1..19: mol_type = other RNA
aataccatttcccacctgc

SEQ ID NO: 3933 - RNA, 19 nt, synthetic construct
  misc_feature 1..19: note = Description of Artificial Sequence: Synthetic oligonucleotide
  source 1..19: mol_type = other RNA
aaataccatttcccacctg

SEQ ID NO: 3934 - RNA, 19 nt, synthetic construct
  misc_feature 1..19: note = Description of Artificial Sequence: Synthetic oligonucleotide
  source 1..19: mol_type = other RNA
gaaataccatttcccacct

SEQ ID NO: 3935 - RNA, 19 nt, synthetic construct
  misc_feature 1..19: note = Description of Artificial Sequence: Synthetic oligonucleotide
  source 1..19: mol_type = other RNA
agaaataccatttcccacc

SEQ ID NO: 3936 - RNA, 19 nt, synthetic construct
  misc_feature 1..19: note = Description of Artificial Sequence: Synthetic oligonucleotide
  source 1..19: mol_type = other RNA
tagaaataccatttcccac

SEQ ID NO: 3937 - RNA, 19 nt, synthetic construct
  misc_feature 1..19: note = Description of Artificial Sequence: Synthetic oligonucleotide
  source 1..19: mol_type = other RNA
atagaaataccatttccca

SEQ ID NO: 3938 - RNA, 19 nt, synthetic construct
  misc_feature 1..19: note = Description of Artificial Sequence: Synthetic oligonucleotide
  source 1..19: mol_type = other RNA
aatagaaataccatttccc

SEQ ID NO: 3939 - RNA, 19 nt, synthetic construct
  misc_feature 1..19: note = Description of Artificial Sequence: Synthetic oligonucleotide
  source 1..19: mol_type = other RNA
aaatagaaataccatttcc

SEQ ID NO: 3940 - RNA, 19 nt, synthetic construct
  misc_feature 1..19: note = Description of Artificial Sequence: Synthetic oligonucleotide
  source 1..19: mol_type = other RNA
aaaatagaaataccatttc

SEQ ID NO: 3941 - RNA, 19 nt, synthetic construct
  misc_feature 1..19: note = Description of Artificial Sequence: Synthetic oligonucleotide
  source 1..19: mol_type = other RNA
aaaaatagaaataccattt

SEQ ID NO: 3942 - RNA, 19 nt, synthetic construct
  misc_feature 1..19: note = Description of Artificial Sequence: Synthetic oligonucleotide
  source 1..19: mol_type = other RNA
taaaaatagaaataccatt

SEQ ID NO: 3943 - RNA, 19 nt, synthetic construct
  misc_feature 1..19: note = Description of Artificial Sequence: Synthetic oligonucleotide
  source 1..19: mol_type = other RNA
ttaaaaatagaaataccat

SEQ ID NO: 3944 - RNA, 19 nt, synthetic construct
  misc_feature 1..19: note = Description of Artificial Sequence: Synthetic oligonucleotide
  source 1..19: mol_type = other RNA
tttaaaaatagaaatacca

SEQ ID NO: 3945 - RNA, 19 nt, synthetic construct
  misc_feature 1..19: note = Description of Artificial Sequence: Synthetic oligonucleotide
  source 1..19: mol_type = other RNA
atttaaaaatagaaatacc

SEQ ID NO: 3946 - RNA, 19 nt, synthetic construct
  misc_feature 1..19: note = Description of Artificial Sequence: Synthetic oligonucleotide
  source 1..19: mol_type = other RNA
gatttaaaaatagaaatac

SEQ ID NO: 3947 - RNA, 19 nt, synthetic construct
  misc_feature 1..19: note = Description of Artificial Sequence: Synthetic oligonucleotide
  source 1..19: mol_type = other RNA
ggatttaaaaatagaaata

SEQ ID NO: 3948 - RNA, 19 nt, synthetic construct
  misc_feature 1..19: note = Description of Artificial Sequence: Synthetic oligonucleotide
  source 1..19: mol_type = other RNA
tggatttaaaaatagaaat

SEQ ID NO: 3949 - RNA, 19 nt, synthetic construct
  misc_feature 1..19: note = Description of Artificial Sequence: Synthetic oligonucleotide
  source 1..19: mol_type = other RNA
ctggatttaaaaatagaaa

SEQ ID NO: 3950 - RNA, 19 nt, synthetic construct
  misc_feature 1..19: note = Description of Artificial Sequence: Synthetic oligonucleotide
  source 1..19: mol_type = other RNA
actggatttaaaaatagaa

SEQ ID NO: 3951 - RNA, 19 nt, synthetic construct
  misc_feature 1..19: note = Description of Artificial Sequence: Synthetic oligonucleotide
  source 1..19: mol_type = other RNA
cactggatttaaaaataga

SEQ ID NO: 3952 - RNA, 19 nt, synthetic construct
  misc_feature 1..19: note = Description of Artificial Sequence: Synthetic oligonucleotide
  source 1..19: mol_type = other RNA
tcactggatttaaaaatag

SEQ ID NO: 3953 - RNA, 19 nt, synthetic construct
  misc_feature 1..19: note = Description of Artificial Sequence: Synthetic oligonucleotide
  source 1..19: mol_type = other RNA
ttcactggatttaaaaata

SEQ ID NO: 3954 - RNA, 19 nt, synthetic construct
  misc_feature 1..19: note = Description of Artificial Sequence: Synthetic oligonucleotide
  source 1..19: mol_type = other RNA
tttcactggatttaaaaat

SEQ ID NO: 3955 - RNA, 19 nt, synthetic construct
  misc_feature 1..19: note = Description of Artificial Sequence: Synthetic oligonucleotide
  source 1..19: mol_type = other RNA
atttcactggatttaaaaa

SEQ ID NO: 3956 - RNA, 19 nt, synthetic construct
  misc_feature 1..19: note = Description of Artificial Sequence: Synthetic oligonucleotide
  source 1..19: mol_type = other RNA
aatttcactggatttaaaa

SEQ ID NO: 3957 - RNA, 19 nt, synthetic construct
  misc_feature 1..19: note = Description of Artificial Sequence: Synthetic oligonucleotide
  source 1..19: mol_type = other RNA
taatttcactggatttaaa

SEQ ID NO: 3958 - RNA, 19 nt, synthetic construct
  misc_feature 1..19: note = Description of Artificial Sequence: Synthetic oligonucleotide
  source 1..19: mol_type = other RNA
ataatttcactggatttaa

SEQ ID NO: 3959 - RNA, 19 nt, synthetic construct
  misc_feature 1..19: note = Description of Artificial Sequence: Synthetic oligonucleotide
  source 1..19: mol_type = other RNA
gataatttcactggattta

SEQ ID NO: 3960 - RNA, 19 nt, synthetic construct
  misc_feature 1..19: note = Description of Artificial Sequence: Synthetic oligonucleotide
  source 1..19: mol_type = other RNA
agataatttcactggattt

SEQ ID NO: 3961 - RNA, 19 nt, synthetic construct
  misc_feature 1..19: note = Description of Artificial Sequence: Synthetic oligonucleotide
  source 1..19: mol_type = other RNA
aagataatttcactggatt

SEQ ID NO: 3962 - RNA, 19 nt, synthetic construct
  misc_feature 1..19: note = Description of Artificial Sequence: Synthetic oligonucleotide
  source 1..19: mol_type = other RNA
caagataatttcactggat

SEQ ID NO: 3963 - RNA, 19 nt, synthetic construct
  misc_feature 1..19: note = Description of Artificial Sequence: Synthetic oligonucleotide
  source 1..19: mol_type = other RNA
tcaagataatttcactgga

SEQ ID NO: 3964 - RNA, 19 nt, synthetic construct
  misc_feature 1..19: note = Description of Artificial Sequence: Synthetic oligonucleotide
  source 1..19: mol_type = other RNA
ctcaagataatttcactgg

SEQ ID NO: 3965 - RNA, 19 nt, synthetic construct
  misc_feature 1..19: note = Description of Artificial Sequence: Synthetic oligonucleotide
  source 1..19: mol_type = other RNA
actcaagataatttcactg

SEQ ID NO: 3966 - RNA, 19 nt, synthetic construct
  misc_feature 1..19: note = Description of Artificial Sequence: Synthetic oligonucleotide
  source 1..19: mol_type = other RNA
gactcaagataatttcact

SEQ ID NO: 3967 - RNA, 19 nt, synthetic construct
  misc_feature 1..19: note = Description of Artificial Sequence: Synthetic oligonucleotide
  source 1..19: mol_type = other RNA
agactcaagataatttcac

SEQ ID NO: 3968 - RNA, 19 nt, synthetic construct
  misc_feature 1..19: note = Description of Artificial Sequence: Synthetic oligonucleotide
  source 1..19: mol_type = other RNA
tagactcaagataatttca

SEQ ID NO: 3969 - RNA, 19 nt, synthetic construct
  misc_feature 1..19: note = Description of Artificial Sequence: Synthetic oligonucleotide
  source 1..19: mol_type = other RNA
gtagactcaagataatttc

SEQ ID NO: 3970 - RNA, 19 nt, synthetic construct
  misc_feature 1..19: note = Description of Artificial Sequence: Synthetic oligonucleotide
  source 1..19: mol_type = other RNA
tgtagactcaagataattt

SEQ ID NO: 3971 - RNA, 19 nt, synthetic construct
  misc_feature 1..19: note = Description of Artificial Sequence: Synthetic oligonucleotide
  source 1..19: mol_type = other RNA
gtgtagactcaagataatt

SEQ ID NO: 3972 - RNA, 19 nt, synthetic construct
  misc_feature 1..19: note = Description of Artificial Sequence: Synthetic oligonucleotide
  source 1..19: mol_type = other RNA
tgtgtagactcaagataat

SEQ ID NO: 3973 - RNA, 19 nt, synthetic construct
  misc_feature 1..19: note = Description of Artificial Sequence: Synthetic oligonucleotide
  source 1..19: mol_type = other RNA
atgtgtagactcaagataa

SEQ ID NO: 3974 - RNA, 19 nt, synthetic construct
  misc_feature 1..19: note = Description of Artificial Sequence: Synthetic oligonucleotide
  source 1..19: mol_type = other RNA
aatgtgtagactcaagata

SEQ ID NO: 3975 - RNA, 19 nt, synthetic construct
  misc_feature 1..19: note = Description of Artificial Sequence: Synthetic oligonucleotide
  source 1..19: mol_type = other RNA
taatgtgtagactcaagat

SEQ ID NO: 3976 - RNA, 19 nt, synthetic construct
  misc_feature 1..19: note = Description of Artificial Sequence: Synthetic oligonucleotide
  source 1..19: mol_type = other RNA
ataatgtgtagactcaaga

SEQ ID NO: 3977 - RNA, 19 nt, synthetic construct
  misc_feature 1..19: note = Description of Artificial Sequence: Synthetic oligonucleotide
  source 1..19: mol_type = other RNA
aataatgtgtagactcaag

SEQ ID NO: 3978 - RNA, 19 nt, synthetic construct
  misc_feature 1..19: note = Description of Artificial Sequence: Synthetic oligonucleotide
  source 1..19: mol_type = other RNA
aaataatgtgtagactcaa

SEQ ID NO: 3979 - RNA, 19 nt, synthetic construct
  misc_feature 1..19: note = Description of Artificial Sequence: Synthetic oligonucleotide
  source 1..19: mol_type = other RNA
aaaataatgtgtagactca

SEQ ID NO: 3980 - RNA, 19 nt, synthetic construct
  misc_feature 1..19: note = Description of Artificial Sequence: Synthetic oligonucleotide
  source 1..19: mol_type = other RNA
aaaaataatgtgtagactc

SEQ ID NO: 3981 - RNA, 19 nt, synthetic construct
  misc_feature 1..19: note = Description of Artificial Sequence: Synthetic oligonucleotide
  source 1..19: mol_type = other RNA
taaaaataatgtgtagact

SEQ ID NO: 3982 - RNA, 19 nt, synthetic construct
  misc_feature 1..19: note = Description of Artificial Sequence: Synthetic oligonucleotide
  source 1..19: mol_type = other RNA
ttaaaaataatgtgtagac

SEQ ID NO: 3983 - RNA, 19 nt, synthetic construct
  misc_feature 1..19: note = Description of Artificial Sequence: Synthetic oligonucleotide
  source 1..19: mol_type = other RNA
tttaaaaataatgtgtaga

SEQ ID NO: 3984 - RNA, 19 nt, synthetic construct
  misc_feature 1..19: note = Description of Artificial Sequence: Synthetic oligonucleotide
  source 1..19: mol_type = other RNA
ttttaaaaataatgtgtag

SEQ ID NO: 3985 - RNA, 19 nt, synthetic construct
  misc_feature 1..19: note = Description of Artificial Sequence: Synthetic oligonucleotide
  source 1..19: mol_type = other RNA
gttttaaaaataatgtgta

SEQ ID NO: 3986 - RNA, 19 nt, synthetic construct
  misc_feature 1..19: note = Description of Artificial Sequence: Synthetic oligonucleotide
  source 1..19: mol_type = other RNA
tgttttaaaaataatgtgt

SEQ ID NO: 3987 - RNA, 19 nt, synthetic construct
  misc_feature 1..19: note = Description of Artificial Sequence: Synthetic oligonucleotide
  source 1..19: mol_type = other RNA
gtgttttaaaaataatgtg

SEQ ID NO: 3988 - RNA, 19 nt, synthetic construct
  misc_feature 1..19: note = Description of Artificial Sequence: Synthetic oligonucleotide
  source 1..19: mol_type = other RNA
tgtgttttaaaaataatgt

SEQ ID NO: 3989 - RNA, 19 nt, synthetic construct
  misc_feature 1..19: note = Description of Artificial Sequence: Synthetic oligonucleotide
  source 1..19: mol_type = other RNA
ttgtgttttaaaaataatg

SEQ ID NO: 3990 - RNA, 19 nt, synthetic construct
  misc_feature 1..19: note = Description of Artificial Sequence: Synthetic oligonucleotide
  source 1..19: mol_type = other RNA
tttgtgttttaaaaataat

SEQ ID NO: 3991 - RNA, 19 nt, synthetic construct
  misc_feature 1..19: note = Description of Artificial Sequence: Synthetic oligonucleotide
  source 1..19: mol_type = other RNA
ttttgtgttttaaaaataa

SEQ ID NO: 3992 - RNA, 19 nt, synthetic construct
  misc_feature 1..19: note = Description of Artificial Sequence: Synthetic oligonucleotide
  source 1..19: mol_type = other RNA
tttttgtgttttaaaaata

SEQ ID NO: 3993 - RNA, 19 nt, synthetic construct
  misc_feature 1..19: note = Description of Artificial Sequence: Synthetic oligonucleotide
  source 1..19: mol_type = other RNA
atttttgtgttttaaaaat

SEQ ID NO: 3994 - RNA, 19 nt, synthetic construct
  misc_feature 1..19: note = Description of Artificial Sequence: Synthetic oligonucleotide
  source 1..19: mol_type = other RNA
aatttttgtgttttaaaaa

SEQ ID NO: 3995 - RNA, 19 nt, synthetic construct
  misc_feature 1..19: note = Description of Artificial Sequence: Synthetic oligonucleotide
  source 1..19: mol_type = other RNA
caatttttgtgttttaaaa

SEQ ID NO: 3996 - RNA, 19 nt, synthetic construct
  misc_feature 1..19: note = Description of Artificial Sequence: Synthetic oligonucleotide
  source 1..19: mol_type = other RNA
acaatttttgtgttttaaa

SEQ ID NO: 3997 - RNA, 19 nt, synthetic construct
  misc_feature 1..19: note = Description of Artificial Sequence: Synthetic oligonucleotide
  source 1..19: mol_type = other RNA
aacaatttttgtgttttaa

SEQ ID NO: 3998 - RNA, 19 nt, synthetic construct
  misc_feature 1..19: note = Description of Artificial Sequence: Synthetic oligonucleotide
  source 1..19: mol_type = other RNA
gaacaatttttgtgtttta

SEQ ID NO: 3999 - RNA, 19 nt, synthetic construct
  misc_feature 1..19: note = Description of Artificial Sequence: Synthetic oligonucleotide
  source 1..19: mol_type = other RNA
cgaacaatttttgtgtttt

SEQ ID NO: 4000 - RNA, 19 nt, synthetic construct
  misc_feature 1..19: note = Description of Artificial Sequence: Synthetic oligonucleotide
  source 1..19: mol_type = other RNA
ccgaacaatttttgtgttt

SEQ ID NO: 4001 - RNA, 19 nt, synthetic construct
  misc_feature 1..19: note = Description of Artificial Sequence: Synthetic oligonucleotide
  source 1..19: mol_type = other RNA
gccgaacaatttttgtgtt

SEQ ID NO: 4002 - RNA, 19 nt, synthetic construct
  misc_feature 1..19: note = Description of Artificial Sequence: Synthetic oligonucleotide
  source 1..19: mol_type = other RNA
agccgaacaatttttgtgt

SEQ ID NO: 4003 - RNA, 19 nt, synthetic construct
  misc_feature 1..19: note = Description of Artificial Sequence: Synthetic oligonucleotide
  source 1..19: mol_type = other RNA
cagccgaacaatttttgtg

SEQ ID NO: 4004 - RNA, 19 nt, synthetic construct
  misc_feature 1..19: note = Description of Artificial Sequence: Synthetic oligonucleotide
  source 1..19: mol_type = other RNA
ccagccgaacaatttttgt

SEQ ID NO: 4005 - RNA, 19 nt, synthetic construct
  misc_feature 1..19: note = Description of Artificial Sequence: Synthetic oligonucleotide
  source 1..19: mol_type = other RNA
tccagccgaacaatttttg

SEQ ID NO: 4006 - RNA, 19 nt, synthetic construct
  misc_feature 1..19: note = Description of Artificial Sequence: Synthetic oligonucleotide
  source 1..19: mol_type = other RNA
ttccagccgaacaattttt

SEQ ID NO: 4007 - RNA, 19 nt, synthetic construct
  misc_feature 1..19: note = Description of Artificial Sequence: Synthetic oligonucleotide
  source 1..19: mol_type = other RNA
gttccagccgaacaatttt

SEQ ID NO: 4008 - RNA, 19 nt, synthetic construct
  misc_feature 1..19: note = Description of Artificial Sequence: Synthetic oligonucleotide
  source 1..19: mol_type = other RNA
agttccagccgaacaattt

SEQ ID NO: 4009 - RNA, 19 nt, synthetic construct
  misc_feature 1..19: note = Description of Artificial Sequence: Synthetic oligonucleotide
  source 1..19: mol_type = other RNA
cagttccagccgaacaatt

SEQ ID NO: 4010 - RNA, 19 nt, synthetic construct
  misc_feature 1..19: note = Description of Artificial Sequence: Synthetic oligonucleotide
  source 1..19: mol_type = other RNA
tcagttccagccgaacaat

SEQ ID NO: 4011 - RNA, 19 nt, synthetic construct
  misc_feature 1..19: note = Description of Artificial Sequence: Synthetic oligonucleotide
  source 1..19: mol_type = other RNA
gtcagttccagccgaacaa

SEQ ID NO: 4012 - RNA, 19 nt, synthetic construct
  misc_feature 1..19: note = Description of Artificial Sequence: Synthetic oligonucleotide
  source 1..19: mol_type = other RNA
ggtcagttccagccgaaca

SEQ ID NO: 4013 - RNA, 19 nt, synthetic construct
  misc_feature 1..19: note = Description of Artificial Sequence: Synthetic oligonucleotide
  source 1..19: mol_type = other RNA
gggtcagttccagccgaac

SEQ ID NO: 4014 - RNA, 19 nt, synthetic construct
  misc_feature 1..19: note = Description of Artificial Sequence: Synthetic oligonucleotide
  source 1..19: mol_type = other RNA
tgggtcagttccagccgaa

SEQ ID NO: 4015 - RNA, 19 nt, synthetic construct
  misc_feature 1..19: note = Description of Artificial Sequence: Synthetic oligonucleotide
  source 1..19: mol_type = other RNA
ctgggtcagttccagccga

SEQ ID NO: 4016 - RNA, 19 nt, synthetic construct
  misc_feature 1..19: note = Description of Artificial Sequence: Synthetic oligonucleotide
  source 1..19: mol_type = other RNA
cctgggtcagttccagccg

SEQ ID NO: 4017 - RNA, 19 nt, synthetic construct
  misc_feature 1..19: note = Description of Artificial Sequence: Synthetic oligonucleotide
  source 1..19: mol_type = other RNA
gcctgggtcagttccagcc

SEQ ID NO: 4018 - RNA, 19 nt, synthetic construct
  misc_feature 1..19: note = Description of Artificial Sequence: Synthetic oligonucleotide
  source 1..19: mol_type = other RNA
agcctgggtcagttccagc

SEQ ID NO: 4019 - RNA, 19 nt, synthetic construct
  misc_feature 1..19: note = Description of Artificial Sequence: Synthetic oligonucleotide
  source 1..19: mol_type = other RNA
cagcctgggtcagttccag

SEQ ID NO: 4020 - RNA, 19 nt, synthetic construct
  misc_feature 1..19: note = Description of Artificial Sequence: Synthetic oligonucleotide
  source 1..19: mol_type = other RNA
ccagcctgggtcagttcca

SEQ ID NO: 4021 - RNA, 19 nt, synthetic construct
  misc_feature 1..19: note = Description of Artificial Sequence: Synthetic oligonucleotide
  source 1..19: mol_type = other RNA
tccagcctgggtcagttcc

SEQ ID NO: 4022 - RNA, 19 nt, synthetic construct
  misc_feature 1..19: note = Description of Artificial Sequence: Synthetic oligonucleotide
  source 1..19: mol_type = other RNA
gtccagcctgggtcagttc

SEQ ID NO: 4023 - RNA, 19 nt, synthetic construct
  misc_feature 1..19: note = Description of Artificial Sequence: Synthetic oligonucleotide
  source 1..19: mol_type = other RNA
agtccagcctgggtcagtt

SEQ ID NO: 4024 - RNA, 19 nt, synthetic construct
  misc_feature 1..19: note = Description of Artificial Sequence: Synthetic oligonucleotide
  source 1..19: mol_type = other RNA
aagtccagcctgggtcagt

SEQ ID NO: 4025 - RNA, 19 nt, synthetic construct
  misc_feature 1..19: note = Description of Artificial Sequence: Synthetic oligonucleotide
  source 1..19: mol_type = other RNA
caagtccagcctgggtcag

SEQ ID NO: 4026 - RNA, 19 nt, synthetic construct
  misc_feature 1..19: note = Description of Artificial Sequence: Synthetic oligonucleotide
  source 1..19: mol_type = other RNA
gcaagtccagcctgggtca

SEQ ID NO: 4027 - RNA, 19 nt, synthetic construct
  misc_feature 1..19: note = Description of Artificial Sequence: Synthetic oligonucleotide
  source 1..19: mol_type = other RNA
cgcaagtccagcctgggtc

SEQ ID NO: 4028 - RNA, 19 nt, synthetic construct
  misc_feature 1..19: note = Description of Artificial Sequence: Synthetic oligonucleotide
  source 1..19: mol_type = other RNA
ccgcaagtccagcctgggt

SEQ ID NO: 4029 - RNA, 19 nt, synthetic construct
  misc_feature 1..19: note = Description of Artificial Sequence: Synthetic oligonucleotide
  source 1..19: mol_type = other RNA
cccgcaagtccagcctggg

SEQ ID NO: 4030 - RNA, 19 nt, synthetic construct
  misc_feature 1..19: note = Description of Artificial Sequence: Synthetic oligonucleotide
  source 1..19: mol_type = other RNA
ccccgcaagtccagcctgg

SEQ ID NO: 4031 - RNA, 19 nt, synthetic construct
  misc_feature 1..19: note = Description of Artificial Sequence: Synthetic oligonucleotide
  source 1..19: mol_type = other RNA
tccccgcaagtccagcctg

SEQ ID NO: 4032 - RNA, 19 nt, synthetic construct
  misc_feature 1..19: note = Description of Artificial Sequence: Synthetic oligonucleotide
  source 1..19: mol_type = other RNA
ctccccgcaagtccagcct

SEQ ID NO: 4033 - RNA, 19 nt, synthetic construct
  misc_feature 1..19: note = Description of Artificial Sequence: Synthetic oligonucleotide
  source 1..19: mol_type = other RNA
cctccccgcaagtccagcc

SEQ ID NO: 4034 - RNA, 19 nt, synthetic construct
  misc_feature 1..19: note = Description of Artificial Sequence: Synthetic oligonucleotide
  source 1..19: mol_type = other RNA
tcctccccgcaagtccagc

SEQ ID NO: 4035 - RNA, 19 nt, synthetic construct
  misc_feature 1..19: note = Description of Artificial Sequence: Synthetic oligonucleotide
  source 1..19: mol_type = other RNA
ttcctccccgcaagtccag

SEQ ID NO: 4036 - RNA, 19 nt, synthetic construct
  misc_feature 1..19: note = Description of Artificial Sequence: Synthetic oligonucleotide
  source 1..19: mol_type = other RNA
tttcctccccgcaagtcca

SEQ ID NO: 4037 - RNA, 19 nt, synthetic construct
  misc_feature 1..19: note = Description of Artificial Sequence: Synthetic oligonucleotide
  source 1..19: mol_type = other RNA
gtttcctccccgcaagtcc

SEQ ID NO: 4038 - RNA, 19 nt, synthetic construct
  misc_feature 1..19: note = Description of Artificial Sequence: Synthetic oligonucleotide
  source 1..19: mol_type = other RNA
agtttcctccccgcaagtc

SEQ ID NO: 4039 - RNA, 19 nt, synthetic construct
  misc_feature 1..19: note = Description of Artificial Sequence: Synthetic oligonucleotide
  source 1..19: mol_type = other RNA
gagtttcctccccgcaagt

SEQ ID NO: 4040 - RNA, 19 nt, synthetic construct
  misc_feature 1..19: note = Description of Artificial Sequence: Synthetic oligonucleotide
  source 1..19: mol_type = other RNA
ggagtttcctccccgcaag

SEQ ID NO: 4041 - RNA, 19 nt, synthetic construct
  misc_feature 1..19: note = Description of Artificial Sequence: Synthetic oligonucleotide
  source 1..19: mol_type = other RNA
tggagtttcctccccgcaa

SEQ ID NO: 4042 - RNA, 19 nt, synthetic construct
  misc_feature 1..19: note = Description of Artificial Sequence: Synthetic oligonucleotide
  source 1..19: mol_type = other RNA
ctggagtttcctccccgca

SEQ ID NO: 4043 - RNA, 19 nt, synthetic construct
  misc_feature 1..19: note = Description of Artificial Sequence: Synthetic oligonucleotide
  source 1..19: mol_type = other RNA
cctggagtttcctccccgc

SEQ ID NO: 4044 - RNA, 19 nt, synthetic construct
  misc_feature 1..19: note = Description of Artificial Sequence: Synthetic oligonucleotide
  source 1..19: mol_type = other RNA
ccctggagtttcctccccg

SEQ ID NO: 4045 - RNA, 19 nt, synthetic construct
  misc_feature 1..19: note = Description of Artificial Sequence: Synthetic oligonucleotide
  source 1..19: mol_type = other RNA
gccctggagtttcctcccc

SEQ ID NO: 4046 - RNA, 19 nt, synthetic construct
  misc_feature 1..19: note = Description of Artificial Sequence: Synthetic oligonucleotide
  source 1..19: mol_type = other RNA
tgccctggagtttcctccc

SEQ ID NO: 4047 - RNA, 19 nt, synthetic construct
  misc_feature 1..19: note = Description of Artificial Sequence: Synthetic oligonucleotide
  source 1..19: mol_type = other RNA
gtgccctggagtttcctcc

SEQ ID NO: 4048 - RNA, 19 nt, synthetic construct
  misc_feature 1..19: note = Description of Artificial Sequence: Synthetic oligonucleotide
  source 1..19: mol_type = other RNA
agtgccctggagtttcctc

SEQ ID NO: 4049 - RNA, 19 nt, synthetic construct
  misc_feature 1..19: note = Description of Artificial Sequence: Synthetic oligonucleotide
  source 1..19: mol_type = other RNA
cagtgccctggagtttcct

SEQ ID NO: 4050 - RNA, 19 nt, synthetic construct
  misc_feature 1..19: note = Description of Artificial Sequence: Synthetic oligonucleotide
  source 1..19: mol_type = other RNA
gcagtgccctggagtttcc

SEQ ID NO: 4051 - RNA, 19 nt, synthetic construct
  misc_feature 1..19: note = Description of Artificial Sequence: Synthetic oligonucleotide
  source 1..19: mol_type = other RNA
tgcagtgccctggagtttc

SEQ ID NO: 4052 - RNA, 19 nt, synthetic construct
  misc_feature 1..19: note = Description of Artificial Sequence: Synthetic oligonucleotide
  source 1..19: mol_type = other RNA
atgcagtgccctggagttt

SEQ ID NO: 4053 - RNA, 19 nt, synthetic construct
  misc_feature 1..19: note = Description of Artificial Sequence: Synthetic oligonucleotide
  source 1..19: mol_type = other RNA
gatgcagtgccctggagtt

SEQ ID NO: 4054 - RNA, 19 nt, synthetic construct
  misc_feature 1..19: note = Description of Artificial Sequence: Synthetic oligonucleotide
  source 1..19: mol_type = other RNA
agatgcagtgccctggagt

SEQ ID NO: 4055 - RNA, 19 nt, synthetic construct
  misc_feature 1..19: note = Description of Artificial Sequence: Synthetic oligonucleotide
  source 1..19: mol_type = other RNA
cagatgcagtgccctggag

SEQ ID NO: 4056 - RNA, 19 nt, synthetic construct
  misc_feature 1..19: note = Description of Artificial Sequence: Synthetic oligonucleotide
  source 1..19: mol_type = other RNA
ccagatgcagtgccctgga

SEQ ID NO: 4057 - RNA, 19 nt, synthetic construct
  misc_feature 1..19: note = Description of Artificial Sequence: Synthetic oligonucleotide
  source 1..19: mol_type = other RNA
gccagatgcagtgccctgg

SEQ ID NO: 4058 - RNA, 19 nt, synthetic construct
  misc_feature 1..19: note = Description of Artificial Sequence: Synthetic oligonucleotide
  source 1..19: mol_type = other RNA
cgccagatgcagtgccctg

SEQ ID NO: 4059 - RNA, 19 nt, synthetic construct
  misc_feature 1..19: note = Description of Artificial Sequence: Synthetic oligonucleotide
  source 1..19: mol_type = other RNA
tcgccagatgcagtgccct

SEQ ID NO: 4060 - RNA, 19 nt, synthetic construct
  misc_feature 1..19: note = Description of Artificial Sequence: Synthetic oligonucleotide
  source 1..19: mol_type = other RNA
atcgccagatgcagtgccc

SEQ ID NO: 4061 - RNA, 19 nt, synthetic construct
  misc_feature 1..19: note = Description of Artificial Sequence: Synthetic oligonucleotide
  source 1..19: mol_type = other RNA
gatcgccagatgcagtgcc

SEQ ID NO: 4062 - RNA, 19 nt, synthetic construct
  misc_feature 1..19: note = Description of Artificial Sequence: Synthetic oligonucleotide
  source 1..19: mol_type = other RNA
tgatcgccagatgcagtgc

SEQ ID NO: 4063 - RNA, 19 nt, synthetic construct
  misc_feature 1..19: note = Description of Artificial Sequence: Synthetic oligonucleotide
  source 1..19: mol_type = other RNA
ctgatcgccagatgcagtg

SEQ ID NO: 4064 - RNA, 19 nt, synthetic construct
  misc_feature 1..19: note = Description of Artificial Sequence: Synthetic oligonucleotide
  source 1..19: mol_type = other RNA
tctgatcgccagatgcagt

SEQ ID NO: 4065 - RNA, 19 nt, synthetic construct
  misc_feature 1..19: note = Description of Artificial Sequence: Synthetic oligonucleotide
  source 1..19: mol_type = other RNA
gtctgatcgccagatgcag

SEQ ID NO: 4066 - RNA, 19 nt, synthetic construct
  misc_feature 1..19: note = Description of Artificial Sequence: Synthetic oligonucleotide
  source 1..19: mol_type = other RNA
agtctgatcgccagatgca

SEQ ID NO: 4067 - RNA, 19 nt, synthetic construct
  misc_feature 1..19: note = Description of Artificial Sequence: Synthetic oligonucleotide
  source 1..19: mol_type = other RNA
gagtctgatcgccagatgc

SEQ ID NO: 4068 - RNA, 19 nt, synthetic construct
  misc_feature 1..19: note = Description of Artificial Sequence: Synthetic oligonucleotide
  source 1..19: mol_type = other RNA
agagtctgatcgccagatg

SEQ ID NO: 4069 - RNA, 19 nt, synthetic construct
  misc_feature 1..19: note = Description of Artificial Sequence: Synthetic oligonucleotide
  source 1..19: mol_type = other RNA
cagagtctgatcgccagat

SEQ ID NO: 4070 - RNA, 19 nt, synthetic construct
  misc_feature 1..19: note = Description of Artificial Sequence: Synthetic oligonucleotide
  source 1..19: mol_type = other RNA
tcagagtctgatcgccaga

SEQ ID NO: 4071 - RNA, 19 nt, synthetic construct
  misc_feature 1..19: note = Description of Artificial Sequence: Synthetic oligonucleotide
  source 1..19: mol_type = other RNA
ctcagagtctgatcgccag

SEQ ID NO: 4072 - RNA, 19 nt, synthetic construct
  misc_feature 1..19: note = Description of Artificial Sequence: Synthetic oligonucleotide
  source 1..19: mol_type = other RNA
gctcagagtctgatcgcca

SEQ ID NO: 4073 - RNA, 19 nt, synthetic construct
  misc_feature 1..19: note = Description of Artificial Sequence: Synthetic oligonucleotide
  source 1..19: mol_type = other RNA
tgctcagagtctgatcgcc

SEQ ID NO: 4074 - RNA, 19 nt, synthetic construct
  misc_feature 1..19: note = Description of Artificial Sequence: Synthetic oligonucleotide
  source 1..19: mol_type = other RNA
gtgctcagagtctgatcgc

SEQ ID NO: 4075 - RNA, 19 nt, synthetic construct
  misc_feature 1..19: note = Description of Artificial Sequence: Synthetic oligonucleotide
  source 1..19: mol_type = other RNA
agtgctcagagtctgatcg

SEQ ID NO: 4076 - RNA, 19 nt, synthetic construct
  misc_feature 1..19: note = Description of Artificial Sequence: Synthetic oligonucleotide
  source 1..19: mol_type = other RNA
cagtgctcagagtctgatc

SEQ ID NO: 4077 - RNA, 19 nt, synthetic construct
  misc_feature 1..19: note = Description of Artificial Sequence: Synthetic oligonucleotide
  source 1..19: mol_type = other RNA
gcagtgctcagagtctgat

SEQ ID NO: 4078 - RNA, 19 nt, synthetic construct
  misc_feature 1..19: note = Description of Artificial Sequence: Synthetic oligonucleotide
  source 1..19: mol_type = other RNA
ggcagtgctcagagtctga

SEQ ID NO: 4079 - RNA, 19 nt, synthetic construct
  misc_feature 1..19: note = Description of Artificial Sequence: Synthetic oligonucleotide
  source 1..19: mol_type = other RNA
gggcagtgctcagagtctg

SEQ ID NO: 4080 - RNA, 19 nt, synthetic construct
  misc_feature 1..19: note = Description of Artificial Sequence: Synthetic oligonucleotide
  source 1..19: mol_type = other RNA
ggggcagtgctcagagtct

SEQ ID NO: 4081 - RNA, 19 nt, synthetic construct
  misc_feature 1..19: note = Description of Artificial Sequence: Synthetic oligonucleotide
  source 1..19: mol_type = other RNA
aggggcagtgctcagagtc

SEQ ID NO: 4082 - RNA, 19 nt, synthetic construct
  misc_feature 1..19: note = Description of Artificial Sequence: Synthetic oligonucleotide
  source 1..19: mol_type = other RNA
caggggcagtgctcagagt

SEQ ID NO: 4083 - RNA, 19 nt, synthetic construct
  misc_feature 1..19: note = Description of Artificial Sequence: Synthetic oligonucleotide
  source 1..19: mol_type = other RNA
gcaggggcagtgctcagag

SEQ ID NO: 4084 - RNA, 19 nt, synthetic construct
  misc_feature 1..19: note = Description of Artificial Sequence: Synthetic oligonucleotide
  source 1..19: mol_type = other RNA
agcaggggcagtgctcaga

SEQ ID NO: 4085 - RNA, 19 nt, synthetic construct
  misc_feature 1..19: note = Description of Artificial Sequence: Synthetic oligonucleotide
  source 1..19: mol_type = other RNA
gagcaggggcagtgctcag

SEQ ID NO: 4086 - RNA, 19 nt, synthetic construct
  misc_feature 1..19: note = Description of Artificial Sequence: Synthetic oligonucleotide
  source 1..19: mol_type = other RNA
cgagcaggggcagtgctca

SEQ ID NO: 4087 - RNA, 19 nt, synthetic construct
  misc_feature 1..19: note = Description of Artificial Sequence: Synthetic oligonucleotide
  source 1..19: mol_type = other RNA
gcgagcaggggcagtgctc

SEQ ID NO: 4088 - RNA, 19 nt, synthetic construct
  misc_feature 1..19: note = Description of Artificial Sequence: Synthetic oligonucleotide
  source 1..19: mol_type = other RNA
ggcgagcaggggcagtgct

SEQ ID NO: 4089 - RNA, 19 nt, synthetic construct
  misc_feature 1..19: note = Description of Artificial Sequence: Synthetic oligonucleotide
  source 1..19: mol_type = other RNA
aggcgagcaggggcagtgc

SEQ ID NO: 4090 - RNA, 19 nt, synthetic construct
  misc_feature 1..19: note = Description of Artificial Sequence: Synthetic oligonucleotide
  source 1..19: mol_type = other RNA
aaggcgagcaggggcagtg

SEQ ID NO: 4091 - RNA, 19 nt, synthetic construct
  misc_feature 1..19: note = Description of Artificial Sequence: Synthetic oligonucleotide
  source 1..19: mol_type = other RNA
caaggcgagcaggggcagt

SEQ ID NO: 4092 - RNA, 19 nt, synthetic construct
  misc_feature 1..19: note = Description of Artificial Sequence: Synthetic oligonucleotide
  source 1..19: mol_type = other RNA
ccaaggcgagcaggggcag

SEQ ID NO: 4093 - RNA, 19 nt, synthetic construct
  misc_feature 1..19: note = Description of Artificial Sequence: Synthetic oligonucleotide
  source 1..19: mol_type = other RNA
accaaggcgagcaggggca

SEQ ID NO: 4094 - RNA, 19 nt, synthetic construct
  misc_feature 1..19: note = Description of Artificial Sequence: Synthetic oligonucleotide
  source 1..19: mol_type = other RNA
gaccaaggcgagcaggggc

SEQ ID NO: 4095 - RNA, 19 nt, synthetic construct
  misc_feature 1..19: note = Description of Artificial Sequence: Synthetic oligonucleotide
  source 1..19: mol_type = other RNA
tgaccaaggcgagcagggg

SEQ ID NO: 4096 - RNA, 19 nt, synthetic construct
  misc_feature 1..19: note = Description of Artificial Sequence: Synthetic oligonucleotide
  source 1..19: mol_type = other RNA
atgaccaaggcgagcaggg

SEQ ID NO: 4097 - RNA, 19 nt, synthetic construct
  misc_feature 1..19: note = Description of Artificial Sequence: Synthetic oligonucleotide
  source 1..19: mol_type = other RNA
catgaccaaggcgagcagg

SEQ ID NO: 4098 - RNA, 19 nt, synthetic construct
  misc_feature 1..19: note = Description of Artificial Sequence: Synthetic oligonucleotide
  source 1..19: mol_type = other RNA
acatgaccaaggcgagcag

SEQ ID NO: 4099 - RNA, 19 nt, synthetic construct
  misc_feature 1..19: note = Description of Artificial Sequence: Synthetic oligonucleotide
  source 1..19: mol_type = other RNA
tacatgaccaaggcgagca

SEQ ID NO: 4100 - RNA, 19 nt, synthetic construct
  misc_feature 1..19: note = Description of Artificial Sequence: Synthetic oligonucleotide
  source 1..19: mol_type = other RNA
gtacatgaccaaggcgagc

SEQ ID NO: 4101 - RNA, 19 nt, synthetic construct
  misc_feature 1..19: note = Description of Artificial Sequence: Synthetic oligonucleotide
  source 1..19: mol_type = other RNA
tgtacatgaccaaggcgag

SEQ ID NO: 4102 - RNA, 19 nt, synthetic construct
  misc_feature 1..19: note = Description of Artificial Sequence: Synthetic oligonucleotide
  source 1..19: mol_type = other RNA
ctgtacatgaccaaggcga

SEQ ID NO: 4103 - RNA, 19 nt, synthetic construct
  misc_feature 1..19: note = Description of Artificial Sequence: Synthetic oligonucleotide
  source 1..19: mol_type = other RNA
gctgtacatgaccaaggcg

SEQ ID NO: 4104 - RNA, 19 nt, synthetic construct
  misc_feature 1..19: note = Description of Artificial Sequence: Synthetic oligonucleotide
  source 1..19: mol_type = other RNA
tgctgtacatgaccaaggc

SEQ ID NO: 4105 - RNA, 19 nt, synthetic construct
  misc_feature 1..19: note = Description of Artificial Sequence: Synthetic oligonucleotide
  source 1..19: mol_type = other RNA
gtgctgtacatgaccaagg

SEQ ID NO: 4106 - RNA, 19 nt, synthetic construct
  misc_feature 1..19: note = Description of Artificial Sequence: Synthetic oligonucleotide
  source 1..19: mol_type = other RNA
agtgctgtacatgaccaag

SEQ ID NO: 4107 - RNA, 19 nt, synthetic construct
  misc_feature 1..19: note = Description of Artificial Sequence: Synthetic oligonucleotide
  source 1..19: mol_type = other RNA
cagtgctgtacatgaccaa

SEQ ID NO: 4108 - RNA, 19 nt, synthetic construct
  misc_feature 1..19: note = Description of Artificial Sequence: Synthetic oligonucleotide
  source 1..19: mol_type = other RNA
tcagtgctgtacatgacca

SEQ ID NO: 4109 - RNA, 19 nt, synthetic construct
  misc_feature 1..19: note = Description of Artificial Sequence: Synthetic oligonucleotide
  source 1..19: mol_type = other RNA
ttcagtgctgtacatgacc

SEQ ID NO: 4110 - RNA, 19 nt, synthetic construct
  misc_feature 1..19: note = Description of Artificial Sequence: Synthetic oligonucleotide
  source 1..19: mol_type = other RNA
tttcagtgctgtacatgac

SEQ ID NO: 4111 - RNA, 19 nt, synthetic construct
  misc_feature 1..19: note = Description of Artificial Sequence: Synthetic oligonucleotide
  source 1..19: mol_type = other RNA
ctttcagtgctgtacatga

SEQ ID NO: 4112 - RNA, 19 nt, synthetic construct
  misc_feature 1..19: note = Description of Artificial Sequence: Synthetic oligonucleotide
  source 1..19: mol_type = other RNA
cctttcagtgctgtacatg

SEQ ID NO: 4113 - RNA, 19 nt, synthetic construct
  misc_feature 1..19: note = Description of Artificial Sequence: Synthetic oligonucleotide
  source 1..19: mol_type = other RNA
tcctttcagtgctgtacat

SEQ ID NO: 4114 - RNA, 19 nt, synthetic construct
  misc_feature 1..19: note = Description of Artificial Sequence: Synthetic oligonucleotide
  source 1..19: mol_type = other RNA
ttcctttcagtgctgtaca

SEQ ID NO: 4115 - RNA, 19 nt, synthetic construct
  misc_feature 1..19: note = Description of Artificial Sequence: Synthetic oligonucleotide
  source 1..19: mol_type = other RNA
attcctttcagtgctgtac

SEQ ID NO: 4116 - RNA, 19 nt, synthetic construct
  misc_feature 1..19: note = Description of Artificial Sequence: Synthetic oligonucleotide
  source 1..19: mol_type = other RNA
cattcctttcagtgctgta

SEQ ID NO: 4117 - RNA, 19 nt, synthetic construct
  misc_feature 1..19: note = Description of Artificial Sequence: Synthetic oligonucleotide
  source 1..19: mol_type = other RNA
tcattcctttcagtgctgt

SEQ ID NO: 4118 - RNA, 19 nt, synthetic construct
  misc_feature 1..19: note = Description of Artificial Sequence: Synthetic oligonucleotide
  source 1..19: mol_type = other RNA
ttcattcctttcagtgctg

SEQ ID NO: 4119 - RNA, 19 nt, synthetic construct
  misc_feature 1..19: note = Description of Artificial Sequence: Synthetic oligonucleotide
  source 1..19: mol_type = other RNA
cttcattcctttcagtgct

SEQ ID NO: 4120 - RNA, 19 nt, synthetic construct
  misc_feature 1..19: note = Description of Artificial Sequence: Synthetic oligonucleotide
  source 1..19: mol_type = other RNA
gcttcattcctttcagtgc

SEQ ID NO: 4121 - RNA, 19 nt, synthetic construct
  misc_feature 1..19: note = Description of Artificial Sequence: Synthetic oligonucleotide
  source 1..19: mol_type = other RNA
tgcttcattcctttcagtg

SEQ ID NO: 4122 - RNA, 19 nt, synthetic construct
  misc_feature 1..19: note = Description of Artificial Sequence: Synthetic oligonucleotide
  source 1..19: mol_type = other RNA
gtgcttcattcctttcagt

SEQ ID NO: 4123 - RNA, 19 nt, synthetic construct
  misc_feature 1..19: note = Description of Artificial Sequence: Synthetic oligonucleotide
  source 1..19: mol_type = other RNA
ggtgcttcattcctttcag

SEQ ID NO: 4124 - RNA, 19 nt, synthetic construct
  misc_feature 1..19: note = Description of Artificial Sequence: Synthetic oligonucleotide
  source 1..19: mol_type = other RNA
tggtgcttcattcctttca

SEQ ID NO: 4125 - RNA, 19 nt, synthetic construct
  misc_feature 1..19: note = Description of Artificial Sequence: Synthetic oligonucleotide
  source 1..19: mol_type = other RNA
ctggtgcttcattcctttc

SEQ ID NO: 4126 - RNA, 19 nt, synthetic construct
  misc_feature 1..19: note = Description of Artificial Sequence: Synthetic oligonucleotide
  source 1..19: mol_type = other RNA
gctggtgcttcattccttt

SEQ ID NO: 4127 - RNA, 19 nt, synthetic construct
  misc_feature 1..19: note = Description of Artificial Sequence: Synthetic oligonucleotide
  source 1..19: mol_type = other RNA
tgctggtgcttcattcctt

SEQ ID NO: 4128 - RNA, 19 nt, synthetic construct
  misc_feature 1..19: note = Description of Artificial Sequence: Synthetic oligonucleotide
  source 1..19: mol_type = other RNA
ctgctggtgcttcattcct

SEQ ID NO: 4129 - RNA, 19 nt, synthetic construct
  misc_feature 1..19: note = Description of Artificial Sequence: Synthetic oligonucleotide
  source 1..19: mol_type = other RNA
cctgctggtgcttcattcc

SEQ ID NO: 4130 - RNA, 19 nt, synthetic construct
  misc_feature 1..19: note = Description of Artificial Sequence: Synthetic oligonucleotide
  source 1..19: mol_type = other RNA
tcctgctggtgcttcattc

SEQ ID NO: 4131 - RNA, 19 nt, synthetic construct
  misc_feature 1..19: note = Description of Artificial Sequence: Synthetic oligonucleotide
  source 1..19: mol_type = other RNA
ctcctgctggtgcttcatt

SEQ ID NO: 4132 - RNA, 19 nt, synthetic construct
  misc_feature 1..19: note = Description of Artificial Sequence: Synthetic oligonucleotide
  source 1..19: mol_type = other RNA
cctcctgctggtgcttcat

SEQ ID NO: 4133 - RNA, 19 nt, synthetic construct
  misc_feature 1..19: note = Description of Artificial Sequence: Synthetic oligonucleotide
  source 1..19: mol_type = other RNA
acctcctgctggtgcttca

SEQ ID NO: 4134 - RNA, 19 nt, synthetic construct
  misc_feature 1..19: note = Description of Artificial Sequence: Synthetic oligonucleotide
  source 1..19: mol_type = other RNA
cacctcctgctggtgcttc

SEQ ID NO: 4135 - RNA, 19 nt, synthetic construct
  misc_feature 1..19: note = Description of Artificial Sequence: Synthetic oligonucleotide
  source 1..19: mol_type = other RNA
ccacctcctgctggtgctt

SEQ ID NO: 4136 - RNA, 19 nt, synthetic construct
  misc_feature 1..19: note = Description of Artificial Sequence: Synthetic oligonucleotide
  source 1..19: mol_type = other RNA
tccacctcctgctggtgct

SEQ ID NO: 4137 - RNA, 19 nt, synthetic construct
  misc_feature 1..19: note = Description of Artificial Sequence: Synthetic oligonucleotide
  source 1..19: mol_type = other RNA
gtccacctcctgctggtgc

SEQ ID NO: 4138 - RNA, 19 nt, synthetic construct
  misc_feature 1..19: note = Description of Artificial Sequence: Synthetic oligonucleotide
  source 1..19: mol_type = other RNA
tgtccacctcctgctggtg

SEQ ID NO: 4139 - RNA, 19 nt, synthetic construct
  misc_feature 1..19: note = Description of Artificial Sequence: Synthetic oligonucleotide
  source 1..19: mol_type = other RNA
ctgtccacctcctgctggt

SEQ ID NO: 4140 - RNA, 19 nt, synthetic construct
  misc_feature 1..19: note = Description of Artificial Sequence: Synthetic oligonucleotide
  source 1..19: mol_type = other RNA
tctgtccacctcctgctgg

SEQ ID NO: 4141 - RNA, 19 nt, synthetic construct
  misc_feature 1..19: note = Description of Artificial Sequence: Synthetic oligonucleotide
  source 1..19: mol_type = other RNA
ctctgtccacctcctgctg

SEQ ID NO: 4142 - RNA, 19 nt, synthetic construct
  misc_feature 1..19: note = Description of Artificial Sequence: Synthetic oligonucleotide
  source 1..19: mol_type = other RNA
actctgtccacctcctgct

SEQ ID NO: 4143 - RNA, 19 nt, synthetic construct
  misc_feature 1..19: note = Description of Artificial Sequence: Synthetic oligonucleotide
  source 1..19: mol_type = other RNA
gactctgtccacctcctgc

SEQ ID NO: 4144 - RNA, 19 nt, synthetic construct
  misc_feature 1..19: note = Description of Artificial Sequence: Synthetic oligonucleotide
  source 1..19: mol_type = other RNA
agactctgtccacctcctg

SEQ ID NO: 4145 - RNA, 19 nt, synthetic construct
  misc_feature 1..19: note = Description of Artificial Sequence: Synthetic oligonucleotide
  source 1..19: mol_type = other RNA
gagactctgtccacctcct

SEQ ID NO: 4146 - RNA, 19 nt, synthetic construct
  misc_feature 1..19: note = Description of Artificial Sequence: Synthetic oligonucleotide
  source 1..19: mol_type = other RNA
agagactctgtccacctcc

SEQ ID NO: 4147 - RNA, 19 nt, synthetic construct
  misc_feature 1..19: note = Description of Artificial Sequence: Synthetic oligonucleotide
  source 1..19: mol_type = other RNA
gagagactctgtccacctc

SEQ ID NO: 4148 - RNA, 19 nt, synthetic construct
  misc_feature 1..19: note = Description of Artificial Sequence: Synthetic oligonucleotide
  source 1..19: mol_type = other RNA
tgagagactctgtccacct

SEQ ID NO: 4149 - RNA, 19 nt, synthetic construct
  misc_feature 1..19: note = Description of Artificial Sequence: Synthetic oligonucleotide
  source 1..19: mol_type = other RNA
atgagagactctgtccacc

SEQ ID NO: 4150 - RNA, 19 nt, synthetic construct
  misc_feature 1..19: note = Description of Artificial Sequence: Synthetic oligonucleotide
  source 1..19: mol_type = other RNA
catgagagactctgtccac

SEQ ID NO: 4151 - RNA, 19 nt, synthetic construct
  misc_feature 1..19: note = Description of Artificial Sequence: Synthetic oligonucleotide
  source 1..19: mol_type = other RNA
ccatgagagactctgtcca

SEQ ID NO: 4152 - RNA, 19 nt, synthetic construct
  misc_feature 1..19: note = Description of Artificial Sequence: Synthetic oligonucleotide
  source 1..19: mol_type = other RNA
tccatgagagactctgtcc

SEQ ID NO: 4153 - RNA, 19 nt, synthetic construct
  misc_feature 1..19: note = Description of Artificial Sequence: Synthetic oligonucleotide
  source 1..19: mol_type = other RNA
atccatgagagactctgtc

SEQ ID NO: 4154 - RNA, 19 nt, synthetic construct
  misc_feature 1..19: note = Description of Artificial Sequence: Synthetic oligonucleotide
  source 1..19: mol_type = other RNA
catccatgagagactctgt

SEQ ID NO: 4155 - RNA, 19 nt, synthetic construct
  misc_feature 1..19: note = Description of Artificial Sequence: Synthetic oligonucleotide
  source 1..19: mol_type = other RNA
gcatccatgagagactctg

SEQ ID NO: 4156 - RNA, 19 nt, synthetic construct
  misc_feature 1..19: note = Description of Artificial Sequence: Synthetic oligonucleotide
  source 1..19: mol_type = other RNA
ggcatccatgagagactct

SEQ ID NO: 4157 - RNA, 19 nt, synthetic construct
  misc_feature 1..19: note = Description of Artificial Sequence: Synthetic oligonucleotide
  source 1..19: mol_type = other RNA
cggcatccatgagagactc

SEQ ID NO: 4158 - RNA, 19 nt, synthetic construct
  misc_feature 1..19: note = Description of Artificial Sequence: Synthetic oligonucleotide
  source 1..19: mol_type = other RNA
ccggcatccatgagagact

SEQ ID NO: 4159 - RNA, 19 nt, synthetic construct
  misc_feature 1..19: note = Description of Artificial Sequence: Synthetic oligonucleotide
  source 1..19: mol_type = other RNA
gccggcatccatgagagac

SEQ ID NO: 4160 - RNA, 19 nt, synthetic construct
  misc_feature 1..19: note = Description of Artificial Sequence: Synthetic oligonucleotide
  source 1..19: mol_type = other RNA
tgccggcatccatgagaga

SEQ ID NO: 4161 - RNA, 19 nt, synthetic construct
  misc_feature 1..19: note = Description of Artificial Sequence: Synthetic oligonucleotide
  source 1..19: mol_type = other RNA
gtgccggcatccatgagag

SEQ ID NO: 4162 - RNA, 19 nt, synthetic construct
  misc_feature 1..19: note = Description of Artificial Sequence: Synthetic oligonucleotide
  source 1..19: mol_type = other RNA
tgtgccggcatccatgaga

SEQ ID NO: 4163 - RNA, 19 nt, synthetic construct
  misc_feature 1..19: note = Description of Artificial Sequence: Synthetic oligonucleotide
  source 1..19: mol_type = other RNA
ttgtgccggcatccatgag

SEQ ID NO: 4164 - RNA, 19 nt, synthetic construct
  misc_feature 1..19: note = Description of Artificial Sequence: Synthetic oligonucleotide
  source 1..19: mol_type = other RNA
tttgtgccggcatccatga

SEQ ID NO: 4165 - RNA, 19 nt, synthetic construct
  misc_feature 1..19: note = Description of Artificial Sequence: Synthetic oligonucleotide
  source 1..19: mol_type = other RNA
ttttgtgccggcatccatg

SEQ ID NO: 4166 - RNA, 19 nt, synthetic construct
  misc_feature 1..19: note = Description of Artificial Sequence: Synthetic oligonucleotide
  source 1..19: mol_type = other RNA
gttttgtgccggcatccat

SEQ ID NO: 4167 - RNA, 19 nt, synthetic construct
  misc_feature 1..19: note = Description of Artificial Sequence: Synthetic oligonucleotide
  source 1..19: mol_type = other RNA
agttttgtgccggcatcca

SEQ ID NO: 4168 - RNA, 19 nt, synthetic construct
  misc_feature 1..19: note = Description of Artificial Sequence: Synthetic oligonucleotide
  source 1..19: mol_type = other RNA
cagttttgtgccggcatcc

SEQ ID NO: 4169 - RNA, 19 nt, synthetic construct
  misc_feature 1..19: note = Description of Artificial Sequence: Synthetic oligonucleotide
  source 1..19: mol_type = other RNA
gcagttttgtgccggcatc

SEQ ID NO: 4170 - RNA, 19 nt, synthetic construct
  misc_feature 1..19: note = Description of Artificial Sequence: Synthetic oligonucleotide
  source 1..19: mol_type = other RNA
ggcagttttgtgccggcat

SEQ ID NO: 4171 - RNA, 19 nt, synthetic construct
  misc_feature 1..19: note = Description of Artificial Sequence: Synthetic oligonucleotide
  source 1..19: mol_type = other RNA
aggcagttttgtgccggca

SEQ ID NO: 4172 - RNA, 19 nt, synthetic construct
  misc_feature 1..19: note = Description of Artificial Sequence: Synthetic oligonucleotide
  source 1..19: mol_type = other RNA
aaggcagttttgtgccggc

SEQ ID NO: 4173 - RNA, 19 nt, synthetic construct
  misc_feature 1..19: note = Description of Artificial Sequence: Synthetic oligonucleotide
  source 1..19: mol_type = other RNA
taaggcagttttgtgccgg

SEQ ID NO: 4174 - RNA, 19 nt, synthetic construct
  misc_feature 1..19: note = Description of Artificial Sequence: Synthetic oligonucleotide
  source 1..19: mol_type = other RNA
ttaaggcagttttgtgccg

SEQ ID NO: 4175 - RNA, 19 nt, synthetic construct
  misc_feature 1..19: note = Description of Artificial Sequence: Synthetic oligonucleotide
  source 1..19: mol_type = other RNA
tttaaggcagttttgtgcc

SEQ ID NO: 4176 - RNA, 19 nt, synthetic construct
  misc_feature 1..19: note = Description of Artificial Sequence: Synthetic oligonucleotide
  source 1..19: mol_type = other RNA
ttttaaggcagttttgtgc

SEQ ID NO: 4177 - RNA, 19 nt, synthetic construct
  misc_feature 1..19: note = Description of Artificial Sequence: Synthetic oligonucleotide
  source 1..19: mol_type = other RNA
attttaaggcagttttgtg

SEQ ID NO: 4178 - RNA, 19 nt, synthetic construct
  misc_feature 1..19: note = Description of Artificial Sequence: Synthetic oligonucleotide
  source 1..19: mol_type = other RNA
tattttaaggcagttttgt

SEQ ID NO: 4179 - RNA, 19 nt, synthetic construct
  misc_feature 1..19: note = Description of Artificial Sequence: Synthetic oligonucleotide
  source 1..19: mol_type = other RNA
atattttaaggcagttttg

SEQ ID NO: 4180 - RNA, 19 nt, synthetic construct
  misc_feature 1..19: note = Description of Artificial Sequence: Synthetic oligonucleotide
  source 1..19: mol_type = other RNA
aatattttaaggcagtttt

SEQ ID NO: 4181 - RNA, 19 nt, synthetic construct
  misc_feature 1..19: note = Description of Artificial Sequence: Synthetic oligonucleotide
  source 1..19: mol_type = other RNA
gaatattttaaggcagttt

SEQ ID NO: 4182 - RNA, 19 nt, synthetic construct
  misc_feature 1..19: note = Description of Artificial Sequence: Synthetic oligonucleotide
  source 1..19: mol_type = other RNA
tgaatattttaaggcagtt

SEQ ID NO: 4183 - RNA, 19 nt, synthetic construct
  misc_feature 1..19: note = Description of Artificial Sequence: Synthetic oligonucleotide
  source 1..19: mol_type = other RNA
atgaatattttaaggcagt

SEQ ID NO: 4184 - RNA, 19 nt, synthetic construct
  misc_feature 1..19: note = Description of Artificial Sequence: Synthetic oligonucleotide
  source 1..19: mol_type = other RNA
tatgaatattttaaggcag

SEQ ID NO: 4185 - RNA, 19 nt, synthetic construct
  misc_feature 1..19: note = Description of Artificial Sequence: Synthetic oligonucleotide
  source 1..19: mol_type = other RNA
ctatgaatattttaaggca

SEQ ID NO: 4186 - RNA, 19 nt, synthetic construct
  misc_feature 1..19: note = Description of Artificial Sequence: Synthetic oligonucleotide
  source 1..19: mol_type = other RNA
actatgaatattttaaggc

SEQ ID NO: 4187 - RNA, 19 nt, synthetic construct
  misc_feature 1..19: note = Description of Artificial Sequence: Synthetic oligonucleotide
  source 1..19: mol_type = other RNA
aactatgaatattttaagg

SEQ ID NO: 4188 - RNA, 19 nt, synthetic construct
  misc_feature 1..19: note = Description of Artificial Sequence: Synthetic oligonucleotide
  source 1..19: mol_type = other RNA
taactatgaatattttaag

SEQ ID NO: 4189 - RNA, 19 nt, synthetic construct
  misc_feature 1..19: note = Description of Artificial Sequence: Synthetic oligonucleotide
  source 1..19: mol_type = other RNA
ttaactatgaatattttaa

SEQ ID NO: 4190 - RNA, 19 nt, synthetic construct
  misc_feature 1..19: note = Description of Artificial Sequence: Synthetic oligonucleotide
  source 1..19: mol_type = other RNA
attaactatgaatatttta

SEQ ID NO: 4191 - RNA, 19 nt, synthetic construct
  misc_feature 1..19: note = Description of Artificial Sequence: Synthetic oligonucleotide
  source 1..19: mol_type = other RNA
tattaactatgaatatttt

SEQ ID NO: 4192 - RNA, 19 nt, synthetic construct
  misc_feature 1..19: note = Description of Artificial Sequence: Synthetic oligonucleotide
  source 1..19: mol_type = other RNA
gtattaactatgaatattt

SEQ ID NO: 4193 - RNA, 19 nt, synthetic construct
  misc_feature 1..19: note = Description of Artificial Sequence: Synthetic oligonucleotide
  source 1..19: mol_type = other RNA
tgtattaactatgaatatt

SEQ ID NO: 4194 - RNA, 19 nt, synthetic construct
  misc_feature 1..19: note = Description of Artificial Sequence: Synthetic oligonucleotide
  source 1..19: mol_type = other RNA
ctgtattaactatgaatat

SEQ ID NO: 4195 - RNA, 19 nt, synthetic construct
  misc_feature 1..19: note = Description of Artificial Sequence: Synthetic oligonucleotide
  source 1..19: mol_type = other RNA
cctgtattaactatgaata

SEQ ID NO: 4196 - RNA, 19 nt, synthetic construct
  misc_feature 1..19: note = Description of Artificial Sequence: Synthetic oligonucleotide
  source 1..19: mol_type = other RNA
acctgtattaactatgaat

SEQ ID NO: 4197 - RNA, 19 nt, synthetic construct
  misc_feature 1..19: note = Description of Artificial Sequence: Synthetic oligonucleotide
  source 1..19: mol_type = other RNA
tacctgtattaactatgaa

SEQ ID NO: 4198 - RNA, 19 nt, synthetic construct
  misc_feature 1..19: note = Description of Artificial Sequence: Synthetic oligonucleotide
  source 1..19: mol_type = other RNA
atacctgtattaactatga

SEQ ID NO: 4199 - RNA, 19 nt, synthetic construct
  misc_feature 1..19: note = Description of Artificial Sequence: Synthetic oligonucleotide
  source 1..19: mol_type = other RNA
tatacctgtattaactatg

SEQ ID NO: 4200 - RNA, 19 nt, synthetic construct
  misc_feature 1..19: note = Description of Artificial Sequence: Synthetic oligonucleotide
  source 1..19: mol_type = other RNA
atatacctgtattaactat

SEQ ID NO: 4201 - RNA, 19 nt, synthetic construct
  misc_feature 1..19: note = Description of Artificial Sequence: Synthetic oligonucleotide
  source 1..19: mol_type = other RNA
gatatacctgtattaacta

SEQ ID NO: 4202 - RNA, 19 nt, synthetic construct
  misc_feature 1..19: note = Description of Artificial Sequence: Synthetic oligonucleotide
  source 1..19: mol_type = other RNA
agatatacctgtattaact

SEQ ID NO: 4203 - RNA, 19 nt, synthetic construct
  misc_feature 1..19: note = Description of Artificial Sequence: Synthetic oligonucleotide
  source 1..19: mol_type = other RNA
tagatatacctgtattaac

SEQ ID NO: 4204 - RNA, 19 nt, synthetic construct
  misc_feature 1..19: note = Description of Artificial Sequence: Synthetic oligonucleotide
  source 1..19: mol_type = other RNA
atagatatacctgtattaa

SEQ ID NO: 4205 - RNA, 19 nt, synthetic construct
  misc_feature 1..19: note = Description of Artificial Sequence: Synthetic oligonucleotide
  source 1..19: mol_type = other RNA
aatagatatacctgtatta

SEQ ID NO: 4206 - RNA, 19 nt, synthetic construct
  misc_feature 1..19: note = Description of Artificial Sequence: Synthetic oligonucleotide
  source 1..19: mol_type = other RNA
aaatagatatacctgtatt

SEQ ID NO: 4207 - RNA, 19 nt, synthetic construct
  misc_feature 1..19: note = Description of Artificial Sequence: Synthetic oligonucleotide
  source 1..19: mol_type = other RNA
aaaatagatatacctgtat

SEQ ID NO: 4208 - RNA, 19 nt, synthetic construct
  misc_feature 1..19: note = Description of Artificial Sequence: Synthetic oligonucleotide
  source 1..19: mol_type = other RNA
aaaaatagatatacctgta

SEQ ID NO: 4209 - RNA, 19 nt, synthetic construct
  misc_feature 1..19: note = Description of Artificial Sequence: Synthetic oligonucleotide
  source 1..19: mol_type = other RNA
taaaaatagatatacctgt

SEQ ID NO: 4210 - RNA, 19 nt, synthetic construct
  misc_feature 1..19: note = Description of Artificial Sequence: Synthetic oligonucleotide
  source 1..19: mol_type = other RNA
ataaaaatagatatacctg

SEQ ID NO: 4211 - RNA, 19 nt, synthetic construct
  misc_feature 1..19: note = Description of Artificial Sequence: Synthetic oligonucleotide
  source 1..19: mol_type = other RNA
aataaaaatagatatacct

SEQ ID NO: 4212 - RNA, 19 nt, synthetic construct
  misc_feature 1..19: note = Description of Artificial Sequence: Synthetic oligonucleotide
  source 1..19: mol_type = other RNA
aaataaaaatagatatacc

SEQ ID NO: 4213 - RNA, 19 nt, synthetic construct
  misc_feature 1..19: note = Description of Artificial Sequence: Synthetic oligonucleotide
  source 1..19: mol_type = other RNA
taaataaaaatagatatac

SEQ ID NO: 4214 - RNA, 19 nt, synthetic construct
  misc_feature 1..19: note = Description of Artificial Sequence: Synthetic oligonucleotide
  source 1..19: mol_type = other RNA
gtaaataaaaatagatata

SEQ ID NO: 4215 - RNA, 19 nt, synthetic construct
  misc_feature 1..19: note = Description of Artificial Sequence: Synthetic oligonucleotide
  source 1..19: mol_type = other RNA
agtaaataaaaatagatat

SEQ ID NO: 4216 - RNA, 19 nt, synthetic construct
  misc_feature 1..19: note = Description of Artificial Sequence: Synthetic oligonucleotide
  source 1..19: mol_type = other RNA
aagtaaataaaaatagata

SEQ ID NO: 4217 - RNA, 19 nt, synthetic construct
  misc_feature 1..19: note = Description of Artificial Sequence: Synthetic oligonucleotide
  source 1..19: mol_type = other RNA
aaagtaaataaaaatagat

SEQ ID NO: 4218 - RNA, 19 nt, synthetic construct
  misc_feature 1..19: note = Description of Artificial Sequence: Synthetic oligonucleotide
  source 1..19: mol_type = other RNA
caaagtaaataaaaataga

SEQ ID NO: 4219 - RNA, 19 nt, synthetic construct
  misc_feature 1..19: note = Description of Artificial Sequence: Synthetic oligonucleotide
  source 1..19: mol_type = other RNA
acaaagtaaataaaaatag

SEQ ID NO: 4220 - RNA, 19 nt, synthetic construct
  misc_feature 1..19: note = Description of Artificial Sequence: Synthetic oligonucleotide
  source 1..19: mol_type = other RNA
tacaaagtaaataaaaata

SEQ ID NO: 4221 - RNA, 19 nt, synthetic construct
  misc_feature 1..19: note = Description of Artificial Sequence: Synthetic oligonucleotide
  source 1..19: mol_type = other RNA
ttacaaagtaaataaaaat

SEQ ID NO: 4222 - RNA, 19 nt, synthetic construct
  misc_feature 1..19: note = Description of Artificial Sequence: Synthetic oligonucleotide
  source 1..19: mol_type = other RNA
cttacaaagtaaataaaaa

SEQ ID NO: 4223 - RNA, 19 nt, synthetic construct
  misc_feature 1..19: note = Description of Artificial Sequence: Synthetic oligonucleotide
  source 1..19: mol_type = other RNA
tcttacaaagtaaataaaa

SEQ ID NO: 4224 - RNA, 19 nt, synthetic construct
  misc_feature 1..19: note = Description of Artificial Sequence: Synthetic oligonucleotide
  source 1..19: mol_type = other RNA
ttcttacaaagtaaataaa

SEQ ID NO: 4225 - RNA, 19 nt, synthetic construct
  misc_feature 1..19: note = Description of Artificial Sequence: Synthetic oligonucleotide
  source 1..19: mol_type = other RNA
tttcttacaaagtaaataa

SEQ ID NO: 4226 - RNA, 19 nt, synthetic construct
  misc_feature 1..19: note = Description of Artificial Sequence: Synthetic oligonucleotide
  source 1..19: mol_type = other RNA
gtttcttacaaagtaaata

SEQ ID NO: 4227 - RNA, 19 nt, synthetic construct
  misc_feature 1..19: note = Description of Artificial Sequence: Synthetic oligonucleotide
  source 1..19: mol_type = other RNA
tgtttcttacaaagtaaat

SEQ ID NO: 4228 - RNA, 19 nt, synthetic construct
  misc_feature 1..19: note = Description of Artificial Sequence: Synthetic oligonucleotide
  source 1..19: mol_type = other RNA
ttgtttcttacaaagtaaa

SEQ ID NO: 4229 - RNA, 19 nt, synthetic construct
  misc_feature 1..19: note = Description of Artificial Sequence: Synthetic oligonucleotide
  source 1..19: mol_type = other RNA
cttgtttcttacaaagtaa

SEQ ID NO: 4230 - RNA, 19 nt, synthetic construct
  misc_feature 1..19: note = Description of Artificial Sequence: Synthetic oligonucleotide
  source 1..19: mol_type = other RNA
gcttgtttcttacaaagta

SEQ ID NO: 4231 - RNA, 19 nt, synthetic construct
  misc_feature 1..19: note = Description of Artificial Sequence: Synthetic oligonucleotide
  source 1..19: mol_type = other RNA
agcttgtttcttacaaagt

SEQ ID NO: 4232 - RNA, 19 nt, synthetic construct
  misc_feature 1..19: note = Description of Artificial Sequence: Synthetic oligonucleotide
  source 1..19: mol_type = other RNA
gagcttgtttcttacaaag

SEQ ID NO: 4233 - RNA, 19 nt, synthetic construct
  misc_feature 1..19: note = Description of Artificial Sequence: Synthetic oligonucleotide
  source 1..19: mol_type = other RNA
tgagcttgtttcttacaaa

SEQ ID NO: 4234 - RNA, 19 nt, synthetic construct
  misc_feature 1..19: note = Description of Artificial Sequence: Synthetic oligonucleotide
  source 1..19: mol_type = other RNA
ttgagcttgtttcttacaa

SEQ ID NO: 4235 - RNA, 19 nt, synthetic construct
  misc_feature 1..19: note = Description of Artificial Sequence: Synthetic oligonucleotide
  source 1..19: mol_type = other RNA
cttgagcttgtttcttaca

SEQ ID NO: 4236 - RNA, 19 nt, synthetic construct
  misc_feature 1..19: note = Description of Artificial Sequence: Synthetic oligonucleotide
  source 1..19: mol_type = other RNA
ccttgagcttgtttcttac

SEQ ID NO: 4237 - RNA, 19 nt, synthetic construct
  misc_feature 1..19: note = Description of Artificial Sequence: Synthetic oligonucleotide
  source 1..19: mol_type = other RNA
tccttgagcttgtttctta

SEQ ID NO: 4238 - RNA, 19 nt, synthetic construct
  misc_feature 1..19: note = Description of Artificial Sequence: Synthetic oligonucleotide
  source 1..19: mol_type = other RNA
ctccttgagcttgtttctt

SEQ ID NO: 4239 - RNA, 19 nt, synthetic construct
  misc_feature 1..19: note = Description of Artificial Sequence: Synthetic oligonucleotide
  source 1..19: mol_type = other RNA
gctccttgagcttgtttct

SEQ ID NO: 4240 - RNA, 19 nt, synthetic construct
  misc_feature 1..19: note = Description of Artificial Sequence: Synthetic oligonucleotide
  source 1..19: mol_type = other RNA
agctccttgagcttgtttc

SEQ ID NO: 4241 - RNA, 19 nt, synthetic construct
  misc_feature 1..19: note = Description of Artificial Sequence: Synthetic oligonucleotide
  source 1..19: mol_type = other RNA
aagctccttgagcttgttt

SEQ ID NO: 4242 - RNA, 19 nt, synthetic construct
  misc_feature 1..19: note = Description of Artificial Sequence: Synthetic oligonucleotide
  source 1..19: mol_type = other RNA
gaagctccttgagcttgtt

SEQ ID NO: 4243 - RNA, 19 nt, synthetic construct
  misc_feature 1..19: note = Description of Artificial Sequence: Synthetic oligonucleotide
  source 1..19: mol_type = other RNA
ggaagctccttgagcttgt

SEQ ID NO: 4244 - RNA, 19 nt, synthetic construct
  misc_feature 1..19: note = Description of Artificial Sequence: Synthetic oligonucleotide
  source 1..19: mol_type = other RNA
aggaagctccttgagcttg

SEQ ID NO: 4245 - RNA, 19 nt, synthetic construct
  misc_feature 1..19: note = Description of Artificial Sequence: Synthetic oligonucleotide
  source 1..19: mol_type = other RNA
aaggaagctccttgagctt

SEQ ID NO: 4246 - RNA, 19 nt, synthetic construct
  misc_feature 1..19: note = Description of Artificial Sequence: Synthetic oligonucleotide
  source 1..19: mol_type = other RNA
aaaggaagctccttgagct

SEQ ID NO: 4247 - RNA, 19 nt, synthetic construct
  misc_feature 1..19: note = Description of Artificial Sequence: Synthetic oligonucleotide
  source 1..19: mol_type = other RNA
aaaaggaagctccttgagc

SEQ ID NO: 4248 - RNA, 19 nt, synthetic construct
  misc_feature 1..19: note = Description of Artificial Sequence: Synthetic oligonucleotide
  source 1..19: mol_type = other RNA
taaaaggaagctccttgag

SEQ ID NO: 4249 - RNA, 19 nt, synthetic construct
  misc_feature 1..19: note = Description of Artificial Sequence: Synthetic oligonucleotide
  source 1..19: mol_type = other RNA
ttaaaaggaagctccttga

SEQ ID NO: 4250 - RNA, 19 nt, synthetic construct
  misc_feature 1..19: note = Description of Artificial Sequence: Synthetic oligonucleotide
  source 1..19: mol_type = other RNA
tttaaaaggaagctccttg

SEQ ID NO: 4251 - RNA, 19 nt, synthetic construct
  misc_feature 1..19: note = Description of Artificial Sequence: Synthetic oligonucleotide
  source 1..19: mol_type = other RNA
atttaaaaggaagctcctt

SEQ ID NO: 4252 - RNA, 19 nt, synthetic construct
  misc_feature 1..19: note = Description of Artificial Sequence: Synthetic oligonucleotide
  source 1..19: mol_type = other RNA
aatttaaaaggaagctcct

SEQ ID NO: 4253 - RNA, 19 nt, synthetic construct
  misc_feature 1..19: note = Description of Artificial Sequence: Synthetic oligonucleotide
  source 1..19: mol_type = other RNA
aaatttaaaaggaagctcc

SEQ ID NO: 4254 - RNA, 19 nt, synthetic construct
  misc_feature 1..19: note = Description of Artificial Sequence: Synthetic oligonucleotide
  source 1..19: mol_type = other RNA
aaaatttaaaaggaagctc

SEQ ID NO: 4255 - RNA, 19 nt, synthetic construct
  misc_feature 1..19: note = Description of Artificial Sequence: Synthetic oligonucleotide
  source 1..19: mol_type = other RNA
caaaatttaaaaggaagct

SEQ ID NO: 4256 - RNA, 19 nt, synthetic construct
  misc_feature 1..19: note = Description of Artificial Sequence: Synthetic oligonucleotide
  source 1..19: mol_type = other RNA
acaaaatttaaaaggaagc

SEQ ID NO: 4257 - RNA, 19 nt, synthetic construct
  misc_feature 1..19: note = Description of Artificial Sequence: Synthetic oligonucleotide
  source 1..19: mol_type = other RNA
gacaaaatttaaaaggaag

SEQ ID NO: 4258 - RNA, 19 nt, synthetic construct
  misc_feature 1..19: note = Description of Artificial Sequence: Synthetic oligonucleotide
  source 1..19: mol_type = other RNA
agacaaaatttaaaaggaa

SEQ ID NO: 4259 - RNA, 19 nt, synthetic construct
  misc_feature 1..19: note = Description of Artificial Sequence: Synthetic oligonucleotide
  source 1..19: mol_type = other RNA
cagacaaaatttaaaagga

SEQ ID NO: 4260 - RNA, 19 nt, synthetic construct
  misc_feature 1..19: note = Description of Artificial Sequence: Synthetic oligonucleotide
  source 1..19: mol_type = other RNA
acagacaaaatttaaaagg

SEQ ID NO: 4261 - RNA, 19 nt, synthetic construct
  misc_feature 1..19: note = Description of Artificial Sequence: Synthetic oligonucleotide
  source 1..19: mol_type = other RNA
tacagacaaaatttaaaag

SEQ ID NO: 4262 - RNA, 19 nt, synthetic construct
  misc_feature 1..19: note = Description of Artificial Sequence: Synthetic oligonucleotide
  source 1..19: mol_type = other RNA
ctacagacaaaatttaaaa

SEQ ID NO: 4263 - RNA, 19 nt, synthetic construct
  misc_feature 1..19: note = Description of Artificial Sequence: Synthetic oligonucleotide
  source 1..19: mol_type = other RNA
cctacagacaaaatttaaa

SEQ ID NO: 4264 - RNA, 19 nt, synthetic construct
  misc_feature 1..19: note = Description of Artificial Sequence: Synthetic oligonucleotide
  source 1..19: mol_type = other RNA
tcctacagacaaaatttaa

SEQ ID NO: 4265 - RNA, 19 nt, synthetic construct
  misc_feature 1..19: note = Description of Artificial Sequence: Synthetic oligonucleotide
  source 1..19: mol_type = other RNA
ttcctacagacaaaattta

SEQ ID NO: 4266 - RNA, 19 nt, synthetic construct
  misc_feature 1..19: note = Description of Artificial Sequence: Synthetic oligonucleotide
  source 1..19: mol_type = other RNA
tttcctacagacaaaattt

SEQ ID NO: 4267 - RNA, 19 nt, synthetic construct
  misc_feature 1..19: note = Description of Artificial Sequence: Synthetic oligonucleotide
  source 1..19: mol_type = other RNA
atttcctacagacaaaatt

SEQ ID NO: 4268 - RNA, 19 nt, synthetic construct
  misc_feature 1..19: note = Description of Artificial Sequence: Synthetic oligonucleotide
  source 1..19: mol_type = other RNA
catttcctacagacaaaat

SEQ ID NO: 4269 - RNA, 19 nt, synthetic construct
  misc_feature 1..19: note = Description of Artificial Sequence: Synthetic oligonucleotide
  source 1..19: mol_type = other RNA
ccatttcctacagacaaaa

SEQ ID NO: 4270 - RNA, 19 nt, synthetic construct
  misc_feature 1..19: note = Description of Artificial Sequence: Synthetic oligonucleotide
  source 1..19: mol_type = other RNA
accatttcctacagacaaa

SEQ ID NO: 4271 - RNA, 19 nt, synthetic construct
  misc_feature 1..19: note = Description of Artificial Sequence: Synthetic oligonucleotide
  source 1..19: mol_type = other RNA
aaccatttcctacagacaa

SEQ ID NO: 4272 - RNA, 19 nt, synthetic construct
  misc_feature 1..19: note = Description of Artificial Sequence: Synthetic oligonucleotide
  source 1..19: mol_type = other RNA
caaccatttcctacagaca

SEQ ID NO: 4273 - RNA, 19 nt, synthetic construct
  misc_feature 1..19: note = Description of Artificial Sequence: Synthetic oligonucleotide
  source 1..19: mol_type = other RNA
tcaaccatttcctacagac

SEQ ID NO: 4274 - RNA, 19 nt, synthetic construct
  misc_feature 1..19: note = Description of Artificial Sequence: Synthetic oligonucleotide
  source 1..19: mol_type = other RNA
ttcaaccatttcctacaga

SEQ ID NO: 4275 - RNA, 19 nt, synthetic construct
  misc_feature 1..19: note = Description of Artificial Sequence: Synthetic oligonucleotide
  source 1..19: mol_type = other RNA
tttcaaccatttcctacag

SEQ ID NO: 4276 - RNA, 19 nt, synthetic construct
  misc_feature 1..19: note = Description of Artificial Sequence: Synthetic oligonucleotide
  source 1..19: mol_type = other RNA
ttttcaaccatttcctaca

SEQ ID NO: 4277 - RNA, 19 nt, synthetic construct
  misc_feature 1..19: note = Description of Artificial Sequence: Synthetic oligonucleotide
  source 1..19: mol_type = other RNA
gttttcaaccatttcctac

SEQ ID NO: 4278 - RNA, 19 nt, synthetic construct
  misc_feature 1..19: note = Description of Artificial Sequence: Synthetic oligonucleotide
  source 1..19: mol_type = other RNA
agttttcaaccatttccta

SEQ ID NO: 4279 - RNA, 19 nt, synthetic construct
  misc_feature 1..19: note = Description of Artificial Sequence: Synthetic oligonucleotide
  source 1..19: mol_type = other RNA
cagttttcaaccatttcct

SEQ ID NO: 4280 - RNA, 19 nt, synthetic construct
  misc_feature 1..19: note = Description of Artificial Sequence: Synthetic oligonucleotide
  source 1..19: mol_type = other RNA
tcagttttcaaccatttcc

SEQ ID NO: 4281 - RNA, 19 nt, synthetic construct
  misc_feature 1..19: note = Description of Artificial Sequence: Synthetic oligonucleotide
  source 1..19: mol_type = other RNA
ttcagttttcaaccatttc

SEQ ID NO: 4282 - RNA, 19 nt, synthetic construct
  misc_feature 1..19: note = Description of Artificial Sequence: Synthetic oligonucleotide
  source 1..19: mol_type = other RNA
cttcagttttcaaccattt

SEQ ID NO: 4283 - RNA, 19 nt, synthetic construct
  misc_feature 1..19: note = Description of Artificial Sequence: Synthetic oligonucleotide
  source 1..19: mol_type = other RNA
ccttcagttttcaaccatt

SEQ ID NO: 4284 - RNA, 19 nt, synthetic construct
  misc_feature 1..19: note = Description of Artificial Sequence: Synthetic oligonucleotide
  source 1..19: mol_type = other RNA
accttcagttttcaaccat

SEQ ID NO: 4285 - RNA, 19 nt, synthetic construct
  misc_feature 1..19: note = Description of Artificial Sequence: Synthetic oligonucleotide
  source 1..19: mol_type = other RNA
taccttcagttttcaacca

SEQ ID NO: 4286 - RNA, 19 nt, synthetic construct
  misc_feature 1..19: note = Description of Artificial Sequence: Synthetic oligonucleotide
  source 1..19: mol_type = other RNA
ctaccttcagttttcaacc

SEQ ID NO: 4287 - RNA, 19 nt, synthetic construct
  misc_feature 1..19: note = Description of Artificial Sequence: Synthetic oligonucleotide
  source 1..19: mol_type = other RNA
tctaccttcagttttcaac

SEQ ID NO: 4288 - RNA, 19 nt, synthetic construct
  misc_feature 1..19: note = Description of Artificial Sequence: Synthetic oligonucleotide
  source 1..19: mol_type = other RNA
atctaccttcagttttcaa

SEQ ID NO: 4289 - RNA, 19 nt, synthetic construct
  misc_feature 1..19: note = Description of Artificial Sequence: Synthetic oligonucleotide
  source 1..19: mol_type = other RNA
catctaccttcagttttca

SEQ ID NO: 4290 - RNA, 19 nt, synthetic construct
  misc_feature 1..19: note = Description of Artificial Sequence: Synthetic oligonucleotide
  source 1..19: mol_type = other RNA
ccatctaccttcagttttc

SEQ ID NO: 4291 - RNA, 19 nt, synthetic construct
  misc_feature 1..19: note = Description of Artificial Sequence: Synthetic oligonucleotide
  source 1..19: mol_type = other RNA
accatctaccttcagtttt

SEQ ID NO: 4292 - RNA, 19 nt, synthetic construct
  misc_feature 1..19: note = Description of Artificial Sequence: Synthetic oligonucleotide
  source 1..19: mol_type = other RNA
caccatctaccttcagttt

SEQ ID NO: 4293 - RNA, 19 nt, synthetic construct
  misc_feature 1..19: note = Description of Artificial Sequence: Synthetic oligonucleotide
  source 1..19: mol_type = other RNA
acaccatctaccttcagtt

SEQ ID NO: 4294 - RNA, 19 nt, synthetic construct
  misc_feature 1..19: note = Description of Artificial Sequence: Synthetic oligonucleotide
  source 1..19: mol_type = other RNA
aacaccatctaccttcagt

SEQ ID NO: 4295 - RNA, 19 nt, synthetic construct
  misc_feature 1..19: note = Description of Artificial Sequence: Synthetic oligonucleotide
  source 1..19: mol_type = other RNA
taacaccatctaccttcag

SEQ ID NO: 4296 - RNA, 19 nt, synthetic construct
  misc_feature 1..19: note = Description of Artificial Sequence: Synthetic oligonucleotide
  source 1..19: mol_type = other RNA
ataacaccatctaccttca

SEQ ID NO: 4297 - RNA, 19 nt, synthetic construct
  misc_feature 1..19: note = Description of Artificial Sequence: Synthetic oligonucleotide
  source 1..19: mol_type = other RNA
tataacaccatctaccttc

SEQ ID NO: 4298 - RNA, 19 nt, synthetic construct
  misc_feature 1..19: note = Description of Artificial Sequence: Synthetic oligonucleotide
  source 1..19: mol_type = other RNA
ctataacaccatctacctt

SEQ ID NO: 4299 - RNA, 19 nt, synthetic construct
  misc_feature 1..19: note = Description of Artificial Sequence: Synthetic oligonucleotide
  source 1..19: mol_type = other RNA
actataacaccatctacct

SEQ ID NO: 4300 - RNA, 19 nt, synthetic construct
  misc_feature 1..19: note = Description of Artificial Sequence: Synthetic oligonucleotide
  source 1..19: mol_type = other RNA
aactataacaccatctacc

SEQ ID NO: 4301 - RNA, 19 nt, synthetic construct
  misc_feature 1..19: note = Description of Artificial Sequence: Synthetic oligonucleotide
  source 1..19: mol_type = other RNA
taactataacaccatctac

SEQ ID NO: 4302 - RNA, 19 nt, synthetic construct
  misc_feature 1..19: note = Description of Artificial Sequence: Synthetic oligonucleotide
  source 1..19: mol_type = other RNA
ttaactataacaccatcta

SEQ ID NO: 4303 - RNA, 19 nt, synthetic construct
  misc_feature 1..19: note = Description of Artificial Sequence: Synthetic oligonucleotide
  source 1..19: mol_type = other RNA
attaactataacaccatct

SEQ ID NO: 4304 - RNA, 19 nt, synthetic construct
  misc_feature 1..19: note = Description of Artificial Sequence: Synthetic oligonucleotide
  source 1..19: mol_type = other RNA
tattaactataacaccatc

SEQ ID NO: 4305 - RNA, 19 nt, synthetic construct
  misc_feature 1..19: note = Description of Artificial Sequence: Synthetic oligonucleotide
  source 1..19: mol_type = other RNA
ttattaactataacaccat

SEQ ID NO: 4306 - RNA, 19 nt, synthetic construct
  misc_feature 1..19: note = Description of Artificial Sequence: Synthetic oligonucleotide
  source 1..19: mol_type = other RNA
attattaactataacacca

SEQ ID NO: 4307 - RNA, 19 nt, synthetic construct
  misc_feature 1..19: note = Description of Artificial Sequence: Synthetic oligonucleotide
  source 1..19: mol_type = other RNA
tattattaactataacacc

SEQ ID NO: 4308 - RNA, 19 nt, synthetic construct
  misc_feature 1..19: note = Description of Artificial Sequence: Synthetic oligonucleotide
  source 1..19: mol_type = other RNA
ttattattaactataacac

SEQ ID NO: 4309 - RNA, 19 nt, synthetic construct
  misc_feature 1..19: note = Description of Artificial Sequence: Synthetic oligonucleotide
  source 1..19: mol_type = other RNA
tttattattaactataaca

SEQ ID NO: 4310 - RNA, 19 nt, synthetic construct
  misc_feature 1..19: note = Description of Artificial Sequence: Synthetic oligonucleotide
  source 1..19: mol_type = other RNA
atttattattaactataac

SEQ ID NO: 4311 - RNA, 19 nt, synthetic construct
  misc_feature 1..19: note = Description of Artificial Sequence: Synthetic oligonucleotide
  source 1..19: mol_type = other RNA
catttattattaactataa

SEQ ID NO: 4312 - RNA, 19 nt, synthetic construct
  misc_feature 1..19: note = Description of Artificial Sequence: Synthetic oligonucleotide
  source 1..19: mol_type = other RNA
gcatttattattaactata

SEQ ID NO: 4313 - RNA, 19 nt, synthetic construct
  misc_feature 1..19: note = Description of Artificial Sequence: Synthetic oligonucleotide
  source 1..19: mol_type = other RNA
agcatttattattaactat

SEQ ID NO: 4314 - RNA, 19 nt, synthetic construct
  misc_feature 1..19: note = Description of Artificial Sequence: Synthetic oligonucleotide
  source 1..19: mol_type = other RNA
cagcatttattattaacta

SEQ ID NO: 4315 - RNA, 19 nt, synthetic construct
  misc_feature 1..19: note = Description of Artificial Sequence: Synthetic oligonucleotide
  source 1..19: mol_type = other RNA
acagcatttattattaact

SEQ ID NO: 4316 - RNA, 19 nt, synthetic construct
  misc_feature 1..19: note = Description of Artificial Sequence: Synthetic oligonucleotide
  source 1..19: mol_type = other RNA
tacagcatttattattaac

SEQ ID NO: 4317 - RNA, 19 nt, synthetic construct
  misc_feature 1..19: note = Description of Artificial Sequence: Synthetic oligonucleotide
  source 1..19: mol_type = other RNA
ttacagcatttattattaa

SEQ ID NO: 4318 - RNA, 19 nt, synthetic construct
  misc_feature 1..19: note = Description of Artificial Sequence: Synthetic oligonucleotide
  source 1..19: mol_type = other RNA
tttacagcatttattatta

SEQ ID NO: 4319 - RNA, 19 nt, synthetic construct
  misc_feature 1..19: note = Description of Artificial Sequence: Synthetic oligonucleotide
  source 1..19: mol_type = other RNA
atttacagcatttattatt

SEQ ID NO: 4320 - RNA, 19 nt, synthetic construct
  misc_feature 1..19: note = Description of Artificial Sequence: Synthetic oligonucleotide
  source 1..19: mol_type = other RNA
tatttacagcatttattat

SEQ ID NO: 4321 - RNA, 19 nt, synthetic construct
  misc_feature 1..19: note = Description of Artificial Sequence: Synthetic oligonucleotide
  source 1..19: mol_type = other RNA
ttatttacagcatttatta

SEQ ID NO: 4322 - RNA, 19 nt, synthetic construct
  misc_feature 1..19: note = Description of Artificial Sequence: Synthetic oligonucleotide
  source 1..19: mol_type = other RNA
cttatttacagcatttatt

SEQ ID NO: 4323 - RNA, 19 nt, synthetic construct
  misc_feature 1..19: note = Description of Artificial Sequence: Synthetic oligonucleotide
  source 1..19: mol_type = other RNA
gcttatttacagcatttat

SEQ ID NO: 4324 - RNA, 19 nt, synthetic construct
  misc_feature 1..19: note = Description of Artificial Sequence: Synthetic oligonucleotide
  source 1..19: mol_type = other RNA
tgcttatttacagcattta

SEQ ID NO: 4325 - RNA, 19 nt, synthetic construct
  misc_feature 1..19: note = Description of Artificial Sequence: Synthetic oligonucleotide
  source 1..19: mol_type = other RNA
atgcttatttacagcattt

SEQ ID NO: 4326 - RNA, 19 nt, synthetic construct
  misc_feature 1..19: note = Description of Artificial Sequence: Synthetic oligonucleotide
  source 1..19: mol_type = other RNA
gatgcttatttacagcatt

SEQ ID NO: 4327 - RNA, 19 nt, synthetic construct
  misc_feature 1..19: note = Description of Artificial Sequence: Synthetic oligonucleotide
  source 1..19: mol_type = other RNA
agatgcttatttacagcat

SEQ ID NO: 4328 - RNA, 19 nt, synthetic construct
  misc_feature 1..19: note = Description of Artificial Sequence: Synthetic oligonucleotide
  source 1..19: mol_type = other RNA
gagatgcttatttacagca

SEQ ID NO: 4329 - RNA, 19 nt, synthetic construct
  misc_feature 1..19: note = Description of Artificial Sequence: Synthetic oligonucleotide
  source 1..19: mol_type = other RNA
tgagatgcttatttacagc

SEQ ID NO: 4330 - RNA, 19 nt, synthetic construct
  misc_feature 1..19: note = Description of Artificial Sequence: Synthetic oligonucleotide
  source 1..19: mol_type = other RNA
gtgagatgcttatttacag

SEQ ID NO: 4331 - RNA, 19 nt, synthetic construct
  misc_feature 1..19: note = Description of Artificial Sequence: Synthetic oligonucleotide
  source 1..19: mol_type = other RNA
agtgagatgcttatttaca

SEQ ID NO: 4332 - RNA, 19 nt, synthetic construct
  misc_feature 1..19: note = Description of Artificial Sequence: Synthetic oligonucleotide
  source 1..19: mol_type = other RNA
aagtgagatgcttatttac

SEQ ID NO: 4333 - RNA, 19 nt, synthetic construct
  misc_feature 1..19: note = Description of Artificial Sequence: Synthetic oligonucleotide
  source 1..19: mol_type = other RNA
aaagtgagatgcttattta

SEQ ID NO: 4334 - RNA, 19 nt, synthetic construct
  misc_feature 1..19: note = Description of Artificial Sequence: Synthetic oligonucleotide
  source 1..19: mol_type = other RNA
caaagtgagatgcttattt

SEQ ID NO: 4335 - RNA, 19 nt, synthetic construct
  misc_feature 1..19: note = Description of Artificial Sequence: Synthetic oligonucleotide
  source 1..19: mol_type = other RNA
acaaagtgagatgcttatt

SEQ ID NO: 4336 - RNA, 19 nt, synthetic construct
  misc_feature 1..19: note = Description of Artificial Sequence: Synthetic oligonucleotide
  source 1..19: mol_type = other RNA
tacaaagtgagatgcttat

SEQ ID NO: 4337 - RNA, 19 nt, synthetic construct
  misc_feature 1..19: note = Description of Artificial Sequence: Synthetic oligonucleotide
  source 1..19: mol_type = other RNA
ttacaaagtgagatgctta

SEQ ID NO: 4338 - RNA, 19 nt, synthetic construct
  misc_feature 1..19: note = Description of Artificial Sequence: Synthetic oligonucleotide
  source 1..19: mol_type = other RNA
tttacaaagtgagatgctt

SEQ ID NO: 4339 - RNA, 19 nt, synthetic construct
  misc_feature 1..19: note = Description of Artificial Sequence: Synthetic oligonucleotide
  source 1..19: mol_type = other RNA
ttttacaaagtgagatgct

SEQ ID NO: 4340 - RNA, 19 nt, synthetic construct
  misc_feature 1..19: note = Description of Artificial Sequence: Synthetic oligonucleotide
  source 1..19: mol_type = other RNA
tttttacaaagtgagatgc

SEQ ID NO: 4341 - RNA, 19 nt, synthetic construct
  misc_feature 1..19: note = Description of Artificial Sequence: Synthetic oligonucleotide
  source 1..19: mol_type = other RNA
atttttacaaagtgagatg

SEQ ID NO: 4342 - RNA, 19 nt, synthetic construct
  misc_feature 1..19: note = Description of Artificial Sequence: Synthetic oligonucleotide
  source 1..19: mol_type = other RNA
tatttttacaaagtgagat

SEQ ID NO: 4343 - RNA, 19 nt, synthetic construct
  misc_feature 1..19: note = Description of Artificial Sequence: Synthetic oligonucleotide
  source 1..19: mol_type = other RNA
ttatttttacaaagtgaga

SEQ ID NO: 4344 - RNA, 19 nt, synthetic construct
  misc_feature 1..19: note = Description of Artificial Sequence: Synthetic oligonucleotide
  source 1..19: mol_type = other RNA
tttatttttacaaagtgag

SEQ ID NO: 4345 - RNA, 19 nt, synthetic construct
  misc_feature 1..19: note = Description of Artificial Sequence: Synthetic oligonucleotide
  source 1..19: mol_type = other RNA
ttttatttttacaaagtga

SEQ ID NO: 4346 - RNA, 19 nt, synthetic construct
  misc_feature 1..19: note = Description of Artificial Sequence: Synthetic oligonucleotide
  source 1..19: mol_type = other RNA
attttatttttacaaagtg

SEQ ID NO: 4347 - RNA, 19 nt, synthetic construct
  misc_feature 1..19: note = Description of Artificial Sequence: Synthetic oligonucleotide
  source 1..19: mol_type = other RNA
tattttatttttacaaagt

SEQ ID NO: 4348 - RNA, 19 nt, synthetic construct
  misc_feature 1..19: note = Description of Artificial Sequence: Synthetic oligonucleotide
  source 1..19: mol_type = other RNA
atattttatttttacaaag

SEQ ID NO: 4349 - RNA, 19 nt, synthetic construct
  misc_feature 1..19: note = Description of Artificial Sequence: Synthetic oligonucleotide
  source 1..19: mol_type = other RNA
aatattttatttttacaaa

SEQ ID NO: 4350 - RNA, 19 nt, synthetic construct
  misc_feature 1..19: note = Description of Artificial Sequence: Synthetic oligonucleotide
  source 1..19: mol_type = other RNA
caatattttatttttacaa

SEQ ID NO: 4351 - RNA, 19 nt, synthetic construct
  misc_feature 1..19: note = Description of Artificial Sequence: Synthetic oligonucleotide
  source 1..19: mol_type = other RNA
acaatattttatttttaca

SEQ ID NO: 4352 - RNA, 19 nt, synthetic construct
  misc_feature 1..19: note = Description of Artificial Sequence: Synthetic oligonucleotide
  source 1..19: mol_type = other RNA
cacaatattttatttttac

SEQ ID NO: 4353 - RNA, 19 nt, synthetic construct
  misc_feature 1..19: note = Description of Artificial Sequence: Synthetic oligonucleotide
  source 1..19: mol_type = other RNA
ccacaatattttattttta

SEQ ID NO: 4354 - RNA, 19 nt, synthetic construct
  misc_feature 1..19: note = Description of Artificial Sequence: Synthetic oligonucleotide
  source 1..19: mol_type = other RNA
accacaatattttattttt

SEQ ID NO: 4355 - RNA, 19 nt, synthetic construct
  misc_feature 1..19: note = Description of Artificial Sequence: Synthetic oligonucleotide
  source 1..19: mol_type = other RNA
aaccacaatattttatttt

SEQ ID NO: 4356 - RNA, 19 nt, synthetic construct
  misc_feature 1..19: note = Description of Artificial Sequence: Synthetic oligonucleotide
  source 1..19: mol_type = other RNA
aaaccacaatattttattt

SEQ ID NO: 4357 - RNA, 19 nt, synthetic construct
  misc_feature 1..19: note = Description of Artificial Sequence: Synthetic oligonucleotide
  source 1..19: mol_type = other RNA
aaaaccacaatattttatt

SEQ ID NO: 4358 - RNA, 19 nt, synthetic construct
  misc_feature 1..19: note = Description of Artificial Sequence: Synthetic oligonucleotide
  source 1..19: mol_type = other RNA
caaaaccacaatattttat

SEQ ID NO: 4359 - RNA, 19 nt, synthetic construct
  misc_feature 1..19: note = Description of Artificial Sequence: Synthetic oligonucleotide
  source 1..19: mol_type = other RNA
acaaaaccacaatatttta

SEQ ID NO: 4360 - RNA, 19 nt, synthetic construct
  misc_feature 1..19: note = Description of Artificial Sequence: Synthetic oligonucleotide
  source 1..19: mol_type = other RNA
aacaaaaccacaatatttt

SEQ ID NO: 4361 - RNA, 19 nt, synthetic construct
  misc_feature 1..19: note = Description of Artificial Sequence: Synthetic oligonucleotide
  source 1..19: mol_type = other RNA
aaacaaaaccacaatattt

SEQ ID NO: 4362 - RNA, 19 nt, synthetic construct
  misc_feature 1..19: note = Description of Artificial Sequence: Synthetic oligonucleotide
  source 1..19: mol_type = other RNA
aaaacaaaaccacaatatt

SEQ ID NO: 4363 - RNA, 19 nt, synthetic construct
  misc_feature 1..19: note = Description of Artificial Sequence: Synthetic oligonucleotide
  source 1..19: mol_type = other RNA
taaaacaaaaccacaatat

SEQ ID NO: 4364 - RNA, 19 nt, synthetic construct
  misc_feature 1..19: note = Description of Artificial Sequence: Synthetic oligonucleotide
  source 1..19: mol_type = other RNA
ttaaaacaaaaccacaata

SEQ ID NO: 4365 - RNA, 19 nt, synthetic construct
  misc_feature 1..19: note = Description of Artificial Sequence: Synthetic oligonucleotide
  source 1..19: mol_type = other RNA
tttaaaacaaaaccacaat

SEQ ID NO: 4366 - RNA, 19 nt, synthetic construct
  misc_feature 1..19: note = Description of Artificial Sequence: Synthetic oligonucleotide
  source 1..19: mol_type = other RNA
gtttaaaacaaaaccacaa

SEQ ID NO: 4367 - RNA, 19 nt, synthetic construct
  misc_feature 1..19: note = Description of Artificial Sequence: Synthetic oligonucleotide
  source 1..19: mol_type = other RNA
tgtttaaaacaaaaccaca

SEQ ID NO: 4368 - RNA, 19 nt, synthetic construct
  misc_feature 1..19: note = Description of Artificial Sequence: Synthetic oligonucleotide
  source 1..19: mol_type = other RNA
atgtttaaaacaaaaccac

SEQ ID NO: 4369 - RNA, 19 nt, synthetic construct
  misc_feature 1..19: note = Description of Artificial Sequence: Synthetic oligonucleotide
  source 1..19: mol_type = other RNA
aatgtttaaaacaaaacca

SEQ ID NO: 4370 - RNA, 19 nt, synthetic construct
  misc_feature 1..19: note = Description of Artificial Sequence: Synthetic oligonucleotide
  source 1..19: mol_type = other RNA
gaatgtttaaaacaaaacc

SEQ ID NO: 4371 - RNA, 19 nt, synthetic construct
  misc_feature 1..19: note = Description of Artificial Sequence: Synthetic oligonucleotide
  source 1..19: mol_type = other RNA
tgaatgtttaaaacaaaac

SEQ ID NO: 4372 - RNA, 19 nt, synthetic construct
  misc_feature 1..19: note = Description of Artificial Sequence: Synthetic oligonucleotide
  source 1..19: mol_type = other RNA
ttgaatgtttaaaacaaaa

SEQ ID NO: 4373 - RNA, 19 nt, synthetic construct
  misc_feature 1..19: note = Description of Artificial Sequence: Synthetic oligonucleotide
  source 1..19: mol_type = other RNA
gttgaatgtttaaaacaaa

SEQ ID NO: 4374 - RNA, 19 nt, synthetic construct
  misc_feature 1..19: note = Description of Artificial Sequence: Synthetic oligonucleotide
  source 1..19: mol_type = other RNA
cgttgaatgtttaaaacaa

SEQ ID NO: 4375 - RNA, 19 nt, synthetic construct
  misc_feature 1..19: note = Description of Artificial Sequence: Synthetic oligonucleotide
  source 1..19: mol_type = other RNA
acgttgaatgtttaaaaca

SEQ ID NO: 4376 - RNA, 19 nt, synthetic construct
  misc_feature 1..19: note = Description of Artificial Sequence: Synthetic oligonucleotide
  source 1..19: mol_type = other RNA
aacgttgaatgtttaaaac

SEQ ID NO: 4377 - RNA, 19 nt, synthetic construct
  misc_feature 1..19: note = Description of Artificial Sequence: Synthetic oligonucleotide
  source 1..19: mol_type = other RNA
aaacgttgaatgtttaaaa

SEQ ID NO: 4378 - RNA, 19 nt, synthetic construct
  misc_feature 1..19: note = Description of Artificial Sequence: Synthetic oligonucleotide
  source 1..19: mol_type = other RNA
gaaacgttgaatgtttaaa

SEQ ID NO: 4379 - RNA, 19 nt, synthetic construct
  misc_feature 1..19: note = Description of Artificial Sequence: Synthetic oligonucleotide
  source 1..19: mol_type = other RNA
agaaacgttgaatgtttaa

SEQ ID NO: 4380 - RNA, 19 nt, synthetic construct
  misc_feature 1..19: note = Description of Artificial Sequence: Synthetic oligonucleotide
  source 1..19: mol_type = other RNA
aagaaacgttgaatgttta

SEQ ID NO: 4381 - RNA, 19 nt, synthetic construct
  misc_feature 1..19: note = Description of Artificial Sequence: Synthetic oligonucleotide
  source 1..19: mol_type = other RNA
aaagaaacgttgaatgttt

SEQ ID NO: 4382 - RNA, 19 nt, synthetic construct
  misc_feature 1..19: note = Description of Artificial Sequence: Synthetic oligonucleotide
  source 1..19: mol_type = other RNA
aaaagaaacgttgaatgtt

SEQ ID NO: 4383 - RNA, 19 nt, synthetic construct
  misc_feature 1..19: note = Description of Artificial Sequence: Synthetic oligonucleotide
  source 1..19: mol_type = other RNA
gaaaagaaacgttgaatgt

SEQ ID NO: 4384 - RNA, 19 nt, synthetic construct
  misc_feature 1..19: note = Description of Artificial Sequence: Synthetic oligonucleotide
  source 1..19: mol_type = other RNA
ggaaaagaaacgttgaatg

SEQ ID NO: 4385 - RNA, 19 nt, synthetic construct
  misc_feature 1..19: note = Description of Artificial Sequence: Synthetic oligonucleotide
  source 1..19: mol_type = other RNA
aggaaaagaaacgttgaat

SEQ ID NO: 4386 - RNA, 19 nt, synthetic construct
  misc_feature 1..19: note = Description of Artificial Sequence: Synthetic oligonucleotide
  source 1..19: mol_type = other RNA
aaggaaaagaaacgttgaa

SEQ ID NO: 4387 - RNA, 19 nt, synthetic construct
  misc_feature 1..19: note = Description of Artificial Sequence: Synthetic oligonucleotide
  source 1..19: mol_type = other RNA
gaaggaaaagaaacgttga

SEQ ID NO: 4388 - RNA, 19 nt, synthetic construct
  misc_feature 1..19: note = Description of Artificial Sequence: Synthetic oligonucleotide
  source 1..19: mol_type = other RNA
agaaggaaaagaaacgttg

SEQ ID NO: 4389 - RNA, 19 nt, synthetic construct
  misc_feature 1..19: note = Description of Artificial Sequence: Synthetic oligonucleotide
  source 1..19: mol_type = other RNA
tagaaggaaaagaaacgtt

SEQ ID NO: 4390 - RNA, 19 nt, synthetic construct
  misc_feature 1..19: note = Description of Artificial Sequence: Synthetic oligonucleotide
  source 1..19: mol_type = other RNA
gtagaaggaaaagaaacgt

SEQ ID NO: 4391 - RNA, 19 nt, synthetic construct
  misc_feature 1..19: note = Description of Artificial Sequence: Synthetic oligonucleotide
  source 1..19: mol_type = other RNA
tgtagaaggaaaagaaacg

SEQ ID NO: 4392 - RNA, 19 nt, synthetic construct
  misc_feature 1..19: note = Description of Artificial Sequence: Synthetic oligonucleotide
  source 1..19: mol_type = other RNA
ttgtagaaggaaaagaaac

SEQ ID NO: 4393 - RNA, 19 nt, synthetic construct
  misc_feature 1..19: note = Description of Artificial Sequence: Synthetic oligonucleotide
  source 1..19: mol_type = other RNA
attgtagaaggaaaagaaa

SEQ ID NO: 4394 - RNA, 19 nt, synthetic construct
  misc_feature 1..19: note = Description of Artificial Sequence: Synthetic oligonucleotide
  source 1..19: mol_type = other RNA
tattgtagaaggaaaagaa

SEQ ID NO: 4395 - RNA, 19 nt, synthetic construct
  misc_feature 1..19: note = Description of Artificial Sequence: Synthetic oligonucleotide
  source 1..19: mol_type = other RNA
ttattgtagaaggaaaaga

SEQ ID NO: 4396 - RNA, 19 nt, synthetic construct
  misc_feature 1..19: note = Description of Artificial Sequence: Synthetic oligonucleotide
  source 1..19: mol_type = other RNA
tttattgtagaaggaaaag

SEQ ID NO: 4397 - RNA, 19 nt, synthetic construct
  misc_feature 1..19: note = Description of Artificial Sequence: Synthetic oligonucleotide
  source 1..19: mol_type = other RNA
gtttattgtagaaggaaaa

SEQ ID NO: 4398 - RNA, 19 nt, synthetic construct
  misc_feature 1..19: note = Description of Artificial Sequence: Synthetic oligonucleotide
  source 1..19: mol_type = other RNA
tgtttattgtagaaggaaa

SEQ ID NO: 4399 - RNA, 19 nt, synthetic construct
  misc_feature 1..19: note = Description of Artificial Sequence: Synthetic oligonucleotide
  source 1..19: mol_type = other RNA
gtgtttattgtagaaggaa

SEQ ID NO: 4400 - RNA, 19 nt, synthetic construct
  misc_feature 1..19: note = Description of Artificial Sequence: Synthetic oligonucleotide
  source 1..19: mol_type = other RNA
agtgtttattgtagaagga

SEQ ID NO: 4401 - RNA, 19 nt, synthetic construct
  misc_feature 1..19: note = Description of Artificial Sequence: Synthetic oligonucleotide
  source 1..19: mol_type = other RNA
aagtgtttattgtagaagg

SEQ ID NO: 4402 - RNA, 19 nt, synthetic construct
  misc_feature 1..19: note = Description of Artificial Sequence: Synthetic oligonucleotide
  source 1..19: mol_type = other RNA
aaagtgtttattgtagaag

SEQ ID NO: 4403 - RNA, 19 nt, synthetic construct
  misc_feature 1..19: note = Description of Artificial Sequence: Synthetic oligonucleotide
  source 1..19: mol_type = other RNA
gaaagtgtttattgtagaa

SEQ ID NO: 4404 - RNA, 19 nt, synthetic construct
  misc_feature 1..19: note = Description of Artificial Sequence: Synthetic oligonucleotide
  source 1..19: mol_type = other RNA
tgaaagtgtttattgtaga

SEQ ID NO: 4405 - RNA, 19 nt, synthetic construct
  misc_feature 1..19: note = Description of Artificial Sequence: Synthetic oligonucleotide
  source 1..19: mol_type = other RNA
ttgaaagtgtttattgtag

SEQ ID NO: 4406 - RNA, 19 nt, synthetic construct
  misc_feature 1..19: note = Description of Artificial Sequence: Synthetic oligonucleotide
  source 1..19: mol_type = other RNA
tttgaaagtgtttattgta

SEQ ID NO: 4407 - RNA, 19 nt, synthetic construct
  misc_feature 1..19: note = Description of Artificial Sequence: Synthetic oligonucleotide
  source 1..19: mol_type = other RNA
ttttgaaagtgtttattgt

SEQ ID NO: 4408 - RNA, 19 nt, synthetic construct
  misc_feature 1..19: note = Description of Artificial Sequence: Synthetic oligonucleotide
  source 1..19: mol_type = other RNA
attttgaaagtgtttattg

SEQ ID NO: 4409 - RNA, 19 nt, synthetic construct
  misc_feature 1..19: note = Description of Artificial Sequence: Synthetic oligonucleotide
  source 1..19: mol_type = other RNA
cattttgaaagtgtttatt

SEQ ID NO: 4410 - RNA, 19 nt, synthetic construct
  misc_feature 1..19: note = Description of Artificial Sequence: Synthetic oligonucleotide
  source 1..19: mol_type = other RNA
acattttgaaagtgtttat

SEQ ID NO: 4411 - RNA, 19 nt, synthetic construct
  misc_feature 1..19: note = Description of Artificial Sequence: Synthetic oligonucleotide
  source 1..19: mol_type = other RNA
cacattttgaaagtgttta

SEQ ID NO: 4412 - RNA, 19 nt, synthetic construct
  misc_feature 1..19: note = Description of Artificial Sequence: Synthetic oligonucleotide
  source 1..19: mol_type = other RNA
tcacattttgaaagtgttt

SEQ ID NO: 4413 - DNA, 20 bp, synthetic construct
  misc_feature 1..20: note = Description of Artificial Sequence: Synthetic oligonucleotide
  source 1..20: mol_type = other DNA
tcacattttgaaagtgttta

SEQ ID NO: 4414 - DNA, 20 bp, synthetic construct
  misc_feature 1..20: note = Description of Artificial Sequence: Synthetic oligonucleotide
  source 1..20: mol_type = other DNA
cacattttgaaagtgtttat

SEQ ID NO: 4415 - DNA, 20 bp, synthetic construct
  misc_feature 1..20: note = Description of Artificial Sequence: Synthetic oligonucleotide
  source 1..20: mol_type = other DNA
acattttgaaagtgtttatt

SEQ ID NO: 4416 - DNA, 20 bp, synthetic construct
  misc_feature 1..20: note = Description of Artificial Sequence: Synthetic oligonucleotide
  source 1..20: mol_type = other DNA
cattttgaaagtgtttattg

SEQ ID NO: 4417 - DNA, 20 bp, synthetic construct
  misc_feature 1..20: note = Description of Artificial Sequence: Synthetic oligonucleotide
  source 1..20: mol_type = other DNA
attttgaaagtgtttattgt

SEQ ID NO: 4418 - DNA, 20 bp, synthetic construct
  misc_feature 1..20: note = Description of Artificial Sequence: Synthetic oligonucleotide
  source 1..20: mol_type = other DNA
ttttgaaagtgtttattgta

SEQ ID NO: 4419 - DNA, 20 bp, synthetic construct
  misc_feature 1..20: note = Description of Artificial Sequence: Synthetic oligonucleotide
  source 1..20: mol_type = other DNA
tttgaaagtgtttattgtag

SEQ ID NO: 4420 - DNA, 20 bp, synthetic construct
  misc_feature 1..20: note = Description of Artificial Sequence: Synthetic oligonucleotide
  source 1..20: mol_type = other DNA
ttgaaagtgtttattgtaga

SEQ ID NO: 4421 - DNA, 20 bp, synthetic construct
  misc_feature 1..20: note = Description of Artificial Sequence: Synthetic oligonucleotide
  source 1..20: mol_type = other DNA
tgaaagtgtttattgtagaa

SEQ ID NO: 4422 - DNA, 20 bp, synthetic construct
  misc_feature 1..20: note = Description of Artificial Sequence: Synthetic oligonucleotide
  source 1..20: mol_type = other DNA
gaaagtgtttattgtagaag

SEQ ID NO: 4423 - DNA, 20 bp, synthetic construct
  misc_feature 1..20: note = Description of Artificial Sequence: Synthetic oligonucleotide
  source 1..20: mol_type = other DNA
aaagtgtttattgtagaagg

SEQ ID NO: 4424 - DNA, 20 bp, synthetic construct
  misc_feature 1..20: note = Description of Artificial Sequence: Synthetic oligonucleotide
  source 1..20: mol_type = other DNA
aagtgtttattgtagaagga

SEQ ID NO: 4425 - DNA, 20 bp, synthetic construct
  misc_feature 1..20: note = Description of Artificial Sequence: Synthetic oligonucleotide
  source 1..20: mol_type = other DNA
agtgtttattgtagaaggaa

SEQ ID NO: 4426 - DNA, 20 bp, synthetic construct
  misc_feature 1..20: note = Description of Artificial Sequence: Synthetic oligonucleotide
  source 1..20: mol_type = other DNA
gtgtttattgtagaaggaaa

SEQ ID NO: 4427 - DNA, 20 bp, synthetic construct
  misc_feature 1..20: note = Description of Artificial Sequence: Synthetic oligonucleotide
  source 1..20: mol_type = other DNA
tgtttattgtagaaggaaaa

SEQ ID NO: 4428 - DNA, 20 bp, synthetic construct
  misc_feature 1..20: note = Description of Artificial Sequence: Synthetic oligonucleotide
  source 1..20: mol_type = other DNA
gtttattgtagaaggaaaag

SEQ ID NO: 4429 - DNA, 20 bp, synthetic construct
  misc_feature 1..20: note = Description of Artificial Sequence: Synthetic oligonucleotide
  source 1..20: mol_type = other DNA
tttattgtagaaggaaaaga

SEQ ID NO: 4430 - DNA, 20 bp, synthetic construct
  misc_feature 1..20: note = Description of Artificial Sequence: Synthetic oligonucleotide
  source 1..20: mol_type = other DNA
ttattgtagaaggaaaagaa

SEQ ID NO: 4431 - DNA, 20 bp, synthetic construct
  misc_feature 1..20: note = Description of Artificial Sequence: Synthetic oligonucleotide
  source 1..20: mol_type = other DNA
tattgtagaaggaaaagaaa

SEQ ID NO: 4432 - DNA, 20 bp, synthetic construct
  misc_feature 1..20: note = Description of Artificial Sequence: Synthetic oligonucleotide
  source 1..20: mol_type = other DNA
attgtagaaggaaaagaaac

SEQ ID NO: 4433 - DNA, 20 bp, synthetic construct
  misc_feature 1..20: note = Description of Artificial Sequence: Synthetic oligonucleotide
  source 1..20: mol_type = other DNA
ttgtagaaggaaaagaaacg

SEQ ID NO: 4434 - DNA, 20 bp, synthetic construct
  misc_feature 1..20: note = Description of Artificial Sequence: Synthetic oligonucleotide
  source 1..20: mol_type = other DNA
tgtagaaggaaaagaaacgt

SEQ ID NO: 4435 - DNA, 20 bp, synthetic construct
  misc_feature 1..20: note = Description of Artificial Sequence: Synthetic oligonucleotide
  source 1..20: mol_type = other DNA
gtagaaggaaaagaaacgtt

SEQ ID NO: 4436 - DNA, 20 bp, synthetic construct
  misc_feature 1..20: note = Description of Artificial Sequence: Synthetic oligonucleotide
  source 1..20: mol_type = other DNA
tagaaggaaaagaaacgttg

SEQ ID NO: 4437 - DNA, 20 bp, synthetic construct
  misc_feature 1..20: note = Description of Artificial Sequence: Synthetic oligonucleotide
  source 1..20: mol_type = other DNA
agaaggaaaagaaacgttga

SEQ ID NO: 4438 - DNA, 20 bp, synthetic construct
  misc_feature 1..20: note = Description of Artificial Sequence: Synthetic oligonucleotide
  source 1..20: mol_type = other DNA
gaaggaaaagaaacgttgaa

SEQ ID NO: 4439 - DNA, 20 bp, synthetic construct
  misc_feature 1..20: note = Description of Artificial Sequence: Synthetic oligonucleotide
  source 1..20: mol_type = other DNA
aaggaaaagaaacgttgaat

SEQ ID NO: 4440 - DNA, 20 bp, synthetic construct
  misc_feature 1..20: note = Description of Artificial Sequence: Synthetic oligonucleotide
  source 1..20: mol_type = other DNA
aggaaaagaaacgttgaatg

SEQ ID NO: 4441 - DNA, 20 bp, synthetic construct
  misc_feature 1..20: note = Description of Artificial Sequence: Synthetic oligonucleotide
  source 1..20: mol_type = other DNA
ggaaaagaaacgttgaatgt

SEQ ID NO: 4442 - DNA, 20 bp, synthetic construct
  misc_feature 1..20: note = Description of Artificial Sequence: Synthetic oligonucleotide
  source 1..20: mol_type = other DNA
gaaaagaaacgttgaatgtt

SEQ ID NO: 4443 - DNA, 20 bp, synthetic construct
  misc_feature 1..20: note = Description of Artificial Sequence: Synthetic oligonucleotide
  source 1..20: mol_type = other DNA
aaaagaaacgttgaatgttt

SEQ ID NO: 4444 - DNA, 20 bp, synthetic construct
  misc_feature 1..20: note = Description of Artificial Sequence: Synthetic oligonucleotide
  source 1..20: mol_type = other DNA
aaagaaacgttgaatgttta

SEQ ID NO: 4445 - DNA, 20 bp, synthetic construct
  misc_feature 1..20: note = Description of Artificial Sequence: Synthetic oligonucleotide
  source 1..20: mol_type = other DNA
aagaaacgttgaatgtttaa

SEQ ID NO: 4446 - DNA, 20 bp, synthetic construct
  misc_feature 1..20: note = Description of Artificial Sequence: Synthetic oligonucleotide
  source 1..20: mol_type = other DNA
agaaacgttgaatgtttaaa

SEQ ID NO: 4447 - DNA, 20 bp, synthetic construct
  misc_feature 1..20: note = Description of Artificial Sequence: Synthetic oligonucleotide
  source 1..20: mol_type = other DNA
gaaacgttgaatgtttaaaa

SEQ ID NO: 4448 - DNA, 20 bp, synthetic construct
  misc_feature 1..20: note = Description of Artificial Sequence: Synthetic oligonucleotide
  source 1..20: mol_type = other DNA
aaacgttgaatgtttaaaac

SEQ ID NO: 4449 - DNA, 20 bp, synthetic construct
  misc_feature 1..20: note = Description of Artificial Sequence: Synthetic oligonucleotide
  source 1..20: mol_type = other DNA
aacgttgaatgtttaaaaca

SEQ ID NO: 4450 - DNA, 20 bp, synthetic construct
  misc_feature 1..20: note = Description of Artificial Sequence: Synthetic oligonucleotide
  source 1..20: mol_type = other DNA
acgttgaatgtttaaaacaa

SEQ ID NO: 4451 - DNA, 20 bp, synthetic construct
  misc_feature 1..20: note = Description of Artificial Sequence: Synthetic oligonucleotide
  source 1..20: mol_type = other DNA
cgttgaatgtttaaaacaaa

SEQ ID NO: 4452 - DNA, 20 bp, synthetic construct
  misc_feature 1..20: note = Description of Artificial Sequence: Synthetic oligonucleotide
  source 1..20: mol_type = other DNA
gttgaatgtttaaaacaaaa

SEQ ID NO: 4453 - DNA, 20 bp, synthetic construct
  misc_feature 1..20: note = Description of Artificial Sequence: Synthetic oligonucleotide
  source 1..20: mol_type = other DNA
ttgaatgtttaaaacaaaac

SEQ ID NO: 4454 - DNA, 20 bp, synthetic construct
  misc_feature 1..20: note = Description of Artificial Sequence: Synthetic oligonucleotide
  source 1..20: mol_type = other DNA
tgaatgtttaaaacaaaacc

SEQ ID NO: 4455 - DNA, 20 bp, synthetic construct
  misc_feature 1..20: note = Description of Artificial Sequence: Synthetic oligonucleotide
  source 1..20: mol_type = other DNA
gaatgtttaaaacaaaacca

SEQ ID NO: 4456 - DNA, 20 bp, synthetic construct
  misc_feature 1..20: note = Description of Artificial Sequence: Synthetic oligonucleotide
  source 1..20: mol_type = other DNA
aatgtttaaaacaaaaccac

SEQ ID NO: 4457 - DNA, 20 bp, synthetic construct
  misc_feature 1..20: note = Description of Artificial Sequence: Synthetic oligonucleotide
  source 1..20: mol_type = other DNA
atgtttaaaacaaaaccaca

SEQ ID NO: 4458 - DNA, 20 bp, synthetic construct
  misc_feature 1..20: note = Description of Artificial Sequence: Synthetic oligonucleotide
  source 1..20: mol_type = other DNA
tgtttaaaacaaaaccacaa

SEQ ID NO: 4459 - DNA, 20 bp, synthetic construct
  misc_feature 1..20: note = Description of Artificial Sequence: Synthetic oligonucleotide
  source 1..20: mol_type = other DNA
gtttaaaacaaaaccacaat

SEQ ID NO: 4460 - DNA, 20 bp, synthetic construct
  misc_feature 1..20: note = Description of Artificial Sequence: Synthetic oligonucleotide
  source 1..20: mol_type = other DNA
tttaaaacaaaaccacaata

SEQ ID NO: 4461 - DNA, 20 bp, synthetic construct
  misc_feature 1..20: note = Description of Artificial Sequence: Synthetic oligonucleotide
  source 1..20: mol_type = other DNA
ttaaaacaaaaccacaatat

SEQ ID NO: 4462 - DNA, 20 bp, synthetic construct
  misc_feature 1..20: note = Description of Artificial Sequence: Synthetic oligonucleotide
  source 1..20: mol_type = other DNA
taaaacaaaaccacaatatt

SEQ ID NO: 4463 - DNA, 20 bp, synthetic construct
  misc_feature 1..20: note = Description of Artificial Sequence: Synthetic oligonucleotide
  source 1..20: mol_type = other DNA
aaaacaaaaccacaatattt

SEQ ID NO: 4464 - DNA, 20 bp, synthetic construct
  misc_feature 1..20: note = Description of Artificial Sequence: Synthetic oligonucleotide
  source 1..20: mol_type = other DNA
aaacaaaaccacaatatttt

SEQ ID NO: 4465 - DNA, 20 bp, synthetic construct
  misc_feature 1..20: note = Description of Artificial Sequence: Synthetic oligonucleotide
  source 1..20: mol_type = other DNA
aacaaaaccacaatatttta

SEQ ID NO: 4466 - DNA, 20 bp, synthetic construct
  misc_feature 1..20: note = Description of Artificial Sequence: Synthetic oligonucleotide
  source 1..20: mol_type = other DNA
acaaaaccacaatattttat

SEQ ID NO: 4467 - DNA, 20 bp, synthetic construct
  misc_feature 1..20: note = Description of Artificial Sequence: Synthetic oligonucleotide
  source 1..20: mol_type = other DNA
caaaaccacaatattttatt

SEQ ID NO: 4468 - DNA, 20 bp, synthetic construct
  misc_feature 1..20: note = Description of Artificial Sequence: Synthetic oligonucleotide
  source 1..20: mol_type = other DNA
aaaaccacaatattttattt

SEQ ID NO: 4469 - DNA, 20 bp, synthetic construct
  misc_feature 1..20: note = Description of Artificial Sequence: Synthetic oligonucleotide
  source 1..20: mol_type = other DNA
aaaccacaatattttatttt

SEQ ID NO: 4470 - DNA, 20 bp, synthetic construct
  misc_feature 1..20: note = Description of Artificial Sequence: Synthetic oligonucleotide
  source 1..20: mol_type = other DNA
aaccacaatattttattttt

SEQ ID NO: 4471 - DNA, 20 bp, synthetic construct
  misc_feature 1..20: note = Description of Artificial Sequence: Synthetic oligonucleotide
  source 1..20: mol_type = other DNA
accacaatattttattttta

SEQ ID NO: 4472 - DNA, 20 bp, synthetic construct
  misc_feature 1..20: note = Description of Artificial Sequence: Synthetic oligonucleotide
  source 1..20: mol_type = other DNA
ccacaatattttatttttac

SEQ ID NO: 4473 - DNA, 20 bp, synthetic construct
  misc_feature 1..20: note = Description of Artificial Sequence: Synthetic oligonucleotide
  source 1..20: mol_type = other DNA
cacaatattttatttttaca

SEQ ID NO: 4474 - DNA, 20 bp, synthetic construct
  misc_feature 1..20: note = Description of Artificial Sequence: Synthetic oligonucleotide
  source 1..20: mol_type = other DNA
acaatattttatttttacaa

SEQ ID NO: 4475 - DNA, 20 bp, synthetic construct
  misc_feature 1..20: note = Description of Artificial Sequence: Synthetic oligonucleotide
  source 1..20: mol_type = other DNA
caatattttatttttacaaa

SEQ ID NO: 4476 - DNA, 20 bp, synthetic construct
  misc_feature 1..20: note = Description of Artificial Sequence: Synthetic oligonucleotide
  source 1..20: mol_type = other DNA
aatattttatttttacaaag

SEQ ID NO: 4477 - DNA, 20 bp, synthetic construct
  misc_feature 1..20: note = Description of Artificial Sequence: Synthetic oligonucleotide
  source 1..20: mol_type = other DNA
atattttatttttacaaagt

SEQ ID NO: 4478 - DNA, 20 bp, synthetic construct
  misc_feature 1..20: note = Description of Artificial Sequence: Synthetic oligonucleotide
  source 1..20: mol_type = other DNA
tattttatttttacaaagtg

SEQ ID NO: 4479 - DNA, 20 bp, synthetic construct
  misc_feature 1..20: note = Description of Artificial Sequence: Synthetic oligonucleotide
  source 1..20: mol_type = other DNA
attttatttttacaaagtga

SEQ ID NO: 4480 - DNA, 20 bp, synthetic construct
  misc_feature 1..20: note = Description of Artificial Sequence: Synthetic oligonucleotide
  source 1..20: mol_type = other DNA
ttttatttttacaaagtgag

SEQ ID NO: 4481 - DNA, 20 bp, synthetic construct
  misc_feature 1..20: note = Description of Artificial Sequence: Synthetic oligonucleotide
  source 1..20: mol_type = other DNA
tttatttttacaaagtgaga

SEQ ID NO: 4482 - DNA, 20 bp, synthetic construct
  misc_feature 1..20: note = Description of Artificial Sequence: Synthetic oligonucleotide
  source 1..20: mol_type = other DNA
ttatttttacaaagtgagat

SEQ ID NO: 4483 - DNA, 20 bp, synthetic construct
  misc_feature 1..20: note = Description of Artificial Sequence: Synthetic oligonucleotide
  source 1..20: mol_type = other DNA
tatttttacaaagtgagatg

SEQ ID NO: 4484 - DNA, 20 bp, synthetic construct
  misc_feature 1..20: note = Description of Artificial Sequence: Synthetic oligonucleotide
  source 1..20: mol_type = other DNA
atttttacaaagtgagatgc

SEQ ID NO: 4485 - DNA, 20 bp, synthetic construct
  misc_feature 1..20: note = Description of Artificial Sequence: Synthetic oligonucleotide
  source 1..20: mol_type = other DNA
tttttacaaagtgagatgct

SEQ ID NO: 4486 - DNA, 20 bp, synthetic construct
  misc_feature 1..20: note = Description of Artificial Sequence: Synthetic oligonucleotide
  source 1..20: mol_type = other DNA
ttttacaaagtgagatgctt

SEQ ID NO: 4487 - DNA, 20 bp, synthetic construct
  misc_feature 1..20: note = Description of Artificial Sequence: Synthetic oligonucleotide
  source 1..20: mol_type = other DNA
tttacaaagtgagatgctta

SEQ ID NO: 4488 - DNA, 20 bp, synthetic construct
  misc_feature 1..20: note = Description of Artificial Sequence: Synthetic oligonucleotide
  source 1..20: mol_type = other DNA
ttacaaagtgagatgcttat

SEQ ID NO: 4489 - DNA, 20 bp, synthetic construct
  misc_feature 1..20: note = Description of Artificial Sequence: Synthetic oligonucleotide
  source 1..20: mol_type = other DNA
tacaaagtgagatgcttatt

SEQ ID NO: 4490 - DNA, 20 bp, synthetic construct
  misc_feature 1..20: note = Description of Artificial Sequence: Synthetic oligonucleotide
  source 1..20: mol_type = other DNA
acaaagtgagatgcttattt

SEQ ID NO: 4491 - DNA, 20 bp, synthetic construct
  misc_feature 1..20: note = Description of Artificial Sequence: Synthetic oligonucleotide
  source 1..20: mol_type = other DNA
caaagtgagatgcttattta

SEQ ID NO: 4492 - DNA, 20 bp, synthetic construct
  misc_feature 1..20: note = Description of Artificial Sequence: Synthetic oligonucleotide
  source 1..20: mol_type = other DNA
aaagtgagatgcttatttac

SEQ ID NO: 4493 - DNA, 20 bp, synthetic construct
  misc_feature 1..20: note = Description of Artificial Sequence: Synthetic oligonucleotide
  source 1..20: mol_type = other DNA
aagtgagatgcttatttaca

SEQ ID NO: 4494 - DNA, 20 bp, synthetic construct
  misc_feature 1..20: note = Description of Artificial Sequence: Synthetic oligonucleotide
  source 1..20: mol_type = other DNA
agtgagatgcttatttacag

SEQ ID NO: 4495 - DNA, 20 bp, synthetic construct
  misc_feature 1..20: note = Description of Artificial Sequence: Synthetic oligonucleotide
  source 1..20: mol_type = other DNA
gtgagatgcttatttacagc

SEQ ID NO: 4496 - DNA, 20 bp, synthetic construct
  misc_feature 1..20: note = Description of Artificial Sequence: Synthetic oligonucleotide
  source 1..20: mol_type = other DNA
tgagatgcttatttacagca

SEQ ID NO: 4497 - DNA, 20 bp, synthetic construct
  misc_feature 1..20: note = Description of Artificial Sequence: Synthetic oligonucleotide
  source 1..20: mol_type = other DNA
gagatgcttatttacagcat

SEQ ID NO: 4498 - DNA, 20 bp, synthetic construct
  misc_feature 1..20: note = Description of Artificial Sequence: Synthetic oligonucleotide
  source 1..20: mol_type = other DNA
agatgcttatttacagcatt

SEQ ID NO: 4499 - DNA, 20 bp, synthetic construct
  misc_feature 1..20: note = Description of Artificial Sequence: Synthetic oligonucleotide
  source 1..20: mol_type = other DNA
gatgcttatttacagcattt

SEQ ID NO: 4500 - DNA, 20 bp, synthetic construct
  misc_feature 1..20: note = Description of Artificial Sequence: Synthetic oligonucleotide
  source 1..20: mol_type = other DNA
atgcttatttacagcattta

SEQ ID NO: 4501 - DNA, 20 bp, synthetic construct
  misc_feature 1..20: note = Description of Artificial Sequence: Synthetic oligonucleotide
  source 1..20: mol_type = other DNA
tgcttatttacagcatttat

SEQ ID NO: 4502 - DNA, 20 bp, synthetic construct
  misc_feature 1..20: note = Description of Artificial Sequence: Synthetic oligonucleotide
  source 1..20: mol_type = other DNA
gcttatttacagcatttatt

SEQ ID NO: 4503 - DNA, 20 bp, synthetic construct
  misc_feature 1..20: note = Description of Artificial Sequence: Synthetic oligonucleotide
  source 1..20: mol_type = other DNA
cttatttacagcatttatta

SEQ ID NO: 4504 - DNA, 20 bp, synthetic construct
  misc_feature 1..20: note = Description of Artificial Sequence: Synthetic oligonucleotide
  source 1..20: mol_type = other DNA
ttatttacagcatttattat

SEQ ID NO: 4505 - DNA, 20 bp, synthetic construct
  misc_feature 1..20: note = Description of Artificial Sequence: Synthetic oligonucleotide
  source 1..20: mol_type = other DNA
tatttacagcatttattatt

SEQ ID NO: 4506 - DNA, 20 bp, synthetic construct
  misc_feature 1..20: note = Description of Artificial Sequence: Synthetic oligonucleotide
  source 1..20: mol_type = other DNA
atttacagcatttattatta

SEQ ID NO: 4507 - DNA, 20 bp, synthetic construct
  misc_feature 1..20: note = Description of Artificial Sequence: Synthetic oligonucleotide
  source 1..20: mol_type = other DNA
tttacagcatttattattaa

SEQ ID NO: 4508 - DNA, 20 bp, synthetic construct
  misc_feature 1..20: note = Description of Artificial Sequence: Synthetic oligonucleotide
  source 1..20: mol_type = other DNA
ttacagcatttattattaac

SEQ ID NO: 4509 - DNA, 20 bp, synthetic construct
  misc_feature 1..20: note = Description of Artificial Sequence: Synthetic oligonucleotide
  source 1..20: mol_type = other DNA
tacagcatttattattaact

SEQ ID NO: 4510 - DNA, 20 bp, synthetic construct
  misc_feature 1..20: note = Description of Artificial Sequence: Synthetic oligonucleotide
  source 1..20: mol_type = other DNA
acagcatttattattaacta

SEQ ID NO: 4511 - DNA, 20 bp, synthetic construct
  misc_feature 1..20: note = Description of Artificial Sequence: Synthetic oligonucleotide
  source 1..20: mol_type = other DNA
cagcatttattattaactat

SEQ ID NO: 4512 - DNA, 20 bp, synthetic construct
  misc_feature 1..20: note = Description of Artificial Sequence: Synthetic oligonucleotide
  source 1..20: mol_type = other DNA
agcatttattattaactata

SEQ ID NO: 4513 - DNA, 20 bp, synthetic construct
  misc_feature 1..20: note = Description of Artificial Sequence: Synthetic oligonucleotide
  source 1..20: mol_type = other DNA
gcatttattattaactataa

SEQ ID NO: 4514 - DNA, 20 bp, synthetic construct
  misc_feature 1..20: note = Description of Artificial Sequence: Synthetic oligonucleotide
  source 1..20: mol_type = other DNA
catttattattaactataac

SEQ ID NO: 4515 - DNA, 20 bp, synthetic construct
  misc_feature 1..20: note = Description of Artificial Sequence: Synthetic oligonucleotide
  source 1..20: mol_type = other DNA
atttattattaactataaca

SEQ ID NO: 4516 - DNA, 20 bp, synthetic construct
  misc_feature 1..20: note = Description of Artificial Sequence: Synthetic oligonucleotide
  source 1..20: mol_type = other DNA
tttattattaactataacac

SEQ ID NO: 4517 - DNA, 20 bp, synthetic construct
  misc_feature 1..20: note = Description of Artificial Sequence: Synthetic oligonucleotide
  source 1..20: mol_type = other DNA
ttattattaactataacacc

SEQ ID NO: 4518 - DNA, 20 bp, synthetic construct
  misc_feature 1..20: note = Description of Artificial Sequence: Synthetic oligonucleotide
  source 1..20: mol_type = other DNA
tattattaactataacacca

SEQ ID NO: 4519 - DNA, 20 bp, synthetic construct
  misc_feature 1..20: note = Description of Artificial Sequence: Synthetic oligonucleotide
  source 1..20: mol_type = other DNA
attattaactataacaccat

SEQ ID NO: 4520 - DNA, 20 bp, synthetic construct
  misc_feature 1..20: note = Description of Artificial Sequence: Synthetic oligonucleotide
  source 1..20: mol_type = other DNA
ttattaactataacaccatc

SEQ ID NO: 4521 - DNA, 20 bp, synthetic construct
  misc_feature 1..20: note = Description of Artificial Sequence: Synthetic oligonucleotide
  source 1..20: mol_type = other DNA
tattaactataacaccatct

SEQ ID NO: 4522 - DNA, 20 bp, synthetic construct
  misc_feature 1..20: note = Description of Artificial Sequence: Synthetic oligonucleotide
  source 1..20: mol_type = other DNA
attaactataacaccatcta

SEQ ID NO: 4523 - DNA, 20 bp, synthetic construct
  misc_feature 1..20: note = Description of Artificial Sequence: Synthetic oligonucleotide
  source 1..20: mol_type = other DNA
ttaactataacaccatctac

SEQ ID NO: 4524 - DNA, 20 bp, synthetic construct
  misc_feature 1..20: note = Description of Artificial Sequence: Synthetic oligonucleotide
  source 1..20: mol_type = other DNA
taactataacaccatctacc

SEQ ID NO: 4525 - DNA, 20 bp, synthetic construct
  misc_feature 1..20: note = Description of Artificial Sequence: Synthetic oligonucleotide
  source 1..20: mol_type = other DNA
aactataacaccatctacct

SEQ ID NO: 4526 - DNA, 20 bp, synthetic construct
  misc_feature 1..20: note = Description of Artificial Sequence: Synthetic oligonucleotide
  source 1..20: mol_type = other DNA
actataacaccatctacctt

SEQ ID NO: 4527 - DNA, 20 bp, synthetic construct
  misc_feature 1..20: note = Description of Artificial Sequence: Synthetic oligonucleotide
  source 1..20: mol_type = other DNA
ctataacaccatctaccttc

SEQ ID NO: 4528 - DNA, 20 bp, synthetic construct
  misc_feature 1..20: note = Description of Artificial Sequence: Synthetic oligonucleotide
  source 1..20: mol_type = other DNA
tataacaccatctaccttca

SEQ ID NO: 4529 - DNA, 20 bp, synthetic construct
  misc_feature 1..20: note = Description of Artificial Sequence: Synthetic oligonucleotide
  source 1..20: mol_type = other DNA
ataacaccatctaccttcag

SEQ ID NO: 4530 - DNA, 20 bp, synthetic construct
  misc_feature 1..20: note = Description of Artificial Sequence: Synthetic oligonucleotide
  source 1..20: mol_type = other DNA
taacaccatctaccttcagt

SEQ ID NO: 4531 - DNA, 20 bp, synthetic construct
  misc_feature 1..20: note = Description of Artificial Sequence: Synthetic oligonucleotide
  source 1..20: mol_type = other DNA
aacaccatctaccttcagtt

SEQ ID NO: 4532 - DNA, 20 bp, synthetic construct
  misc_feature 1..20: note = Description of Artificial Sequence: Synthetic oligonucleotide
  source 1..20: mol_type = other DNA
acaccatctaccttcagttt

SEQ ID NO: 4533 - DNA, 20 bp, synthetic construct
  misc_feature 1..20: note = Description of Artificial Sequence: Synthetic oligonucleotide
  source 1..20: mol_type = other DNA
caccatctaccttcagtttt

SEQ ID NO: 4534 - DNA, 20 bp, synthetic construct
  misc_feature 1..20: note = Description of Artificial Sequence: Synthetic oligonucleotide
  source 1..20: mol_type = other DNA
accatctaccttcagttttc

SEQ ID NO: 4535 - DNA, 20 bp, synthetic construct
  misc_feature 1..20: note = Description of Artificial Sequence: Synthetic oligonucleotide
  source 1..20: mol_type = other DNA
ccatctaccttcagttttca

SEQ ID NO: 4536 - DNA, 20 bp, synthetic construct
  misc_feature 1..20: note = Description of Artificial Sequence: Synthetic oligonucleotide
  source 1..20: mol_type = other DNA
catctaccttcagttttcaa

SEQ ID NO: 4537 - DNA, 20 bp, synthetic construct
  misc_feature 1..20: note = Description of Artificial Sequence: Synthetic oligonucleotide
  source 1..20: mol_type = other DNA
atctaccttcagttttcaac

SEQ ID NO: 4538 - DNA, 20 bp, synthetic construct
  misc_feature 1..20: note = Description of Artificial Sequence: Synthetic oligonucleotide
  source 1..20: mol_type = other DNA
tctaccttcagttttcaacc

SEQ ID NO: 4539 - DNA, 20 bp, synthetic construct
  misc_feature 1..20: note = Description of Artificial Sequence: Synthetic oligonucleotide
  source 1..20: mol_type = other DNA
ctaccttcagttttcaacca

SEQ ID NO: 4540 - DNA, 20 bp, synthetic construct
  misc_feature 1..20: note = Description of Artificial Sequence: Synthetic oligonucleotide
  source 1..20: mol_type = other DNA
taccttcagttttcaaccat

SEQ ID NO: 4541 - DNA, 20 bp, synthetic construct
  misc_feature 1..20: note = Description of Artificial Sequence: Synthetic oligonucleotide
  source 1..20: mol_type = other DNA
accttcagttttcaaccatt

SEQ ID NO: 4542 - DNA, 20 bp, synthetic construct
  misc_feature 1..20: note = Description of Artificial Sequence: Synthetic oligonucleotide
  source 1..20: mol_type = other DNA
ccttcagttttcaaccattt

SEQ ID NO: 4543 - DNA, 20 bp, synthetic construct
  misc_feature 1..20: note = Description of Artificial Sequence: Synthetic oligonucleotide
  source 1..20: mol_type = other DNA
cttcagttttcaaccatttc

SEQ ID NO: 4544 - DNA, 20 bp, synthetic construct
  misc_feature 1..20: note = Description of Artificial Sequence: Synthetic oligonucleotide
  source 1..20: mol_type = other DNA
ttcagttttcaaccatttcc

SEQ ID NO: 4545 - DNA, 20 bp, synthetic construct
  misc_feature 1..20: note = Description of Artificial Sequence: Synthetic oligonucleotide
  source 1..20: mol_type = other DNA
tcagttttcaaccatttcct

SEQ ID NO: 4546 - DNA, 20 bp, synthetic construct
  misc_feature 1..20: note = Description of Artificial Sequence: Synthetic oligonucleotide
  source 1..20: mol_type = other DNA
cagttttcaaccatttccta

SEQ ID NO: 4547 - DNA, 20 bp, synthetic construct
  misc_feature 1..20: note = Description of Artificial Sequence: Synthetic oligonucleotide
  source 1..20: mol_type = other DNA
agttttcaaccatttcctac

SEQ ID NO: 4548 - DNA, 20 bp, synthetic construct
  misc_feature 1..20: note = Description of Artificial Sequence: Synthetic oligonucleotide
  source 1..20: mol_type = other DNA
gttttcaaccatttcctaca

SEQ ID NO: 4549 - DNA, 20 bp, synthetic construct
  misc_feature 1..20: note = Description of Artificial Sequence: Synthetic oligonucleotide
  source 1..20: mol_type = other DNA
ttttcaaccatttcctacag

SEQ ID NO: 4550 - DNA, 20 bp, synthetic construct
  misc_feature 1..20: note = Description of Artificial Sequence: Synthetic oligonucleotide
  source 1..20: mol_type = other DNA
tttcaaccatttcctacaga

SEQ ID NO: 4551 - DNA, 20 bp, synthetic construct
  misc_feature 1..20: note = Description of Artificial Sequence: Synthetic oligonucleotide
  source 1..20: mol_type = other DNA
ttcaaccatttcctacagac

SEQ ID NO: 4552 - DNA, 20 bp, synthetic construct
  misc_feature 1..20: note = Description of Artificial Sequence: Synthetic oligonucleotide
  source 1..20: mol_type = other DNA
tcaaccatttcctacagaca

SEQ ID NO: 4553 - DNA, 20 bp, synthetic construct
  misc_feature 1..20: note = Description of Artificial Sequence: Synthetic oligonucleotide
  source 1..20: mol_type = other DNA
caaccatttcctacagacaa

SEQ ID NO: 4554 - DNA, 20 bp, synthetic construct
  misc_feature 1..20: note = Description of Artificial Sequence: Synthetic oligonucleotide
  source 1..20: mol_type = other DNA
aaccatttcctacagacaaa

SEQ ID NO: 4555 - DNA, 20 bp, synthetic construct
  misc_feature 1..20: note = Description of Artificial Sequence: Synthetic oligonucleotide
  source 1..20: mol_type = other DNA
accatttcctacagacaaaa

SEQ ID NO: 4556 - DNA, 20 bp, synthetic construct
  misc_feature 1..20: note = Description of Artificial Sequence: Synthetic oligonucleotide
  source 1..20: mol_type = other DNA
ccatttcctacagacaaaat

SEQ ID NO: 4557 - DNA, 20 bp, synthetic construct
  misc_feature 1..20: note = Description of Artificial Sequence: Synthetic oligonucleotide
  source 1..20: mol_type = other DNA
catttcctacagacaaaatt

SEQ ID NO: 4558 - DNA, 20 bp, synthetic construct
  misc_feature 1..20: note = Description of Artificial Sequence: Synthetic oligonucleotide
  source 1..20: mol_type = other DNA
atttcctacagacaaaattt

SEQ ID NO: 4559 - DNA, 20 bp, synthetic construct
  misc_feature 1..20: note = Description of Artificial Sequence: Synthetic oligonucleotide
  source 1..20: mol_type = other DNA
tttcctacagacaaaattta

SEQ ID NO: 4560 - DNA, 20 bp, synthetic construct
  misc_feature 1..20: note = Description of Artificial Sequence: Synthetic oligonucleotide
  source 1..20: mol_type = other DNA
ttcctacagacaaaatttaa

SEQ ID NO: 4561 - DNA, 20 bp, synthetic construct
  misc_feature 1..20: note = Description of Artificial Sequence: Synthetic oligonucleotide
  source 1..20: mol_type = other DNA
tcctacagacaaaatttaaa

SEQ ID NO: 4562 - DNA, 20 bp, synthetic construct
  misc_feature 1..20: note = Description of Artificial Sequence: Synthetic oligonucleotide
  source 1..20: mol_type = other DNA
cctacagacaaaatttaaaa

SEQ ID NO: 4563 - DNA, 20 bp, synthetic construct
  misc_feature 1..20: note = Description of Artificial Sequence: Synthetic oligonucleotide
  source 1..20: mol_type = other DNA
ctacagacaaaatttaaaag

SEQ ID NO: 4564 - DNA, 20 bp, synthetic construct
  misc_feature 1..20: note = Description of Artificial Sequence: Synthetic oligonucleotide
  source 1..20: mol_type = other DNA
tacagacaaaatttaaaagg

SEQ ID NO: 4565 - DNA, 20 bp, synthetic construct
  misc_feature 1..20: note = Description of Artificial Sequence: Synthetic oligonucleotide
  source 1..20: mol_type = other DNA
acagacaaaatttaaaagga

SEQ ID NO: 4566 - DNA, 20 bp, synthetic construct
  misc_feature 1..20: note = Description of Artificial Sequence: Synthetic oligonucleotide
  source 1..20: mol_type = other DNA
cagacaaaatttaaaaggaa

SEQ ID NO: 4567 - DNA, 20 bp, synthetic construct
  misc_feature 1..20: note = Description of Artificial Sequence: Synthetic oligonucleotide
  source 1..20: mol_type = other DNA
agacaaaatttaaaaggaag

SEQ ID NO: 4568 - DNA, 20 bp, synthetic construct
  misc_feature 1..20: note = Description of Artificial Sequence: Synthetic oligonucleotide
  source 1..20: mol_type = other DNA
gacaaaatttaaaaggaagc

SEQ ID NO: 4569 - DNA, 20 bp, synthetic construct
  misc_feature 1..20: note = Description of Artificial Sequence: Synthetic oligonucleotide
  source 1..20: mol_type = other DNA
acaaaatttaaaaggaagct

SEQ ID NO: 4570 - DNA, 20 bp, synthetic construct
  misc_feature 1..20: note = Description of Artificial Sequence: Synthetic oligonucleotide
  source 1..20: mol_type = other DNA
caaaatttaaaaggaagctc

SEQ ID NO: 4571 - DNA, 20 bp, synthetic construct
  misc_feature 1..20: note = Description of Artificial Sequence: Synthetic oligonucleotide
  source 1..20: mol_type = other DNA
aaaatttaaaaggaagctcc

SEQ ID NO: 4572 - DNA, 20 bp, synthetic construct
  misc_feature 1..20: note = Description of Artificial Sequence: Synthetic oligonucleotide
  source 1..20: mol_type = other DNA
aaatttaaaaggaagctcct

SEQ ID NO: 4573 - DNA, 20 bp, synthetic construct
  misc_feature 1..20: note = Description of Artificial Sequence: Synthetic oligonucleotide
  source 1..20: mol_type = other DNA
aatttaaaaggaagctcctt

SEQ ID NO: 4574 - DNA, 20 bp, synthetic construct
  misc_feature 1..20: note = Description of Artificial Sequence: Synthetic oligonucleotide
  source 1..20: mol_type = other DNA
atttaaaaggaagctccttg

SEQ ID NO: 4575 - DNA, 20 bp, synthetic construct
  misc_feature 1..20: note = Description of Artificial Sequence: Synthetic oligonucleotide
  source 1..20: mol_type = other DNA
tttaaaaggaagctccttga

SEQ ID NO: 4576 - DNA, 20 bp, synthetic construct
  misc_feature 1..20: note = Description of Artificial Sequence: Synthetic oligonucleotide
  source 1..20: mol_type = other DNA
ttaaaaggaagctccttgag

SEQ ID NO: 4577 - DNA, 20 bp, synthetic construct
  misc_feature 1..20: note = Description of Artificial Sequence: Synthetic oligonucleotide
  source 1..20: mol_type = other DNA
taaaaggaagctccttgagc

SEQ ID NO: 4578 - DNA, 20 bp, synthetic construct
  misc_feature 1..20: note = Description of Artificial Sequence: Synthetic oligonucleotide
  source 1..20: mol_type = other DNA
aaaaggaagctccttgagct

SEQ ID NO: 4579 - DNA, 20 bp, synthetic construct
  misc_feature 1..20: note = Description of Artificial Sequence: Synthetic oligonucleotide
  source 1..20: mol_type = other DNA
aaaggaagctccttgagctt

SEQ ID NO: 4580 - DNA, 20 bp, synthetic construct
  misc_feature 1..20: note = Description of Artificial Sequence: Synthetic oligonucleotide
  source 1..20: mol_type = other DNA
aaggaagctccttgagcttg

SEQ ID NO: 4581 - DNA, 20 bp, synthetic construct
  misc_feature 1..20: note = Description of Artificial Sequence: Synthetic oligonucleotide
  source 1..20: mol_type = other DNA
aggaagctccttgagcttgt

SEQ ID NO: 4582 - DNA, 20 bp, synthetic construct
  misc_feature 1..20: note = Description of Artificial Sequence: Synthetic oligonucleotide
  source 1..20: mol_type = other DNA
ggaagctccttgagcttgtt

SEQ ID NO: 4583 - DNA, 20 bp, synthetic construct
  misc_feature 1..20: note = Description of Artificial Sequence: Synthetic oligonucleotide
  source 1..20: mol_type = other DNA
gaagctccttgagcttgttt

SEQ ID NO: 4584 - DNA, 20 bp, synthetic construct
  misc_feature 1..20: note = Description of Artificial Sequence: Synthetic oligonucleotide
  source 1..20: mol_type = other DNA
aagctccttgagcttgtttc

SEQ ID NO: 4585 - DNA, 20 bp, synthetic construct
  misc_feature 1..20: note = Description of Artificial Sequence: Synthetic oligonucleotide
  source 1..20: mol_type = other DNA
agctccttgagcttgtttct

SEQ ID NO: 4586 - DNA, 20 bp, synthetic construct
  misc_feature 1..20: note = Description of Artificial Sequence: Synthetic oligonucleotide
  source 1..20: mol_type = other DNA
gctccttgagcttgtttctt

SEQ ID NO: 4587 - DNA, 20 bp, synthetic construct
  misc_feature 1..20: note = Description of Artificial Sequence: Synthetic oligonucleotide
  source 1..20: mol_type = other DNA
ctccttgagcttgtttctta

SEQ ID NO: 4588 - DNA, 20 bp, synthetic construct
  misc_feature 1..20: note = Description of Artificial Sequence: Synthetic oligonucleotide
  source 1..20: mol_type = other DNA
tccttgagcttgtttcttac

SEQ ID NO: 4589 - DNA, 20 bp, synthetic construct
  misc_feature 1..20: note = Description of Artificial Sequence: Synthetic oligonucleotide
  source 1..20: mol_type = other DNA
ccttgagcttgtttcttaca

SEQ ID NO: 4590 - DNA, 20 bp, synthetic construct
  misc_feature 1..20: note = Description of Artificial Sequence: Synthetic oligonucleotide
  source 1..20: mol_type = other DNA
cttgagcttgtttcttacaa

SEQ ID NO: 4591 - DNA, 20 bp, synthetic construct
  misc_feature 1..20: note = Description of Artificial Sequence: Synthetic oligonucleotide
  source 1..20: mol_type = other DNA
ttgagcttgtttcttacaaa

SEQ ID NO: 4592 - DNA, 20 bp, synthetic construct
  misc_feature 1..20: note = Description of Artificial Sequence: Synthetic oligonucleotide
  source 1..20: mol_type = other DNA
tgagcttgtttcttacaaag

SEQ ID NO: 4593 - DNA, 20 bp, synthetic construct
  misc_feature 1..20: note = Description of Artificial Sequence: Synthetic oligonucleotide
  source 1..20: mol_type = other DNA
gagcttgtttcttacaaagt

SEQ ID NO: 4594 - DNA, 20 bp, synthetic construct
  misc_feature 1..20: note = Description of Artificial Sequence: Synthetic oligonucleotide
  source 1..20: mol_type = other DNA
agcttgtttcttacaaagta

SEQ ID NO: 4595 - DNA, 20 bp, synthetic construct
  misc_feature 1..20: note = Description of Artificial Sequence: Synthetic oligonucleotide
  source 1..20: mol_type = other DNA
gcttgtttcttacaaagtaa

SEQ ID NO: 4596 - DNA, 20 bp, synthetic construct
  misc_feature 1..20: note = Description of Artificial Sequence: Synthetic oligonucleotide
  source 1..20: mol_type = other DNA
cttgtttcttacaaagtaaa

SEQ ID NO: 4597 - DNA, 20 bp, synthetic construct
  misc_feature 1..20: note = Description of Artificial Sequence: Synthetic oligonucleotide
  source 1..20: mol_type = other DNA
ttgtttcttacaaagtaaat

SEQ ID NO: 4598 - DNA, 20 bp, synthetic construct
  misc_feature 1..20: note = Description of Artificial Sequence: Synthetic oligonucleotide
  source 1..20: mol_type = other DNA
tgtttcttacaaagtaaata

SEQ ID NO: 4599 - DNA, 20 bp, synthetic construct
  misc_feature 1..20: note = Description of Artificial Sequence: Synthetic oligonucleotide
  source 1..20: mol_type = other DNA
gtttcttacaaagtaaataa

SEQ ID NO: 4600 - DNA, 20 bp, synthetic construct
  misc_feature 1..20: note = Description of Artificial Sequence: Synthetic oligonucleotide
  source 1..20: mol_type = other DNA
tttcttacaaagtaaataaa

SEQ ID NO: 4601 - DNA, 20 bp, synthetic construct
  misc_feature 1..20: note = Description of Artificial Sequence: Synthetic oligonucleotide
  source 1..20: mol_type = other DNA
ttcttacaaagtaaataaaa

SEQ ID NO: 4602 - DNA, 20 bp, synthetic construct
  misc_feature 1..20: note = Description of Artificial Sequence: Synthetic oligonucleotide
  source 1..20: mol_type = other DNA
tcttacaaagtaaataaaaa

SEQ ID NO: 4603 - DNA, 20 bp, synthetic construct
  misc_feature 1..20: note = Description of Artificial Sequence: Synthetic oligonucleotide
  source 1..20: mol_type = other DNA
cttacaaagtaaataaaaat

SEQ ID NO: 4604 - DNA, 20 bp, synthetic construct
  misc_feature 1..20: note = Description of Artificial Sequence: Synthetic oligonucleotide
  source 1..20: mol_type = other DNA
ttacaaagtaaataaaaata

SEQ ID NO: 4605 - DNA, 20 bp, synthetic construct
  misc_feature 1..20: note = Description of Artificial Sequence: Synthetic oligonucleotide
  source 1..20: mol_type = other DNA
tacaaagtaaataaaaatag

SEQ ID NO: 4606 - DNA, 20 bp, synthetic construct
  misc_feature 1..20: note = Description of Artificial Sequence: Synthetic oligonucleotide
  source 1..20: mol_type = other DNA
acaaagtaaataaaaataga

SEQ ID NO: 4607 - DNA, 20 bp, synthetic construct
  misc_feature 1..20: note = Description of Artificial Sequence: Synthetic oligonucleotide
  source 1..20: mol_type = other DNA
caaagtaaataaaaatagat

SEQ ID NO: 4608 - DNA, 20 bp, synthetic construct
  misc_feature 1..20: note = Description of Artificial Sequence: Synthetic oligonucleotide
  source 1..20: mol_type = other DNA
aaagtaaataaaaatagata

SEQ ID NO: 4609 - DNA, 20 bp, synthetic construct
  misc_feature 1..20: note = Description of Artificial Sequence: Synthetic oligonucleotide
  source 1..20: mol_type = other DNA
aagtaaataaaaatagatat

SEQ ID NO: 4610 - DNA, 20 bp, synthetic construct
  misc_feature 1..20: note = Description of Artificial Sequence: Synthetic oligonucleotide
  source 1..20: mol_type = other DNA
agtaaataaaaatagatata

SEQ ID NO: 4611 - DNA, 20 bp, synthetic construct
  misc_feature 1..20: note = Description of Artificial Sequence: Synthetic oligonucleotide
  source 1..20: mol_type = other DNA
gtaaataaaaatagatatac

SEQ ID NO: 4612 - DNA, 20 bp, synthetic construct
  misc_feature 1..20: note = Description of Artificial Sequence: Synthetic oligonucleotide
  source 1..20: mol_type = other DNA
taaataaaaatagatatacc

SEQ ID NO: 4613 - DNA, 20 bp, synthetic construct
  misc_feature 1..20: note = Description of Artificial Sequence: Synthetic oligonucleotide
  source 1..20: mol_type = other DNA
aaataaaaatagatatacct

SEQ ID NO: 4614 - DNA, 20 bp, synthetic construct
  misc_feature 1..20: note = Description of Artificial Sequence: Synthetic oligonucleotide
  source 1..20: mol_type = other DNA
aataaaaatagatatacctg

SEQ ID NO: 4615 - DNA, 20 bp, synthetic construct
  misc_feature 1..20: note = Description of Artificial Sequence: Synthetic oligonucleotide
  source 1..20: mol_type = other DNA
ataaaaatagatatacctgt

SEQ ID NO: 4616 - DNA, 20 bp, synthetic construct
  misc_feature 1..20: note = Description of Artificial Sequence: Synthetic oligonucleotide
  source 1..20: mol_type = other DNA
taaaaatagatatacctgta

SEQ ID NO: 4617 - DNA, 20 bp, synthetic construct
  misc_feature 1..20: note = Description of Artificial Sequence: Synthetic oligonucleotide
  source 1..20: mol_type = other DNA
aaaaatagatatacctgtat

SEQ ID NO: 4618 - DNA, 20 bp, synthetic construct
  misc_feature 1..20: note = Description of Artificial Sequence: Synthetic oligonucleotide
  source 1..20: mol_type = other DNA
aaaatagatatacctgtatt

SEQ ID NO: 4619 - DNA, 20 bp, synthetic construct
  misc_feature 1..20: note = Description of Artificial Sequence: Synthetic oligonucleotide
  source 1..20: mol_type = other DNA
aaatagatatacctgtatta

SEQ ID NO: 4620 - DNA, 20 bp, synthetic construct
  misc_feature 1..20: note = Description of Artificial Sequence: Synthetic oligonucleotide
  source 1..20: mol_type = other DNA
aatagatatacctgtattaa

SEQ ID NO: 4621 - DNA, 20 bp, synthetic construct
  misc_feature 1..20: note = Description of Artificial Sequence: Synthetic oligonucleotide
  source 1..20: mol_type = other DNA
atagatatacctgtattaac

SEQ ID NO: 4622 - DNA, 20 bp, synthetic construct
  misc_feature 1..20: note = Description of Artificial Sequence: Synthetic oligonucleotide
  source 1..20: mol_type = other DNA
tagatatacctgtattaact

SEQ ID NO: 4623 - DNA, 20 bp, synthetic construct
  misc_feature 1..20: note = Description of Artificial Sequence: Synthetic oligonucleotide
  source 1..20: mol_type = other DNA
agatatacctgtattaacta

SEQ ID NO: 4624 - DNA, 20 bp, synthetic construct
  misc_feature 1..20: note = Description of Artificial Sequence: Synthetic oligonucleotide
  source 1..20: mol_type = other DNA
gatatacctgtattaactat

SEQ ID NO: 4625 - DNA, 20 bp, synthetic construct
  misc_feature 1..20: note = Description of Artificial Sequence: Synthetic oligonucleotide
  source 1..20: mol_type = other DNA
atatacctgtattaactatg

SEQ ID NO: 4626 - DNA, 20 bp, synthetic construct
  misc_feature 1..20: note = Description of Artificial Sequence: Synthetic oligonucleotide
  source 1..20: mol_type = other DNA
tatacctgtattaactatga

SEQ ID NO: 4627 - DNA, 20 bp, synthetic construct
  misc_feature 1..20: note = Description of Artificial Sequence: Synthetic oligonucleotide
  source 1..20: mol_type = other DNA
atacctgtattaactatgaa

SEQ ID NO: 4628 - DNA, 20 bp, synthetic construct
  misc_feature 1..20: note = Description of Artificial Sequence: Synthetic oligonucleotide
  source 1..20: mol_type = other DNA
tacctgtattaactatgaat

SEQ ID NO: 4629 - DNA, 20 bp, synthetic construct
  misc_feature 1..20: note = Description of Artificial Sequence: Synthetic oligonucleotide
  source 1..20: mol_type = other DNA
acctgtattaactatgaata

SEQ ID NO: 4630 - DNA, 20 bp, synthetic construct
  misc_feature 1..20: note = Description of Artificial Sequence: Synthetic oligonucleotide
  source 1..20: mol_type = other DNA
cctgtattaactatgaatat

SEQ ID NO: 4631 - DNA, 20 bp, synthetic construct
  misc_feature 1..20: note = Description of Artificial Sequence: Synthetic oligonucleotide
  source 1..20: mol_type = other DNA
ctgtattaactatgaatatt

SEQ ID NO: 4632 - DNA, 20 bp, synthetic construct
  misc_feature 1..20: note = Description of Artificial Sequence: Synthetic oligonucleotide
  source 1..20: mol_type = other DNA
tgtattaactatgaatattt

SEQ ID NO: 4633 - DNA, 20 bp, synthetic construct
  misc_feature 1..20: note = Description of Artificial Sequence: Synthetic oligonucleotide
  source 1..20: mol_type = other DNA
gtattaactatgaatatttt

SEQ ID NO: 4634 - DNA, 20 bp, synthetic construct
  misc_feature 1..20: note = Description of Artificial Sequence: Synthetic oligonucleotide
  source 1..20: mol_type = other DNA
tattaactatgaatatttta

SEQ ID NO: 4635 - DNA, 20 bp, synthetic construct
  misc_feature 1..20: note = Description of Artificial Sequence: Synthetic oligonucleotide
  source 1..20: mol_type = other DNA
attaactatgaatattttaa

SEQ ID NO: 4636 - DNA, 20 bp, synthetic construct
  misc_feature 1..20: note = Description of Artificial Sequence: Synthetic oligonucleotide
  source 1..20: mol_type = other DNA
ttaactatgaatattttaag

SEQ ID NO: 4637 - DNA, 20 bp, synthetic construct
  misc_feature 1..20: note = Description of Artificial Sequence: Synthetic oligonucleotide
  source 1..20: mol_type = other DNA
taactatgaatattttaagg

SEQ ID NO: 4638 - DNA, 20 bp, synthetic construct
  misc_feature 1..20: note = Description of Artificial Sequence: Synthetic oligonucleotide
  source 1..20: mol_type = other DNA
aactatgaatattttaaggc

SEQ ID NO: 4639 - DNA, 20 bp, synthetic construct
  misc_feature 1..20: note = Description of Artificial Sequence: Synthetic oligonucleotide
  source 1..20: mol_type = other DNA
actatgaatattttaaggca

SEQ ID NO: 4640 - DNA, 20 bp, synthetic construct
  misc_feature 1..20: note = Description of Artificial Sequence: Synthetic oligonucleotide
  source 1..20: mol_type = other DNA
ctatgaatattttaaggcag

SEQ ID NO: 4641 - DNA, 20 bp, synthetic construct
  misc_feature 1..20: note = Description of Artificial Sequence: Synthetic oligonucleotide
  source 1..20: mol_type = other DNA
tatgaatattttaaggcagt

SEQ ID NO: 4642 - DNA, 20 bp, synthetic construct
  misc_feature 1..20: note = Description of Artificial Sequence: Synthetic oligonucleotide
  source 1..20: mol_type = other DNA
atgaatattttaaggcagtt

SEQ ID NO: 4643 - DNA, 20 bp, synthetic construct
  misc_feature 1..20: note = Description of Artificial Sequence: Synthetic oligonucleotide
  source 1..20: mol_type = other DNA
tgaatattttaaggcagttt

SEQ ID NO: 4644 - DNA, 20 bp, synthetic construct
  misc_feature 1..20: note = Description of Artificial Sequence: Synthetic oligonucleotide
  source 1..20: mol_type = other DNA
gaatattttaaggcagtttt

SEQ ID NO: 4645 - DNA, 20 bp, synthetic construct
  misc_feature 1..20: note = Description of Artificial Sequence: Synthetic oligonucleotide
  source 1..20: mol_type = other DNA
aatattttaaggcagttttg

SEQ ID NO: 4646 - DNA, 20 bp, synthetic construct
  misc_feature 1..20: note = Description of Artificial Sequence: Synthetic oligonucleotide
  source 1..20: mol_type = other DNA
atattttaaggcagttttgt

SEQ ID NO: 4647 - DNA, 20 bp, synthetic construct
  misc_feature 1..20: note = Description of Artificial Sequence: Synthetic oligonucleotide
  source 1..20: mol_type = other DNA
tattttaaggcagttttgtg

SEQ ID NO: 4648 - DNA, 20 bp, synthetic construct
  misc_feature 1..20: note = Description of Artificial Sequence: Synthetic oligonucleotide
  source 1..20: mol_type = other DNA
attttaaggcagttttgtgc

SEQ ID NO: 4649 - DNA, 20 bp, synthetic construct
  misc_feature 1..20: note = Description of Artificial Sequence: Synthetic oligonucleotide
  source 1..20: mol_type = other DNA
ttttaaggcagttttgtgcc

SEQ ID NO: 4650 - DNA, 20 bp, synthetic construct
  misc_feature 1..20: note = Description of Artificial Sequence: Synthetic oligonucleotide
  source 1..20: mol_type = other DNA
tttaaggcagttttgtgccg

SEQ ID NO: 4651 - DNA, 20 bp, synthetic construct
  misc_feature 1..20: note = Description of Artificial Sequence: Synthetic oligonucleotide
  source 1..20: mol_type = other DNA
ttaaggcagttttgtgccgg

SEQ ID NO: 4652 - DNA, 20 bp, synthetic construct
  misc_feature 1..20: note = Description of Artificial Sequence: Synthetic oligonucleotide
  source 1..20: mol_type = other DNA
taaggcagttttgtgccggc

SEQ ID NO: 4653 - DNA, 20 bp, synthetic construct
  misc_feature 1..20: note = Description of Artificial Sequence: Synthetic oligonucleotide
  source 1..20: mol_type = other DNA
aaggcagttttgtgccggca

SEQ ID NO: 4654 - DNA, 20 bp, synthetic construct
  misc_feature 1..20: note = Description of Artificial Sequence: Synthetic oligonucleotide
  source 1..20: mol_type = other DNA
aggcagttttgtgccggcat

SEQ ID NO: 4655 - DNA, 20 bp, synthetic construct
  misc_feature 1..20: note = Description of Artificial Sequence: Synthetic oligonucleotide
  source 1..20: mol_type = other DNA
ggcagttttgtgccggcatc

SEQ ID NO: 4656 - DNA, 20 bp, synthetic construct
  misc_feature 1..20: note = Description of Artificial Sequence: Synthetic oligonucleotide
  source 1..20: mol_type = other DNA
gcagttttgtgccggcatcc

SEQ ID NO: 4657 - DNA, 20 bp, synthetic construct
  misc_feature 1..20: note = Description of Artificial Sequence: Synthetic oligonucleotide
  source 1..20: mol_type = other DNA
cagttttgtgccggcatcca

SEQ ID NO: 4658 - DNA, 20 bp, synthetic construct
  misc_feature 1..20: note = Description of Artificial Sequence: Synthetic oligonucleotide
  source 1..20: mol_type = other DNA
agttttgtgccggcatccat

SEQ ID NO: 4659 - DNA, 20 bp, synthetic construct
  misc_feature 1..20: note = Description of Artificial Sequence: Synthetic oligonucleotide
  source 1..20: mol_type = other DNA
gttttgtgccggcatccatg

SEQ ID NO: 4660 - DNA, 20 bp, synthetic construct
  misc_feature 1..20: note = Description of Artificial Sequence: Synthetic oligonucleotide
  source 1..20: mol_type = other DNA
ttttgtgccggcatccatga

SEQ ID NO: 4661 - DNA, 20 bp, synthetic construct
  misc_feature 1..20: note = Description of Artificial Sequence: Synthetic oligonucleotide
  source 1..20: mol_type = other DNA
tttgtgccggcatccatgag

SEQ ID NO: 4662 - DNA, 20 bp, synthetic construct
  misc_feature 1..20: note = Description of Artificial Sequence: Synthetic oligonucleotide
  source 1..20: mol_type = other DNA
ttgtgccggcatccatgaga

SEQ ID NO: 4663 - DNA, 20 bp, synthetic construct
  misc_feature 1..20: note = Description of Artificial Sequence: Synthetic oligonucleotide
  source 1..20: mol_type = other DNA
tgtgccggcatccatgagag

SEQ ID NO: 4664 - DNA, 20 bp, synthetic construct
  misc_feature 1..20: note = Description of Artificial Sequence: Synthetic oligonucleotide
  source 1..20: mol_type = other DNA
gtgccggcatccatgagaga

SEQ ID NO: 4665 - DNA, 20 bp, synthetic construct
  misc_feature 1..20: note = Description of Artificial Sequence: Synthetic oligonucleotide
  source 1..20: mol_type = other DNA
tgccggcatccatgagagac

SEQ ID NO: 4666 - DNA, 20 bp, synthetic construct
  misc_feature 1..20: note = Description of Artificial Sequence: Synthetic oligonucleotide
  source 1..20: mol_type = other DNA
gccggcatccatgagagact

SEQ ID NO: 4667 - DNA, 20 bp, synthetic construct
  misc_feature 1..20: note = Description of Artificial Sequence: Synthetic oligonucleotide
  source 1..20: mol_type = other DNA
ccggcatccatgagagactc

SEQ ID NO: 4668 - DNA, 20 bp, synthetic construct
  misc_feature 1..20: note = Description of Artificial Sequence: Synthetic oligonucleotide
  source 1..20: mol_type = other DNA
cggcatccatgagagactct

SEQ ID NO: 4669 - DNA, 20 bp, synthetic construct
  misc_feature 1..20: note = Description of Artificial Sequence: Synthetic oligonucleotide
  source 1..20: mol_type = other DNA
ggcatccatgagagactctg

SEQ ID NO: 4670 - DNA, 20 bp, synthetic construct
  misc_feature 1..20: note = Description of Artificial Sequence: Synthetic oligonucleotide
  source 1..20: mol_type = other DNA
gcatccatgagagactctgt

SEQ ID NO: 4671 - DNA, 20 bp, synthetic construct
  misc_feature 1..20: note = Description of Artificial Sequence: Synthetic oligonucleotide
  source 1..20: mol_type = other DNA
catccatgagagactctgtc

SEQ ID NO: 4672 - DNA, 20 bp, synthetic construct
  misc_feature 1..20: note = Description of Artificial Sequence: Synthetic oligonucleotide
  source 1..20: mol_type = other DNA
atccatgagagactctgtcc

SEQ ID NO: 4673 - DNA, 20 bp, synthetic construct
  misc_feature 1..20: note = Description of Artificial Sequence: Synthetic oligonucleotide
  source 1..20: mol_type = other DNA
tccatgagagactctgtcca

SEQ ID NO: 4674 - DNA, 20 bp, synthetic construct
  misc_feature 1..20: note = Description of Artificial Sequence: Synthetic oligonucleotide
  source 1..20: mol_type = other DNA
ccatgagagactctgtccac

SEQ ID NO: 4675 - DNA, 20 bp, synthetic construct
  misc_feature 1..20: note = Description of Artificial Sequence: Synthetic oligonucleotide
  source 1..20: mol_type = other DNA
catgagagactctgtccacc

SEQ ID NO: 4676 - DNA, 20 bp, synthetic construct
  misc_feature 1..20: note = Description of Artificial Sequence: Synthetic oligonucleotide
  source 1..20: mol_type = other DNA
atgagagactctgtccacct

SEQ ID NO: 4677 - DNA, 20 bp, synthetic construct
  misc_feature 1..20: note = Description of Artificial Sequence: Synthetic oligonucleotide
  source 1..20: mol_type = other DNA
tgagagactctgtccacctc

SEQ ID NO: 4678 - DNA, 20 bp, synthetic construct
  misc_feature 1..20: note = Description of Artificial Sequence: Synthetic oligonucleotide
  source 1..20: mol_type = other DNA
gagagactctgtccacctcc

SEQ ID NO: 4679 - DNA, 20 bp, synthetic construct
  misc_feature 1..20: note = Description of Artificial Sequence: Synthetic oligonucleotide
  source 1..20: mol_type = other DNA
agagactctgtccacctcct

SEQ ID NO: 4680 - DNA, 20 bp, synthetic construct
  misc_feature 1..20: note = Description of Artificial Sequence: Synthetic oligonucleotide
  source 1..20: mol_type = other DNA
gagactctgtccacctcctg

SEQ ID NO: 4681 - DNA, 20 bp, synthetic construct
  misc_feature 1..20: note = Description of Artificial Sequence: Synthetic oligonucleotide
  source 1..20: mol_type = other DNA
agactctgtccacctcctgc

SEQ ID NO: 4682 - DNA, 20 bp, synthetic construct
  misc_feature 1..20: note = Description of Artificial Sequence: Synthetic oligonucleotide
  source 1..20: mol_type = other DNA
gactctgtccacctcctgct

SEQ ID NO: 4683 - DNA, 20 bp, synthetic construct
  misc_feature 1..20: note = Description of Artificial Sequence: Synthetic oligonucleotide
  source 1..20: mol_type = other DNA
actctgtccacctcctgctg

SEQ ID NO: 4684 - DNA, 20 bp, synthetic construct
  misc_feature 1..20: note = Description of Artificial Sequence: Synthetic oligonucleotide
  source 1..20: mol_type = other DNA
ctctgtccacctcctgctgg

SEQ ID NO: 4685 - DNA, 20 bp, synthetic construct
  misc_feature 1..20: note = Description of Artificial Sequence: Synthetic oligonucleotide
  source 1..20: mol_type = other DNA
tctgtccacctcctgctggt

SEQ ID NO: 4686 - DNA, 20 bp, synthetic construct
  misc_feature 1..20: note = Description of Artificial Sequence: Synthetic oligonucleotide
  source 1..20: mol_type = other DNA
ctgtccacctcctgctggtg

SEQ ID NO: 4687 - DNA, 20 bp, synthetic construct
  misc_feature 1..20: note = Description of Artificial Sequence: Synthetic oligonucleotide
  source 1..20: mol_type = other DNA
tgtccacctcctgctggtgc

SEQ ID NO: 4688 - DNA, 20 bp, synthetic construct
  misc_feature 1..20: note = Description of Artificial Sequence: Synthetic oligonucleotide
  source 1..20: mol_type = other DNA
gtccacctcctgctggtgct

SEQ ID NO: 4689 - DNA, 20 bp, synthetic construct
  misc_feature 1..20: note = Description of Artificial Sequence: Synthetic oligonucleotide
  source 1..20: mol_type = other DNA
tccacctcctgctggtgctt

SEQ ID NO: 4690 - DNA, 20 bp, synthetic construct
  misc_feature 1..20: note = Description of Artificial Sequence: Synthetic oligonucleotide
  source 1..20: mol_type = other DNA
ccacctcctgctggtgcttc

SEQ ID NO: 4691 - DNA, 20 bp, synthetic construct
  misc_feature 1..20: note = Description of Artificial Sequence: Synthetic oligonucleotide
  source 1..20: mol_type = other DNA
cacctcctgctggtgcttca

SEQ ID NO: 4692 - DNA, 20 bp, synthetic construct
  misc_feature 1..20: note = Description of Artificial Sequence: Synthetic oligonucleotide
  source 1..20: mol_type = other DNA
acctcctgctggtgcttcat

SEQ ID NO: 4693 - DNA, 20 bp, synthetic construct
  misc_feature 1..20: note = Description of Artificial Sequence: Synthetic oligonucleotide
  source 1..20: mol_type = other DNA
cctcctgctggtgcttcatt

SEQ ID NO: 4694 - DNA, 20 bp, synthetic construct
  misc_feature 1..20: note = Description of Artificial Sequence: Synthetic oligonucleotide
  source 1..20: mol_type = other DNA
ctcctgctggtgcttcattc

SEQ ID NO: 4695 - DNA, 20 bp, synthetic construct
  misc_feature 1..20: note = Description of Artificial Sequence: Synthetic oligonucleotide
  source 1..20: mol_type = other DNA
tcctgctggtgcttcattcc

SEQ ID NO: 4696 - DNA, 20 bp, synthetic construct
  misc_feature 1..20: note = Description of Artificial Sequence: Synthetic oligonucleotide
  source 1..20: mol_type = other DNA
cctgctggtgcttcattcct

SEQ ID NO: 4697 - DNA, 20 bp, synthetic construct
  misc_feature 1..20: note = Description of Artificial Sequence: Synthetic oligonucleotide
  source 1..20: mol_type = other DNA
ctgctggtgcttcattcctt

SEQ ID NO: 4698 - DNA, 20 bp, synthetic construct
  misc_feature 1..20: note = Description of Artificial Sequence: Synthetic oligonucleotide
  source 1..20: mol_type = other DNA
tgctggtgcttcattccttt

SEQ ID NO: 4699 - DNA, 20 bp, synthetic construct
  misc_feature 1..20: note = Description of Artificial Sequence: Synthetic oligonucleotide
  source 1..20: mol_type = other DNA
gctggtgcttcattcctttc

SEQ ID NO: 4700 - DNA, 20 bp, synthetic construct
  misc_feature 1..20: note = Description of Artificial Sequence: Synthetic oligonucleotide
  source 1..20: mol_type = other DNA
ctggtgcttcattcctttca

SEQ ID NO: 4701 - DNA, 20 bp, synthetic construct
  misc_feature 1..20: note = Description of Artificial Sequence: Synthetic oligonucleotide
  source 1..20: mol_type = other DNA
tggtgcttcattcctttcag

SEQ ID NO: 4702 - DNA, 20 bp, synthetic construct
  misc_feature 1..20: note = Description of Artificial Sequence: Synthetic oligonucleotide
  source 1..20: mol_type = other DNA
ggtgcttcattcctttcagt

SEQ ID NO: 4703 - DNA, 20 bp, synthetic construct
  misc_feature 1..20: note = Description of Artificial Sequence: Synthetic oligonucleotide
  source 1..20: mol_type = other DNA
gtgcttcattcctttcagtg

SEQ ID NO: 4704 - DNA, 20 bp, synthetic construct
  misc_feature 1..20: note = Description of Artificial Sequence: Synthetic oligonucleotide
  source 1..20: mol_type = other DNA
tgcttcattcctttcagtgc

SEQ ID NO: 4705 - DNA, 20 bp, synthetic construct
  misc_feature 1..20: note = Description of Artificial Sequence: Synthetic oligonucleotide
  source 1..20: mol_type = other DNA
gcttcattcctttcagtgct

SEQ ID NO: 4706 - DNA, 20 bp, synthetic construct
  misc_feature 1..20: note = Description of Artificial Sequence: Synthetic oligonucleotide
  source 1..20: mol_type = other DNA
cttcattcctttcagtgctg

SEQ ID NO: 4707 - DNA, 20 bp, synthetic construct
  misc_feature 1..20: note = Description of Artificial Sequence: Synthetic oligonucleotide
  source 1..20: mol_type = other DNA
ttcattcctttcagtgctgt

SEQ ID NO: 4708 - DNA, 20 bp, synthetic construct
  misc_feature 1..20: note = Description of Artificial Sequence: Synthetic oligonucleotide
  source 1..20: mol_type = other DNA
tcattcctttcagtgctgta

SEQ ID NO: 4709 - DNA, 20 bp, synthetic construct
  misc_feature 1..20: note = Description of Artificial Sequence: Synthetic oligonucleotide
  source 1..20: mol_type = other DNA
cattcctttcagtgctgtac

SEQ ID NO: 4710 - DNA, 20 bp, synthetic construct
  misc_feature 1..20: note = Description of Artificial Sequence: Synthetic oligonucleotide
  source 1..20: mol_type = other DNA
attcctttcagtgctgtaca

SEQ ID NO: 4711 - DNA, 20 bp, synthetic construct
  misc_feature 1..20: note = Description of Artificial Sequence: Synthetic oligonucleotide
  source 1..20: mol_type = other DNA
ttcctttcagtgctgtacat

SEQ ID NO: 4712 - DNA, 20 bp, synthetic construct
  misc_feature 1..20: note = Description of Artificial Sequence: Synthetic oligonucleotide
  source 1..20: mol_type = other DNA
tcctttcagtgctgtacatg

SEQ ID NO: 4713 - DNA, 20 bp, synthetic construct
  misc_feature 1..20: note = Description of Artificial Sequence: Synthetic oligonucleotide
  source 1..20: mol_type = other DNA
cctttcagtgctgtacatga

SEQ ID NO: 4714 - DNA, 20 bp, synthetic construct
  misc_feature 1..20: note = Description of Artificial Sequence: Synthetic oligonucleotide
  source 1..20: mol_type = other DNA
ctttcagtgctgtacatgac

SEQ ID NO: 4715 - DNA, 20 bp, synthetic construct
  misc_feature 1..20: note = Description of Artificial Sequence: Synthetic oligonucleotide
  source 1..20: mol_type = other DNA
tttcagtgctgtacatgacc

SEQ ID NO: 4716 - DNA, 20 bp, synthetic construct
  misc_feature 1..20: note = Description of Artificial Sequence: Synthetic oligonucleotide
  source 1..20: mol_type = other DNA
ttcagtgctgtacatgacca

SEQ ID NO: 4717 - DNA, 20 bp, synthetic construct
  misc_feature 1..20: note = Description of Artificial Sequence: Synthetic oligonucleotide
  source 1..20: mol_type = other DNA
tcagtgctgtacatgaccaa

SEQ ID NO: 4718 - DNA, 20 bp, synthetic construct
  misc_feature 1..20: note = Description of Artificial Sequence: Synthetic oligonucleotide
  source 1..20: mol_type = other DNA
cagtgctgtacatgaccaag

SEQ ID NO: 4719 - DNA, 20 bp, synthetic construct
  misc_feature 1..20: note = Description of Artificial Sequence: Synthetic oligonucleotide
  source 1..20: mol_type = other DNA
agtgctgtacatgaccaagg

SEQ ID NO: 4720 - DNA, 20 bp, synthetic construct
  misc_feature 1..20: note = Description of Artificial Sequence: Synthetic oligonucleotide
  source 1..20: mol_type = other DNA
gtgctgtacatgaccaaggc

SEQ ID NO: 4721 - DNA, 20 bp, synthetic construct
  misc_feature 1..20: note = Description of Artificial Sequence: Synthetic oligonucleotide
  source 1..20: mol_type = other DNA
tgctgtacatgaccaaggcg

SEQ ID NO: 4722 - DNA, 20 bp, synthetic construct
  misc_feature 1..20: note = Description of Artificial Sequence: Synthetic oligonucleotide
  source 1..20: mol_type = other DNA
gctgtacatgaccaaggcga

SEQ ID NO: 4723 - DNA, 20 bp, synthetic construct
  misc_feature 1..20: note = Description of Artificial Sequence: Synthetic oligonucleotide
  source 1..20: mol_type = other DNA
ctgtacatgaccaaggcgag

SEQ ID NO: 4724 - DNA, 20 bp, synthetic construct
  misc_feature 1..20: note = Description of Artificial Sequence: Synthetic oligonucleotide
  source 1..20: mol_type = other DNA
tgtacatgaccaaggcgagc

SEQ ID NO: 4725 - DNA, 20 bp, synthetic construct
  misc_feature 1..20: note = Description of Artificial Sequence: Synthetic oligonucleotide
  source 1..20: mol_type = other DNA
gtacatgaccaaggcgagca

SEQ ID NO: 4726 - DNA, 20 bp, synthetic construct
  misc_feature 1..20: note = Description of Artificial Sequence: Synthetic oligonucleotide
  source 1..20: mol_type = other DNA
tacatgaccaaggcgagcag

SEQ ID NO: 4727 - DNA, 20 bp, synthetic construct
  misc_feature 1..20: note = Description of Artificial Sequence: Synthetic oligonucleotide
  source 1..20: mol_type = other DNA
acatgaccaaggcgagcagg

SEQ ID NO: 4728 - DNA, 20 bp, synthetic construct
  misc_feature 1..20: note = Description of Artificial Sequence: Synthetic oligonucleotide
  source 1..20: mol_type = other DNA
catgaccaaggcgagcaggg

SEQ ID NO: 4729 - DNA, 20 bp, synthetic construct
  misc_feature 1..20: note = Description of Artificial Sequence: Synthetic oligonucleotide
  source 1..20: mol_type = other DNA
atgaccaaggcgagcagggg

SEQ ID NO: 4730 - DNA, 20 bp, synthetic construct
  misc_feature 1..20: note = Description of Artificial Sequence: Synthetic oligonucleotide
  source 1..20: mol_type = other DNA
tgaccaaggcgagcaggggc

SEQ ID NO: 4731 - DNA, 20 bp, synthetic construct
  misc_feature 1..20: note = Description of Artificial Sequence: Synthetic oligonucleotide
  source 1..20: mol_type = other DNA
gaccaaggcgagcaggggca

SEQ ID NO: 4732 - DNA, 20 bp, synthetic construct
  misc_feature 1..20: note = Description of Artificial Sequence: Synthetic oligonucleotide
  source 1..20: mol_type = other DNA
accaaggcgagcaggggcag

SEQ ID NO: 4733 - DNA, 20 bp, synthetic construct
  misc_feature 1..20: note = Description of Artificial Sequence: Synthetic oligonucleotide
  source 1..20: mol_type = other DNA
ccaaggcgagcaggggcagt

SEQ ID NO: 4734 - DNA, 20 bp, synthetic construct
  misc_feature 1..20: note = Description of Artificial Sequence: Synthetic oligonucleotide
  source 1..20: mol_type = other DNA
caaggcgagcaggggcagtg

SEQ ID NO: 4735 - DNA, 20 bp, synthetic construct
  misc_feature 1..20: note = Description of Artificial Sequence: Synthetic oligonucleotide
  source 1..20: mol_type = other DNA
aaggcgagcaggggcagtgc

SEQ ID NO: 4736 - DNA, 20 bp, synthetic construct
  misc_feature 1..20: note = Description of Artificial Sequence: Synthetic oligonucleotide
  source 1..20: mol_type = other DNA
aggcgagcaggggcagtgct

SEQ ID NO: 4737 - DNA, 20 bp, synthetic construct
  misc_feature 1..20: note = Description of Artificial Sequence: Synthetic oligonucleotide
  source 1..20: mol_type = other DNA
ggcgagcaggggcagtgctc

SEQ ID NO: 4738 - DNA, 20 bp, synthetic construct
  misc_feature 1..20: note = Description of Artificial Sequence: Synthetic oligonucleotide
  source 1..20: mol_type = other DNA
gcgagcaggggcagtgctca

SEQ ID NO: 4739 - DNA, 20 bp, synthetic construct
  misc_feature 1..20: note = Description of Artificial Sequence: Synthetic oligonucleotide
  source 1..20: mol_type = other DNA
cgagcaggggcagtgctcag

SEQ ID NO: 4740 - DNA, 20 bp, synthetic construct
  misc_feature 1..20: note = Description of Artificial Sequence: Synthetic oligonucleotide
  source 1..20: mol_type = other DNA
gagcaggggcagtgctcaga

SEQ ID NO: 4741 - DNA, 20 bp, synthetic construct
  misc_feature 1..20: note = Description of Artificial Sequence: Synthetic oligonucleotide
  source 1..20: mol_type = other DNA
agcaggggcagtgctcagag

SEQ ID NO: 4742 - DNA, 20 bp, synthetic construct
  misc_feature 1..20: note = Description of Artificial Sequence: Synthetic oligonucleotide
  source 1..20: mol_type = other DNA
gcaggggcagtgctcagagt

SEQ ID NO: 4743 - DNA, 20 bp, synthetic construct
  misc_feature 1..20: note = Description of Artificial Sequence: Synthetic oligonucleotide
  source 1..20: mol_type = other DNA
caggggcagtgctcagagtc

SEQ ID NO: 4744 - DNA, 20 bp, synthetic construct
  misc_feature 1..20: note = Description of Artificial Sequence: Synthetic oligonucleotide
  source 1..20: mol_type = other DNA
aggggcagtgctcagagtct

SEQ ID NO: 4745 - DNA, 20 bp, synthetic construct
  misc_feature 1..20: note = Description of Artificial Sequence: Synthetic oligonucleotide
  source 1..20: mol_type = other DNA
ggggcagtgctcagagtctg

SEQ ID NO: 4746 - DNA, 20 bp, synthetic construct
  misc_feature 1..20: note = Description of Artificial Sequence: Synthetic oligonucleotide
  source 1..20: mol_type = other DNA
gggcagtgctcagagtctga

SEQ ID NO: 4747 - DNA, 20 bp, synthetic construct
  misc_feature 1..20: note = Description of Artificial Sequence: Synthetic oligonucleotide
  source 1..20: mol_type = other DNA
ggcagtgctcagagtctgat

SEQ ID NO: 4748 - DNA, 20 bp, synthetic construct
  misc_feature 1..20: note = Description of Artificial Sequence: Synthetic oligonucleotide
  source 1..20: mol_type = other DNA
gcagtgctcagagtctgatc

SEQ ID NO: 4749 - DNA, 20 bp, synthetic construct
  misc_feature 1..20: note = Description of Artificial Sequence: Synthetic oligonucleotide
  source 1..20: mol_type = other DNA
cagtgctcagagtctgatcg

SEQ ID NO: 4750 - DNA, 20 bp, synthetic construct
  misc_feature 1..20: note = Description of Artificial Sequence: Synthetic oligonucleotide
  source 1..20: mol_type = other DNA
agtgctcagagtctgatcgc

SEQ ID NO: 4751 - DNA, 20 bp, synthetic construct
  misc_feature 1..20: note = Description of Artificial Sequence: Synthetic oligonucleotide
  source 1..20: mol_type = other DNA
gtgctcagagtctgatcgcc

SEQ ID NO: 4752 - DNA, 20 bp, synthetic construct
  misc_feature 1..20: note = Description of Artificial Sequence: Synthetic oligonucleotide
  source 1..20: mol_type = other DNA
tgctcagagtctgatcgcca

SEQ ID NO: 4753 - DNA, 20 bp, synthetic construct
  misc_feature 1..20: note = Description of Artificial Sequence: Synthetic oligonucleotide
  source 1..20: mol_type = other DNA
gctcagagtctgatcgccag

SEQ ID NO: 4754 - DNA, 20 bp, synthetic construct
  misc_feature 1..20: note = Description of Artificial Sequence: Synthetic oligonucleotide
  source 1..20: mol_type = other DNA
ctcagagtctgatcgccaga

SEQ ID NO: 4755 - DNA, 20 bp, synthetic construct
  misc_feature 1..20: note = Description of Artificial Sequence: Synthetic oligonucleotide
  source 1..20: mol_type = other DNA
tcagagtctgatcgccagat

SEQ ID NO: 4756 - DNA, 20 bp, synthetic construct
  misc_feature 1..20: note = Description of Artificial Sequence: Synthetic oligonucleotide
  source 1..20: mol_type = other DNA
cagagtctgatcgccagatg

SEQ ID NO: 4757 - DNA, 20 bp, synthetic construct
  misc_feature 1..20: note = Description of Artificial Sequence: Synthetic oligonucleotide
  source 1..20: mol_type = other DNA
agagtctgatcgccagatgc

SEQ ID NO: 4758 - DNA, 20 bp, synthetic construct
  misc_feature 1..20: note = Description of Artificial Sequence: Synthetic oligonucleotide
  source 1..20: mol_type = other DNA
gagtctgatcgccagatgca

SEQ ID NO: 4759 - DNA, 20 bp, synthetic construct
  misc_feature 1..20: note = Description of Artificial Sequence: Synthetic oligonucleotide
  source 1..20: mol_type = other DNA
agtctgatcgccagatgcag

SEQ ID NO: 4760 - DNA, 20 bp, synthetic construct
  misc_feature 1..20: note = Description of Artificial Sequence: Synthetic oligonucleotide
  source 1..20: mol_type = other DNA
gtctgatcgccagatgcagt

SEQ ID NO: 4761 - DNA, 20 bp, synthetic construct
  misc_feature 1..20: note = Description of Artificial Sequence: Synthetic oligonucleotide
  source 1..20: mol_type = other DNA
tctgatcgccagatgcagtg

SEQ ID NO: 4762 - DNA, 20 bp, synthetic construct
  misc_feature 1..20: note = Description of Artificial Sequence: Synthetic oligonucleotide
  source 1..20: mol_type = other DNA
ctgatcgccagatgcagtgc

SEQ ID NO: 4763 - DNA, 20 bp, synthetic construct
  misc_feature 1..20: note = Description of Artificial Sequence: Synthetic oligonucleotide
  source 1..20: mol_type = other DNA
tgatcgccagatgcagtgcc

SEQ ID NO: 4764 - DNA, 20 bp, synthetic construct
  misc_feature 1..20: note = Description of Artificial Sequence: Synthetic oligonucleotide
  source 1..20: mol_type = other DNA
gatcgccagatgcagtgccc

SEQ ID NO: 4765 - DNA, 20 bp, synthetic construct
  misc_feature 1..20: note = Description of Artificial Sequence: Synthetic oligonucleotide
  source 1..20: mol_type = other DNA
atcgccagatgcagtgccct

SEQ ID NO: 4766 - DNA, 20 bp, synthetic construct
  misc_feature 1..20: note = Description of Artificial Sequence: Synthetic oligonucleotide
  source 1..20: mol_type = other DNA
tcgccagatgcagtgccctg

SEQ ID NO: 4767 - DNA, 20 bp, synthetic construct
  misc_feature 1..20: note = Description of Artificial Sequence: Synthetic oligonucleotide
  source 1..20: mol_type = other DNA
cgccagatgcagtgccctgg

SEQ ID NO: 4768 - DNA, 20 bp, synthetic construct
  misc_feature 1..20: note = Description of Artificial Sequence: Synthetic oligonucleotide
  source 1..20: mol_type = other DNA
gccagatgcagtgccctgga

SEQ ID NO: 4769 - DNA, 20 bp, synthetic construct
  misc_feature 1..20: note = Description of Artificial Sequence: Synthetic oligonucleotide
  source 1..20: mol_type = other DNA
ccagatgcagtgccctggag

SEQ ID NO: 4770 - DNA, 20 bp, synthetic construct
  misc_feature 1..20: note = Description of Artificial Sequence: Synthetic oligonucleotide
  source 1..20: mol_type = other DNA
cagatgcagtgccctggagt

SEQ ID NO: 4771 - DNA, 20 bp, synthetic construct
  misc_feature 1..20: note = Description of Artificial Sequence: Synthetic oligonucleotide
  source 1..20: mol_type = other DNA
agatgcagtgccctggagtt

SEQ ID NO: 4772 - DNA, 20 bp, synthetic construct
  misc_feature 1..20: note = Description of Artificial Sequence: Synthetic oligonucleotide
  source 1..20: mol_type = other DNA
gatgcagtgccctggagttt

SEQ ID NO: 4773 - DNA, 20 bp, synthetic construct
  misc_feature 1..20: note = Description of Artificial Sequence: Synthetic oligonucleotide
  source 1..20: mol_type = other DNA
atgcagtgccctggagtttc

SEQ ID NO: 4774 - DNA, 20 bp, synthetic construct
  misc_feature 1..20: note = Description of Artificial Sequence: Synthetic oligonucleotide
  source 1..20: mol_type = other DNA
tgcagtgccctggagtttcc

SEQ ID NO: 4775 - DNA, 20 bp, synthetic construct
  misc_feature 1..20: note = Description of Artificial Sequence: Synthetic oligonucleotide
  source 1..20: mol_type = other DNA
gcagtgccctggagtttcct

SEQ ID NO: 4776 - DNA, 20 bp, synthetic construct
  misc_feature 1..20: note = Description of Artificial Sequence: Synthetic oligonucleotide
  source 1..20: mol_type = other DNA
cagtgccctggagtttcctc

SEQ ID NO: 4777 - DNA, 20 bp, synthetic construct
  misc_feature 1..20: note = Description of Artificial Sequence: Synthetic oligonucleotide
  source 1..20: mol_type = other DNA
agtgccctggagtttcctcc

SEQ ID NO: 4778 - DNA, 20 bp, synthetic construct
  misc_feature 1..20: note = Description of Artificial Sequence: Synthetic oligonucleotide
  source 1..20: mol_type = other DNA
gtgccctggagtttcctccc

SEQ ID NO: 4779 - DNA, 20 bp, synthetic construct
  misc_feature 1..20: note = Description of Artificial Sequence: Synthetic oligonucleotide
  source 1..20: mol_type = other DNA
tgccctggagtttcctcccc

SEQ ID NO: 4780 - DNA, 20 bp, synthetic construct
  misc_feature 1..20: note = Description of Artificial Sequence: Synthetic oligonucleotide
  source 1..20: mol_type = other DNA
gccctggagtttcctccccg

SEQ ID NO: 4781 - DNA, 20 bp, synthetic construct
  misc_feature 1..20: note = Description of Artificial Sequence: Synthetic oligonucleotide
  source 1..20: mol_type = other DNA
ccctggagtttcctccccgc

SEQ ID NO: 4782 - DNA, 20 bp, synthetic construct
  misc_feature 1..20: note = Description of Artificial Sequence: Synthetic oligonucleotide
  source 1..20: mol_type = other DNA
cctggagtttcctccccgca

SEQ ID NO: 4783 - DNA, 20 bp, synthetic construct
  misc_feature 1..20: note = Description of Artificial Sequence: Synthetic oligonucleotide
  source 1..20: mol_type = other DNA
ctggagtttcctccccgcaa

SEQ ID NO: 4784 - DNA, 20 bp, synthetic construct
  misc_feature 1..20: note = Description of Artificial Sequence: Synthetic oligonucleotide
  source 1..20: mol_type = other DNA
tggagtttcctccccgcaag

SEQ ID NO: 4785 - DNA, 20 bp, synthetic construct
  misc_feature 1..20: note = Description of Artificial Sequence: Synthetic oligonucleotide
  source 1..20: mol_type = other DNA
ggagtttcctccccgcaagt

SEQ ID NO: 4786 - DNA, 20 bp, synthetic construct
  misc_feature 1..20: note = Description of Artificial Sequence: Synthetic oligonucleotide
  source 1..20: mol_type = other DNA
gagtttcctccccgcaagtc

SEQ ID NO: 4787 - DNA, 20 bp, synthetic construct
  misc_feature 1..20: note = Description of Artificial Sequence: Synthetic oligonucleotide
  source 1..20: mol_type = other DNA
agtttcctccccgcaagtcc

SEQ ID NO: 4788 - DNA, 20 bp, synthetic construct
  misc_feature 1..20: note = Description of Artificial Sequence: Synthetic oligonucleotide
  source 1..20: mol_type = other DNA
gtttcctccccgcaagtcca

SEQ ID NO: 4789 - DNA, 20 bp, synthetic construct
  misc_feature 1..20: note = Description of Artificial Sequence: Synthetic oligonucleotide
  source 1..20: mol_type = other DNA
tttcctccccgcaagtccag

SEQ ID NO: 4790 - DNA, 20 bp, synthetic construct
  misc_feature 1..20: note = Description of Artificial Sequence: Synthetic oligonucleotide
  source 1..20: mol_type = other DNA
ttcctccccgcaagtccagc

SEQ ID NO: 4791 - DNA, 20 bp, synthetic construct
  misc_feature 1..20: note = Description of Artificial Sequence: Synthetic oligonucleotide
  source 1..20: mol_type = other DNA
tcctccccgcaagtccagcc

SEQ ID NO: 4792 - DNA, 20 bp, synthetic construct
  misc_feature 1..20: note = Description of Artificial Sequence: Synthetic oligonucleotide
  source 1..20: mol_type = other DNA
cctccccgcaagtccagcct

SEQ ID NO: 4793 - DNA, 20 bp, synthetic construct
  misc_feature 1..20: note = Description of Artificial Sequence: Synthetic oligonucleotide
  source 1..20: mol_type = other DNA
ctccccgcaagtccagcctg

SEQ ID NO: 4794 - DNA, 20 bp, synthetic construct
  misc_feature 1..20: note = Description of Artificial Sequence: Synthetic oligonucleotide
  source 1..20: mol_type = other DNA
tccccgcaagtccagcctgg

SEQ ID NO: 4795 - DNA, 20 bp, synthetic construct
  misc_feature 1..20: note = Description of Artificial Sequence: Synthetic oligonucleotide
  source 1..20: mol_type = other DNA
ccccgcaagtccagcctggg

SEQ ID NO: 4796 - DNA, 20 bp, synthetic construct
  misc_feature 1..20: note = Description of Artificial Sequence: Synthetic oligonucleotide
  source 1..20: mol_type = other DNA
cccgcaagtccagcctgggt

SEQ ID NO: 4797 - DNA, 20 bp, synthetic construct
  misc_feature 1..20: note = Description of Artificial Sequence: Synthetic oligonucleotide
  source 1..20: mol_type = other DNA
ccgcaagtccagcctgggtc

SEQ ID NO: 4798 - DNA, 20 bp, synthetic construct
  misc_feature 1..20: note = Description of Artificial Sequence: Synthetic oligonucleotide
  source 1..20: mol_type = other DNA
cgcaagtccagcctgggtca

SEQ ID NO: 4799 - DNA, 20 bp, synthetic construct
  misc_feature 1..20: note = Description of Artificial Sequence: Synthetic oligonucleotide
  source 1..20: mol_type = other DNA
gcaagtccagcctgggtcag

SEQ ID NO: 4800 - DNA, 20 bp, synthetic construct
  misc_feature 1..20: note = Description of Artificial Sequence: Synthetic oligonucleotide
  source 1..20: mol_type = other DNA
caagtccagcctgggtcagt

SEQ ID NO: 4801 - DNA, 20 bp, synthetic construct
  misc_feature 1..20: note = Description of Artificial Sequence: Synthetic oligonucleotide
  source 1..20: mol_type = other DNA
aagtccagcctgggtcagtt

SEQ ID NO: 4802 - DNA, 20 bp, synthetic construct
  misc_feature 1..20: note = Description of Artificial Sequence: Synthetic oligonucleotide
  source 1..20: mol_type = other DNA
agtccagcctgggtcagttc

SEQ ID NO: 4803 - DNA, 20 bp, synthetic construct
  misc_feature 1..20: note = Description of Artificial Sequence: Synthetic oligonucleotide
  source 1..20: mol_type = other DNA
gtccagcctgggtcagttcc

SEQ ID NO: 4804 - DNA, 20 bp, synthetic construct
  misc_feature 1..20: note = Description of Artificial Sequence: Synthetic oligonucleotide
  source 1..20: mol_type = other DNA
tccagcctgggtcagttcca

SEQ ID NO: 4805 - DNA, 20 bp, synthetic construct
  misc_feature 1..20: note = Description of Artificial Sequence: Synthetic oligonucleotide
  source 1..20: mol_type = other DNA
ccagcctgggtcagttccag

SEQ ID NO: 4806 - DNA, 20 bp, synthetic construct
  misc_feature 1..20: note = Description of Artificial Sequence: Synthetic oligonucleotide
  source 1..20: mol_type = other DNA
cagcctgggtcagttccagc

SEQ ID NO: 4807 - DNA, 20 bp, synthetic construct
  misc_feature 1..20: note = Description of Artificial Sequence: Synthetic oligonucleotide
  source 1..20: mol_type = other DNA
agcctgggtcagttccagcc

SEQ ID NO: 4808 - DNA, 20 bp, synthetic construct
  misc_feature 1..20: note = Description of Artificial Sequence: Synthetic oligonucleotide
  source 1..20: mol_type = other DNA
gcctgggtcagttccagccg

SEQ ID NO: 4809 - DNA, 20 bp, synthetic construct
  misc_feature 1..20: note = Description of Artificial Sequence: Synthetic oligonucleotide
  source 1..20: mol_type = other DNA
cctgggtcagttccagccga

SEQ ID NO: 4810 - DNA, 20 bp, synthetic construct
  misc_feature 1..20: note = Description of Artificial Sequence: Synthetic oligonucleotide
  source 1..20: mol_type = other DNA
ctgggtcagttccagccgaa

SEQ ID NO: 4811 - DNA, 20 bp, synthetic construct
  misc_feature 1..20: note = Description of Artificial Sequence: Synthetic oligonucleotide
  source 1..20: mol_type = other DNA
tgggtcagttccagccgaac

SEQ ID NO: 4812 - DNA, 20 bp, synthetic construct
  misc_feature 1..20: note = Description of Artificial Sequence: Synthetic oligonucleotide
  source 1..20: mol_type = other DNA
gggtcagttccagccgaaca

SEQ ID NO: 4813 - DNA, 20 bp, synthetic construct
  misc_feature 1..20: note = Description of Artificial Sequence: Synthetic oligonucleotide
  source 1..20: mol_type = other DNA
ggtcagttccagccgaacaa

SEQ ID NO: 4814 - DNA, 20 bp, synthetic construct
  misc_feature 1..20: note = Description of Artificial Sequence: Synthetic oligonucleotide
  source 1..20: mol_type = other DNA
gtcagttccagccgaacaat

SEQ ID NO: 4815 - DNA, 20 bp, synthetic construct
  misc_feature 1..20: note = Description of Artificial Sequence: Synthetic oligonucleotide
  source 1..20: mol_type = other DNA
tcagttccagccgaacaatt

SEQ ID NO: 4816 - DNA, 20 bp, synthetic construct
  misc_feature 1..20: note = Description of Artificial Sequence: Synthetic oligonucleotide
  source 1..20: mol_type = other DNA
cagttccagccgaacaattt

SEQ ID NO: 4817 - DNA, 20 bp, synthetic construct
  misc_feature 1..20: note = Description of Artificial Sequence: Synthetic oligonucleotide
  source 1..20: mol_type = other DNA
agttccagccgaacaatttt

SEQ ID NO: 4818 - DNA, 20 bp, synthetic construct
  misc_feature 1..20: note = Description of Artificial Sequence: Synthetic oligonucleotide
  source 1..20: mol_type = other DNA
gttccagccgaacaattttt

SEQ ID NO: 4819 - DNA, 20 bp, synthetic construct
  misc_feature 1..20: note = Description of Artificial Sequence: Synthetic oligonucleotide
  source 1..20: mol_type = other DNA
ttccagccgaacaatttttg

SEQ ID NO: 4820 - DNA, 20 bp, synthetic construct
  misc_feature 1..20: note = Description of Artificial Sequence: Synthetic oligonucleotide
  source 1..20: mol_type = other DNA
tccagccgaacaatttttgt

SEQ ID NO: 4821 - DNA, 20 bp, synthetic construct
  misc_feature 1..20: note = Description of Artificial Sequence: Synthetic oligonucleotide
  source 1..20: mol_type = other DNA
ccagccgaacaatttttgtg

SEQ ID NO: 4822 - DNA, 20 bp, synthetic construct
  misc_feature 1..20: note = Description of Artificial Sequence: Synthetic oligonucleotide
  source 1..20: mol_type = other DNA
cagccgaacaatttttgtgt

SEQ ID NO: 4823 - DNA, 20 bp, synthetic construct
  misc_feature 1..20: note = Description of Artificial Sequence: Synthetic oligonucleotide
  source 1..20: mol_type = other DNA
agccgaacaatttttgtgtt

SEQ ID NO: 4824 - DNA, 20 bp, synthetic construct
  misc_feature 1..20: note = Description of Artificial Sequence: Synthetic oligonucleotide
  source 1..20: mol_type = other DNA
gccgaacaatttttgtgttt

SEQ ID NO: 4825 - DNA, 20 bp, synthetic construct
  misc_feature 1..20: note = Description of Artificial Sequence: Synthetic oligonucleotide
  source 1..20: mol_type = other DNA
ccgaacaatttttgtgtttt

SEQ ID NO: 4826 - DNA, 20 bp, synthetic construct
  misc_feature 1..20: note = Description of Artificial Sequence: Synthetic oligonucleotide
  source 1..20: mol_type = other DNA
cgaacaatttttgtgtttta

SEQ ID NO: 4827 - DNA, 20 bp, synthetic construct
  misc_feature 1..20: note = Description of Artificial Sequence: Synthetic oligonucleotide
  source 1..20: mol_type = other DNA
gaacaatttttgtgttttaa

SEQ ID NO: 4828 - DNA, 20 bp, synthetic construct
  misc_feature 1..20: note = Description of Artificial Sequence: Synthetic oligonucleotide
  source 1..20: mol_type = other DNA
aacaatttttgtgttttaaa

SEQ ID NO: 4829 - DNA, 20 bp, synthetic construct
  misc_feature 1..20: note = Description of Artificial Sequence: Synthetic oligonucleotide
  source 1..20: mol_type = other DNA
acaatttttgtgttttaaaa

SEQ ID NO: 4830 - DNA, 20 bp, synthetic construct
  misc_feature 1..20: note = Description of Artificial Sequence: Synthetic oligonucleotide
  source 1..20: mol_type = other DNA
caatttttgtgttttaaaaa

SEQ ID NO: 4831 - DNA, 20 bp, synthetic construct
  misc_feature 1..20: note = Description of Artificial Sequence: Synthetic oligonucleotide
  source 1..20: mol_type = other DNA
aatttttgtgttttaaaaat

SEQ ID NO: 4832 - DNA, 20 bp, synthetic construct
  misc_feature 1..20: note = Description of Artificial Sequence: Synthetic oligonucleotide
  source 1..20: mol_type = other DNA
atttttgtgttttaaaaata

SEQ ID NO: 4833 - DNA, 20 bp, synthetic construct
  misc_feature 1..20: note = Description of Artificial Sequence: Synthetic oligonucleotide
  source 1..20: mol_type = other DNA
tttttgtgttttaaaaataa

SEQ ID NO: 4834 - DNA, 20 bp, synthetic construct
  misc_feature 1..20: note = Description of Artificial Sequence: Synthetic oligonucleotide
  source 1..20: mol_type = other DNA
ttttgtgttttaaaaataat

SEQ ID NO: 4835 - DNA, 20 bp, synthetic construct
  misc_feature 1..20: note = Description of Artificial Sequence: Synthetic oligonucleotide
  source 1..20: mol_type = other DNA
tttgtgttttaaaaataatg

SEQ ID NO: 4836 - DNA, 20 bp, synthetic construct
  misc_feature 1..20: note = Description of Artificial Sequence: Synthetic oligonucleotide
  source 1..20: mol_type = other DNA
ttgtgttttaaaaataatgt

SEQ ID NO: 4837 - DNA, 20 bp, synthetic construct
  misc_feature 1..20: note = Description of Artificial Sequence: Synthetic oligonucleotide
  source 1..20: mol_type = other DNA
tgtgttttaaaaataatgtg

SEQ ID NO: 4838 - DNA, 20 bp, synthetic construct
  misc_feature 1..20: note = Description of Artificial Sequence: Synthetic oligonucleotide
  source 1..20: mol_type = other DNA
gtgttttaaaaataatgtgt

SEQ ID NO: 4839 - DNA, 20 bp, synthetic construct
  misc_feature 1..20: note = Description of Artificial Sequence: Synthetic oligonucleotide
  source 1..20: mol_type = other DNA
tgttttaaaaataatgtgta

SEQ ID NO: 4840 - DNA, 20 bp, synthetic construct
  misc_feature 1..20: note = Description of Artificial Sequence: Synthetic oligonucleotide
  source 1..20: mol_type = other DNA
gttttaaaaataatgtgtag

SEQ ID NO: 4841 - DNA, 20 bp, synthetic construct
  misc_feature 1..20: note = Description of Artificial Sequence: Synthetic oligonucleotide
  source 1..20: mol_type = other DNA
ttttaaaaataatgtgtaga

SEQ ID NO: 4842 - DNA, 20 bp, synthetic construct
  misc_feature 1..20: note = Description of Artificial Sequence: Synthetic oligonucleotide
  source 1..20: mol_type = other DNA
tttaaaaataatgtgtagac

SEQ ID NO: 4843 - DNA, 20 bp, synthetic construct
  misc_feature 1..20: note = Description of Artificial Sequence: Synthetic oligonucleotide
  source 1..20: mol_type = other DNA
ttaaaaataatgtgtagact

SEQ ID NO: 4844 - DNA, 20 bp, synthetic construct
  misc_feature 1..20: note = Description of Artificial Sequence: Synthetic oligonucleotide
  source 1..20: mol_type = other DNA
taaaaataatgtgtagactc

SEQ ID NO: 4845 - DNA, 20 bp, synthetic construct
  misc_feature 1..20: note = Description of Artificial Sequence: Synthetic oligonucleotide
  source 1..20: mol_type = other DNA
aaaaataatgtgtagactca

SEQ ID NO: 4846 - DNA, 20 bp, synthetic construct
  misc_feature 1..20: note = Description of Artificial Sequence: Synthetic oligonucleotide
  source 1..20: mol_type = other DNA
aaaataatgtgtagactcaa

SEQ ID NO: 4847 - DNA, 20 bp, synthetic construct
  misc_feature 1..20: note = Description of Artificial Sequence: Synthetic oligonucleotide
  source 1..20: mol_type = other DNA
aaataatgtgtagactcaag

SEQ ID NO: 4848 - DNA, 20 bp, synthetic construct
  misc_feature 1..20: note = Description of Artificial Sequence: Synthetic oligonucleotide
  source 1..20: mol_type = other DNA
aataatgtgtagactcaaga

SEQ ID NO: 4849 - DNA, 20 bp, synthetic construct
  misc_feature 1..20: note = Description of Artificial Sequence: Synthetic oligonucleotide
  source 1..20: mol_type = other DNA
ataatgtgtagactcaagat

SEQ ID NO: 4850 - DNA, 20 bp, synthetic construct
  misc_feature 1..20: note = Description of Artificial Sequence: Synthetic oligonucleotide
  source 1..20: mol_type = other DNA
taatgtgtagactcaagata

SEQ ID NO: 4851 - DNA, 20 bp, synthetic construct
  misc_feature 1..20: note = Description of Artificial Sequence: Synthetic oligonucleotide
  source 1..20: mol_type = other DNA
aatgtgtagactcaagataa

SEQ ID NO: 4852 - DNA, 20 bp, synthetic construct
  misc_feature 1..20: note = Description of Artificial Sequence: Synthetic oligonucleotide
  source 1..20: mol_type = other DNA
atgtgtagactcaagataat

SEQ ID NO: 4853 - DNA, 20 bp, synthetic construct
  misc_feature 1..20: note = Description of Artificial Sequence: Synthetic oligonucleotide
  source 1..20: mol_type = other DNA
tgtgtagactcaagataatt

SEQ ID NO: 4854 - DNA, 20 bp, synthetic construct
  misc_feature 1..20: note = Description of Artificial Sequence: Synthetic oligonucleotide
  source 1..20: mol_type = other DNA
gtgtagactcaagataattt

SEQ ID NO: 4855 - DNA, 20 bp, synthetic construct
  misc_feature 1..20: note = Description of Artificial Sequence: Synthetic oligonucleotide
  source 1..20: mol_type = other DNA
tgtagactcaagataatttc

SEQ ID NO: 4856 - DNA, 20 bp, synthetic construct
  misc_feature 1..20: note = Description of Artificial Sequence: Synthetic oligonucleotide
  source 1..20: mol_type = other DNA
gtagactcaagataatttca

SEQ ID NO: 4857 - DNA, 20 bp, synthetic construct
  misc_feature 1..20: note = Description of Artificial Sequence: Synthetic oligonucleotide
  source 1..20: mol_type = other DNA
tagactcaagataatttcac

SEQ ID NO: 4858 - DNA, 20 bp, synthetic construct
  misc_feature 1..20: note = Description of Artificial Sequence: Synthetic oligonucleotide
  source 1..20: mol_type = other DNA
agactcaagataatttcact

SEQ ID NO: 4859 - DNA, 20 bp, synthetic construct
  misc_feature 1..20: note = Description of Artificial Sequence: Synthetic oligonucleotide
  source 1..20: mol_type = other DNA
gactcaagataatttcactg

SEQ ID NO: 4860 - DNA, 20 bp, synthetic construct
  misc_feature 1..20: note = Description of Artificial Sequence: Synthetic oligonucleotide
  source 1..20: mol_type = other DNA
actcaagataatttcactgg

SEQ ID NO: 4861 - DNA, 20 bp, synthetic construct
  misc_feature 1..20: note = Description of Artificial Sequence: Synthetic oligonucleotide
  source 1..20: mol_type = other DNA
ctcaagataatttcactgga

SEQ ID NO: 4862 - DNA, 20 bp, synthetic construct
  misc_feature 1..20: note = Description of Artificial Sequence: Synthetic oligonucleotide
  source 1..20: mol_type = other DNA
tcaagataatttcactggat

SEQ ID NO: 4863 - DNA, 20 bp, synthetic construct
  misc_feature 1..20: note = Description of Artificial Sequence: Synthetic oligonucleotide
  source 1..20: mol_type = other DNA
caagataatttcactggatt

SEQ ID NO: 4864 - DNA, 20 bp, synthetic construct
  misc_feature 1..20: note = Description of Artificial Sequence: Synthetic oligonucleotide
  source 1..20: mol_type = other DNA
aagataatttcactggattt

SEQ ID NO: 4865 - DNA, 20 bp, synthetic construct
  misc_feature 1..20: note = Description of Artificial Sequence: Synthetic oligonucleotide
  source 1..20: mol_type = other DNA
agataatttcactggattta

SEQ ID NO: 4866 - DNA, 20 bp, synthetic construct
  misc_feature 1..20: note = Description of Artificial Sequence: Synthetic oligonucleotide
  source 1..20: mol_type = other DNA
gataatttcactggatttaa

SEQ ID NO: 4867 - DNA, 20 bp, synthetic construct
  misc_feature 1..20: note = Description of Artificial Sequence: Synthetic oligonucleotide
  source 1..20: mol_type = other DNA
ataatttcactggatttaaa

SEQ ID NO: 4868 - DNA, 20 bp, synthetic construct
  misc_feature 1..20: note = Description of Artificial Sequence: Synthetic oligonucleotide
  source 1..20: mol_type = other DNA
taatttcactggatttaaaa

SEQ ID NO: 4869 - DNA, 20 bp, synthetic construct
  misc_feature 1..20: note = Description of Artificial Sequence: Synthetic oligonucleotide
  source 1..20: mol_type = other DNA
aatttcactggatttaaaaa

SEQ ID NO: 4870 - DNA, 20 bp, synthetic construct
  misc_feature 1..20: note = Description of Artificial Sequence: Synthetic oligonucleotide
  source 1..20: mol_type = other DNA
atttcactggatttaaaaat

SEQ ID NO: 4871 - DNA, 20 bp, synthetic construct
  misc_feature 1..20: note = Description of Artificial Sequence: Synthetic oligonucleotide
  source 1..20: mol_type = other DNA
tttcactggatttaaaaata

SEQ ID NO: 4872 - DNA, 20 bp, synthetic construct
  misc_feature 1..20: note = Description of Artificial Sequence: Synthetic oligonucleotide
  source 1..20: mol_type = other DNA
ttcactggatttaaaaatag

SEQ ID NO: 4873 - DNA, 20 bp, synthetic construct
  misc_feature 1..20: note = Description of Artificial Sequence: Synthetic oligonucleotide
  source 1..20: mol_type = other DNA
tcactggatttaaaaataga

SEQ ID NO: 4874 - DNA, 20 bp, synthetic construct
  misc_feature 1..20: note = Description of Artificial Sequence: Synthetic oligonucleotide
  source 1..20: mol_type = other DNA
cactggatttaaaaatagaa

SEQ ID NO: 4875 - DNA, 20 bp, synthetic construct
  misc_feature 1..20: note = Description of Artificial Sequence: Synthetic oligonucleotide
  source 1..20: mol_type = other DNA
actggatttaaaaatagaaa

SEQ ID NO: 4876 - DNA, 20 bp, synthetic construct
  misc_feature 1..20: note = Description of Artificial Sequence: Synthetic oligonucleotide
  source 1..20: mol_type = other DNA
ctggatttaaaaatagaaat

SEQ ID NO: 4877 - DNA, 20 bp, synthetic construct
  misc_feature 1..20: note = Description of Artificial Sequence: Synthetic oligonucleotide
  source 1..20: mol_type = other DNA
tggatttaaaaatagaaata

SEQ ID NO: 4878 - DNA, 20 bp, synthetic construct
  misc_feature 1..20: note = Description of Artificial Sequence: Synthetic oligonucleotide
  source 1..20: mol_type = other DNA
ggatttaaaaatagaaatac

SEQ ID NO: 4879 - DNA, 20 bp, synthetic construct
  misc_feature 1..20: note = Description of Artificial Sequence: Synthetic oligonucleotide
  source 1..20: mol_type = other DNA
gatttaaaaatagaaatacc

SEQ ID NO: 4880 - DNA, 20 bp, synthetic construct
  misc_feature 1..20: note = Description of Artificial Sequence: Synthetic oligonucleotide
  source 1..20: mol_type = other DNA
atttaaaaatagaaatacca

SEQ ID NO: 4881 - DNA, 20 bp, synthetic construct
  misc_feature 1..20: note = Description of Artificial Sequence: Synthetic oligonucleotide
  source 1..20: mol_type = other DNA
tttaaaaatagaaataccat

SEQ ID NO: 4882 - DNA, 20 bp, synthetic construct
  misc_feature 1..20: note = Description of Artificial Sequence: Synthetic oligonucleotide
  source 1..20: mol_type = other DNA
ttaaaaatagaaataccatt

SEQ ID NO: 4883 - DNA, 20 bp, synthetic construct
  misc_feature 1..20: note = Description of Artificial Sequence: Synthetic oligonucleotide
  source 1..20: mol_type = other DNA
taaaaatagaaataccattt

SEQ ID NO: 4884 - DNA, 20 bp, synthetic construct
  misc_feature 1..20: note = Description of Artificial Sequence: Synthetic oligonucleotide
  source 1..20: mol_type = other DNA
aaaaatagaaataccatttc

SEQ ID NO: 4885 - DNA, 20 bp, synthetic construct
  misc_feature 1..20: note = Description of Artificial Sequence: Synthetic oligonucleotide
  source 1..20: mol_type = other DNA
aaaatagaaataccatttcc

SEQ ID NO: 4886 - DNA, 20 bp, synthetic construct
  misc_feature 1..20: note = Description of Artificial Sequence: Synthetic oligonucleotide
  source 1..20: mol_type = other DNA
aaatagaaataccatttccc

SEQ ID NO: 4887 - DNA, 20 bp, synthetic construct
  misc_feature 1..20: note = Description of Artificial Sequence: Synthetic oligonucleotide
  source 1..20: mol_type = other DNA
aatagaaataccatttccca

SEQ ID NO: 4888 - DNA, 20 bp, synthetic construct
  misc_feature 1..20: note = Description of Artificial Sequence: Synthetic oligonucleotide
  source 1..20: mol_type = other DNA
atagaaataccatttcccac

SEQ ID NO: 4889 - DNA, 20 bp, synthetic construct
  misc_feature 1..20: note = Description of Artificial Sequence: Synthetic oligonucleotide
  source 1..20: mol_type = other DNA
tagaaataccatttcccacc

SEQ ID NO: 4890 - DNA, 20 bp, synthetic construct
  misc_feature 1..20: note = Description of Artificial Sequence: Synthetic oligonucleotide
  source 1..20: mol_type = other DNA
agaaataccatttcccacct

SEQ ID NO: 4891 - DNA, 20 bp, synthetic construct
  misc_feature 1..20: note = Description of Artificial Sequence: Synthetic oligonucleotide
  source 1..20: mol_type = other DNA
gaaataccatttcccacctg

SEQ ID NO: 4892 - DNA, 20 bp, synthetic construct
  misc_feature 1..20: note = Description of Artificial Sequence: Synthetic oligonucleotide
  source 1..20: mol_type = other DNA
aaataccatttcccacctgc

SEQ ID NO: 4893 - DNA, 20 bp, synthetic construct
  misc_feature 1..20: note = Description of Artificial Sequence: Synthetic oligonucleotide
  source 1..20: mol_type = other DNA
aataccatttcccacctgcc

SEQ ID NO: 4894 - DNA, 20 bp, synthetic construct
  misc_feature 1..20: note = Description of Artificial Sequence: Synthetic oligonucleotide
  source 1..20: mol_type = other DNA
ataccatttcccacctgcct

SEQ ID NO: 4895 - DNA, 20 bp, synthetic construct
  misc_feature 1..20: note = Description of Artificial Sequence: Synthetic oligonucleotide
  source 1..20: mol_type = other DNA
taccatttcccacctgcctc

SEQ ID NO: 4896 - DNA, 20 bp, synthetic construct
  misc_feature 1..20: note = Description of Artificial Sequence: Synthetic oligonucleotide
  source 1..20: mol_type = other DNA
accatttcccacctgcctcc

SEQ ID NO: 4897 - DNA, 20 bp, synthetic construct
  misc_feature 1..20: note = Description of Artificial Sequence: Synthetic oligonucleotide
  source 1..20: mol_type = other DNA
ccatttcccacctgcctcct

SEQ ID NO: 4898 - DNA, 20 bp, synthetic construct
  misc_feature 1..20: note = Description of Artificial Sequence: Synthetic oligonucleotide
  source 1..20: mol_type = other DNA
catttcccacctgcctcctt

SEQ ID NO: 4899 - DNA, 20 bp, synthetic construct
  misc_feature 1..20: note = Description of Artificial Sequence: Synthetic oligonucleotide
  source 1..20: mol_type = other DNA
atttcccacctgcctccttc

SEQ ID NO: 4900 - DNA, 20 bp, synthetic construct
  misc_feature 1..20: note = Description of Artificial Sequence: Synthetic oligonucleotide
  source 1..20: mol_type = other DNA
tttcccacctgcctccttca

SEQ ID NO: 4901 - DNA, 20 bp, synthetic construct
  misc_feature 1..20: note = Description of Artificial Sequence: Synthetic oligonucleotide
  source 1..20: mol_type = other DNA
ttcccacctgcctccttcac

SEQ ID NO: 4902 - DNA, 20 bp, synthetic construct
  misc_feature 1..20: note = Description of Artificial Sequence: Synthetic oligonucleotide
  source 1..20: mol_type = other DNA
tcccacctgcctccttcact

SEQ ID NO: 4903 - DNA, 20 bp, synthetic construct
  misc_feature 1..20: note = Description of Artificial Sequence: Synthetic oligonucleotide
  source 1..20: mol_type = other DNA
cccacctgcctccttcactc

SEQ ID NO: 4904 - DNA, 20 bp, synthetic construct
  misc_feature 1..20: note = Description of Artificial Sequence: Synthetic oligonucleotide
  source 1..20: mol_type = other DNA
ccacctgcctccttcactcc

SEQ ID NO: 4905 - DNA, 20 bp, synthetic construct
  misc_feature 1..20: note = Description of Artificial Sequence: Synthetic oligonucleotide
  source 1..20: mol_type = other DNA
cacctgcctccttcactcct

SEQ ID NO: 4906 - DNA, 20 bp, synthetic construct
  misc_feature 1..20: note = Description of Artificial Sequence: Synthetic oligonucleotide
  source 1..20: mol_type = other DNA
acctgcctccttcactcctt

SEQ ID NO: 4907 - DNA, 20 bp, synthetic construct
  misc_feature 1..20: note = Description of Artificial Sequence: Synthetic oligonucleotide
  source 1..20: mol_type = other DNA
cctgcctccttcactccttt

SEQ ID NO: 4908 - DNA, 20 bp, synthetic construct
  misc_feature 1..20: note = Description of Artificial Sequence: Synthetic oligonucleotide
  source 1..20: mol_type = other DNA
ctgcctccttcactcctttc

SEQ ID NO: 4909 - DNA, 20 bp, synthetic construct
  misc_feature 1..20: note = Description of Artificial Sequence: Synthetic oligonucleotide
  source 1..20: mol_type = other DNA
tgcctccttcactcctttct

SEQ ID NO: 4910 - DNA, 20 bp, synthetic construct
  misc_feature 1..20: note = Description of Artificial Sequence: Synthetic oligonucleotide
  source 1..20: mol_type = other DNA
gcctccttcactcctttctc

SEQ ID NO: 4911 - DNA, 20 bp, synthetic construct
  misc_feature 1..20: note = Description of Artificial Sequence: Synthetic oligonucleotide
  source 1..20: mol_type = other DNA
cctccttcactcctttctct

SEQ ID NO: 4912 - DNA, 20 bp, synthetic construct
  misc_feature 1..20: note = Description of Artificial Sequence: Synthetic oligonucleotide
  source 1..20: mol_type = other DNA
ctccttcactcctttctcta

SEQ ID NO: 4913 - DNA, 20 bp, synthetic construct
  misc_feature 1..20: note = Description of Artificial Sequence: Synthetic oligonucleotide
  source 1..20: mol_type = other DNA
tccttcactcctttctctaa

SEQ ID NO: 4914 - DNA, 20 bp, synthetic construct
  misc_feature 1..20: note = Description of Artificial Sequence: Synthetic oligonucleotide
  source 1..20: mol_type = other DNA
ccttcactcctttctctaac

SEQ ID NO: 4915 - DNA, 20 bp, synthetic construct
  misc_feature 1..20: note = Description of Artificial Sequence: Synthetic oligonucleotide
  source 1..20: mol_type = other DNA
cttcactcctttctctaaca

SEQ ID NO: 4916 - DNA, 20 bp, synthetic construct
  misc_feature 1..20: note = Description of Artificial Sequence: Synthetic oligonucleotide
  source 1..20: mol_type = other DNA
ttcactcctttctctaacac

SEQ ID NO: 4917 - DNA, 20 bp, synthetic construct
  misc_feature 1..20: note = Description of Artificial Sequence: Synthetic oligonucleotide
  source 1..20: mol_type = other DNA
tcactcctttctctaacact

SEQ ID NO: 4918 - DNA, 20 bp, synthetic construct
  misc_feature 1..20: note = Description of Artificial Sequence: Synthetic oligonucleotide
  source 1..20: mol_type = other DNA
cactcctttctctaacactc

SEQ ID NO: 4919 - DNA, 20 bp, synthetic construct
  misc_feature 1..20: note = Description of Artificial Sequence: Synthetic oligonucleotide
  source 1..20: mol_type = other DNA
actcctttctctaacactca

SEQ ID NO: 4920 - DNA, 20 bp, synthetic construct
  misc_feature 1..20: note = Description of Artificial Sequence: Synthetic oligonucleotide
  source 1..20: mol_type = other DNA
ctcctttctctaacactcaa

SEQ ID NO: 4921 - DNA, 20 bp, synthetic construct
  misc_feature 1..20: note = Description of Artificial Sequence: Synthetic oligonucleotide
  source 1..20: mol_type = other DNA
tcctttctctaacactcaaa

SEQ ID NO: 4922 - DNA, 20 bp, synthetic construct
  misc_feature 1..20: note = Description of Artificial Sequence: Synthetic oligonucleotide
  source 1..20: mol_type = other DNA
cctttctctaacactcaaag

SEQ ID NO: 4923 - DNA, 20 bp, synthetic construct
  misc_feature 1..20: note = Description of Artificial Sequence: Synthetic oligonucleotide
  source 1..20: mol_type = other DNA
ctttctctaacactcaaagg

SEQ ID NO: 4924 - DNA, 20 bp, synthetic construct
  misc_feature 1..20: note = Description of Artificial Sequence: Synthetic oligonucleotide
  source 1..20: mol_type = other DNA
tttctctaacactcaaaggc

SEQ ID NO: 4925 - DNA, 20 bp, synthetic construct
  misc_feature 1..20: note = Description of Artificial Sequence: Synthetic oligonucleotide
  source 1..20: mol_type = other DNA
ttctctaacactcaaaggcc

SEQ ID NO: 4926 - DNA, 20 bp, synthetic construct
  misc_feature 1..20: note = Description of Artificial Sequence: Synthetic oligonucleotide
  source 1..20: mol_type = other DNA
tctctaacactcaaaggcct

SEQ ID NO: 4927 - DNA, 20 bp, synthetic construct
  misc_feature 1..20: note = Description of Artificial Sequence: Synthetic oligonucleotide
  source 1..20: mol_type = other DNA
ctctaacactcaaaggccta

SEQ ID NO: 4928 - DNA, 20 bp, synthetic construct
  misc_feature 1..20: note = Description of Artificial Sequence: Synthetic oligonucleotide
  source 1..20: mol_type = other DNA
tctaacactcaaaggcctat

SEQ ID NO: 4929 - DNA, 20 bp, synthetic construct
  misc_feature 1..20: note = Description of Artificial Sequence: Synthetic oligonucleotide
  source 1..20: mol_type = other DNA
ctaacactcaaaggcctatc

SEQ ID NO: 4930 - DNA, 20 bp, synthetic construct
  misc_feature 1..20: note = Description of Artificial Sequence: Synthetic oligonucleotide
  source 1..20: mol_type = other DNA
taacactcaaaggcctatcc

SEQ ID NO: 4931 - DNA, 20 bp, synthetic construct
  misc_feature 1..20: note = Description of Artificial Sequence: Synthetic oligonucleotide
  source 1..20: mol_type = other DNA
aacactcaaaggcctatcct

SEQ ID NO: 4932 - DNA, 20 bp, synthetic construct
  misc_feature 1..20: note = Description of Artificial Sequence: Synthetic oligonucleotide
  source 1..20: mol_type = other DNA
acactcaaaggcctatcctt

SEQ ID NO: 4933 - DNA, 20 bp, synthetic construct
  misc_feature 1..20: note = Description of Artificial Sequence: Synthetic oligonucleotide
  source 1..20: mol_type = other DNA
cactcaaaggcctatccttt

SEQ ID NO: 4934 - DNA, 20 bp, synthetic construct
  misc_feature 1..20: note = Description of Artificial Sequence: Synthetic oligonucleotide
  source 1..20: mol_type = other DNA
actcaaaggcctatcctttg

SEQ ID NO: 4935 - DNA, 20 bp, synthetic construct
  misc_feature 1..20: note = Description of Artificial Sequence: Synthetic oligonucleotide
  source 1..20: mol_type = other DNA
ctcaaaggcctatcctttga

SEQ ID NO: 4936 - DNA, 20 bp, synthetic construct
  misc_feature 1..20: note = Description of Artificial Sequence: Synthetic oligonucleotide
  source 1..20: mol_type = other DNA
tcaaaggcctatcctttgag

SEQ ID NO: 4937 - DNA, 20 bp, synthetic construct
  misc_feature 1..20: note = Description of Artificial Sequence: Synthetic oligonucleotide
  source 1..20: mol_type = other DNA
caaaggcctatcctttgaga

SEQ ID NO: 4938 - DNA, 20 bp, synthetic construct
  misc_feature 1..20: note = Description of Artificial Sequence: Synthetic oligonucleotide
  source 1..20: mol_type = other DNA
aaaggcctatcctttgagaa

SEQ ID NO: 4939 - DNA, 20 bp, synthetic construct
  misc_feature 1..20: note = Description of Artificial Sequence: Synthetic oligonucleotide
  source 1..20: mol_type = other DNA
aaggcctatcctttgagaat

SEQ ID NO: 4940 - DNA, 20 bp, synthetic construct
  misc_feature 1..20: note = Description of Artificial Sequence: Synthetic oligonucleotide
  source 1..20: mol_type = other DNA
aggcctatcctttgagaatc

SEQ ID NO: 4941 - DNA, 20 bp, synthetic construct
  misc_feature 1..20: note = Description of Artificial Sequence: Synthetic oligonucleotide
  source 1..20: mol_type = other DNA
ggcctatcctttgagaatca

SEQ ID NO: 4942 - DNA, 20 bp, synthetic construct
  misc_feature 1..20: note = Description of Artificial Sequence: Synthetic oligonucleotide
  source 1..20: mol_type = other DNA
gcctatcctttgagaatcaa

SEQ ID NO: 4943 - DNA, 20 bp, synthetic construct
  misc_feature 1..20: note = Description of Artificial Sequence: Synthetic oligonucleotide
  source 1..20: mol_type = other DNA
cctatcctttgagaatcaaa

SEQ ID NO: 4944 - DNA, 20 bp, synthetic construct
  misc_feature 1..20: note = Description of Artificial Sequence: Synthetic oligonucleotide
  source 1..20: mol_type = other DNA
ctatcctttgagaatcaaaa

SEQ ID NO: 4945 - DNA, 20 bp, synthetic construct
  misc_feature 1..20: note = Description of Artificial Sequence: Synthetic oligonucleotide
  source 1..20: mol_type = other DNA
tatcctttgagaatcaaaat

SEQ ID NO: 4946 - DNA, 20 bp, synthetic construct
  misc_feature 1..20: note = Description of Artificial Sequence: Synthetic oligonucleotide
  source 1..20: mol_type = other DNA
atcctttgagaatcaaaata

SEQ ID NO: 4947 - DNA, 20 bp, synthetic construct
  misc_feature 1..20: note = Description of Artificial Sequence: Synthetic oligonucleotide
  source 1..20: mol_type = other DNA
tcctttgagaatcaaaataa

SEQ ID NO: 4948 - DNA, 20 bp, synthetic construct
  misc_feature 1..20: note = Description of Artificial Sequence: Synthetic oligonucleotide
  source 1..20: mol_type = other DNA
cctttgagaatcaaaataat

SEQ ID NO: 4949 - DNA, 20 bp, synthetic construct
  misc_feature 1..20: note = Description of Artificial Sequence: Synthetic oligonucleotide
  source 1..20: mol_type = other DNA
ctttgagaatcaaaataata

SEQ ID NO: 4950 - DNA, 20 bp, synthetic construct
  misc_feature 1..20: note = Description of Artificial Sequence: Synthetic oligonucleotide
  source 1..20: mol_type = other DNA
tttgagaatcaaaataatat

SEQ ID NO: 4951 - DNA, 20 bp, synthetic construct
  misc_feature 1..20: note = Description of Artificial Sequence: Synthetic oligonucleotide
  source 1..20: mol_type = other DNA
ttgagaatcaaaataatatg

SEQ ID NO: 4952 - DNA, 20 bp, synthetic construct
  misc_feature 1..20: note = Description of Artificial Sequence: Synthetic oligonucleotide
  source 1..20: mol_type = other DNA
tgagaatcaaaataatatgg

SEQ ID NO: 4953 - DNA, 20 bp, synthetic construct
  misc_feature 1..20: note = Description of Artificial Sequence: Synthetic oligonucleotide
  source 1..20: mol_type = other DNA
gagaatcaaaataatatggt

SEQ ID NO: 4954 - DNA, 20 bp, synthetic construct
  misc_feature 1..20: note = Description of Artificial Sequence: Synthetic oligonucleotide
  source 1..20: mol_type = other DNA
agaatcaaaataatatggtt

SEQ ID NO: 4955 - DNA, 20 bp, synthetic construct
  misc_feature 1..20: note = Description of Artificial Sequence: Synthetic oligonucleotide
  source 1..20: mol_type = other DNA
gaatcaaaataatatggttc

SEQ ID NO: 4956 - DNA, 20 bp, synthetic construct
  misc_feature 1..20: note = Description of Artificial Sequence: Synthetic oligonucleotide
  source 1..20: mol_type = other DNA
aatcaaaataatatggttct

SEQ ID NO: 4957 - DNA, 20 bp, synthetic construct
  misc_feature 1..20: note = Description of Artificial Sequence: Synthetic oligonucleotide
  source 1..20: mol_type = other DNA
atcaaaataatatggttctt

SEQ ID NO: 4958 - DNA, 20 bp, synthetic construct
  misc_feature 1..20: note = Description of Artificial Sequence: Synthetic oligonucleotide
  source 1..20: mol_type = other DNA
tcaaaataatatggttcttt

SEQ ID NO: 4959 - DNA, 20 bp, synthetic construct
  misc_feature 1..20: note = Description of Artificial Sequence: Synthetic oligonucleotide
  source 1..20: mol_type = other DNA
caaaataatatggttctttt

SEQ ID NO: 4960 - DNA, 20 bp, synthetic construct
  misc_feature 1..20: note = Description of Artificial Sequence: Synthetic oligonucleotide
  source 1..20: mol_type = other DNA
aaaataatatggttcttttt

SEQ ID NO: 4961 - DNA, 20 bp, synthetic construct
  misc_feature 1..20: note = Description of Artificial Sequence: Synthetic oligonucleotide
  source 1..20: mol_type = other DNA
aaataatatggttcttttta

SEQ ID NO: 4962 - DNA, 20 bp, synthetic construct
  misc_feature 1..20: note = Description of Artificial Sequence: Synthetic oligonucleotide
  source 1..20: mol_type = other DNA
aataatatggttctttttag

SEQ ID NO: 4963 - DNA, 20 bp, synthetic construct
  misc_feature 1..20: note = Description of Artificial Sequence: Synthetic oligonucleotide
  source 1..20: mol_type = other DNA
ataatatggttctttttagc

SEQ ID NO: 4964 - DNA, 20 bp, synthetic construct
  misc_feature 1..20: note = Description of Artificial Sequence: Synthetic oligonucleotide
  source 1..20: mol_type = other DNA
taatatggttctttttagca

SEQ ID NO: 4965 - DNA, 20 bp, synthetic construct
  misc_feature 1..20: note = Description of Artificial Sequence: Synthetic oligonucleotide
  source 1..20: mol_type = other DNA
aatatggttctttttagcaa

SEQ ID NO: 4966 - DNA, 20 bp, synthetic construct
  misc_feature 1..20: note = Description of Artificial Sequence: Synthetic oligonucleotide
  source 1..20: mol_type = other DNA
atatggttctttttagcaaa

SEQ ID NO: 4967 - DNA, 20 bp, synthetic construct
  misc_feature 1..20: note = Description of Artificial Sequence: Synthetic oligonucleotide
  source 1..20: mol_type = other DNA
tatggttctttttagcaaag

SEQ ID NO: 4968 - DNA, 20 bp, synthetic construct
  misc_feature 1..20: note = Description of Artificial Sequence: Synthetic oligonucleotide
  source 1..20: mol_type = other DNA
atggttctttttagcaaagg

SEQ ID NO: 4969 - DNA, 20 bp, synthetic construct
  misc_feature 1..20: note = Description of Artificial Sequence: Synthetic oligonucleotide
  source 1..20: mol_type = other DNA
tggttctttttagcaaaggg

SEQ ID NO: 4970 - DNA, 20 bp, synthetic construct
  misc_feature 1..20: note = Description of Artificial Sequence: Synthetic oligonucleotide
  source 1..20: mol_type = other DNA
ggttctttttagcaaaggga

SEQ ID NO: 4971 - DNA, 20 bp, synthetic construct
  misc_feature 1..20: note = Description of Artificial Sequence: Synthetic oligonucleotide
  source 1..20: mol_type = other DNA
gttctttttagcaaagggat

SEQ ID NO: 4972 - DNA, 20 bp, synthetic construct
  misc_feature 1..20: note = Description of Artificial Sequence: Synthetic oligonucleotide
  source 1..20: mol_type = other DNA
ttctttttagcaaagggatt

SEQ ID NO: 4973 - DNA, 20 bp, synthetic construct
  misc_feature 1..20: note = Description of Artificial Sequence: Synthetic oligonucleotide
  source 1..20: mol_type = other DNA
tctttttagcaaagggattt

SEQ ID NO: 4974 - DNA, 20 bp, synthetic construct
  misc_feature 1..20: note = Description of Artificial Sequence: Synthetic oligonucleotide
  source 1..20: mol_type = other DNA
ctttttagcaaagggatttg

SEQ ID NO: 4975 - DNA, 20 bp, synthetic construct
  misc_feature 1..20: note = Description of Artificial Sequence: Synthetic oligonucleotide
  source 1..20: mol_type = other DNA
tttttagcaaagggatttgt

SEQ ID NO: 4976 - DNA, 20 bp, synthetic construct
  misc_feature 1..20: note = Description of Artificial Sequence: Synthetic oligonucleotide
  source 1..20: mol_type = other DNA
ttttagcaaagggatttgtg

SEQ ID NO: 4977 - DNA, 20 bp, synthetic construct
  misc_feature 1..20: note = Description of Artificial Sequence: Synthetic oligonucleotide
  source 1..20: mol_type = other DNA
tttagcaaagggatttgtgt

SEQ ID NO: 4978 - DNA, 20 bp, synthetic construct
  misc_feature 1..20: note = Description of Artificial Sequence: Synthetic oligonucleotide
  source 1..20: mol_type = other DNA
ttagcaaagggatttgtgtt

SEQ ID NO: 4979 - DNA, 20 bp, synthetic construct
  misc_feature 1..20: note = Description of Artificial Sequence: Synthetic oligonucleotide
  source 1..20: mol_type = other DNA
tagcaaagggatttgtgttt

SEQ ID NO: 4980 - DNA, 20 bp, synthetic construct
  misc_feature 1..20: note = Description of Artificial Sequence: Synthetic oligonucleotide
  source 1..20: mol_type = other DNA
agcaaagggatttgtgtttt

SEQ ID NO: 4981 - DNA, 20 bp, synthetic construct
  misc_feature 1..20: note = Description of Artificial Sequence: Synthetic oligonucleotide
  source 1..20: mol_type = other DNA
gcaaagggatttgtgttttg

SEQ ID NO: 4982 - DNA, 20 bp, synthetic construct
  misc_feature 1..20: note = Description of Artificial Sequence: Synthetic oligonucleotide
  source 1..20: mol_type = other DNA
caaagggatttgtgttttgc

SEQ ID NO: 4983 - DNA, 20 bp, synthetic construct
  misc_feature 1..20: note = Description of Artificial Sequence: Synthetic oligonucleotide
  source 1..20: mol_type = other DNA
aaagggatttgtgttttgcc

SEQ ID NO: 4984 - DNA, 20 bp, synthetic construct
  misc_feature 1..20: note = Description of Artificial Sequence: Synthetic oligonucleotide
  source 1..20: mol_type = other DNA
aagggatttgtgttttgccc

SEQ ID NO: 4985 - DNA, 20 bp, synthetic construct
  misc_feature 1..20: note = Description of Artificial Sequence: Synthetic oligonucleotide
  source 1..20: mol_type = other DNA
agggatttgtgttttgccct

SEQ ID NO: 4986 - DNA, 20 bp, synthetic construct
  misc_feature 1..20: note = Description of Artificial Sequence: Synthetic oligonucleotide
  source 1..20: mol_type = other DNA
gggatttgtgttttgccctc

SEQ ID NO: 4987 - DNA, 20 bp, synthetic construct
  misc_feature 1..20: note = Description of Artificial Sequence: Synthetic oligonucleotide
  source 1..20: mol_type = other DNA
ggatttgtgttttgccctca

SEQ ID NO: 4988 - DNA, 20 bp, synthetic construct
  misc_feature 1..20: note = Description of Artificial Sequence: Synthetic oligonucleotide
  source 1..20: mol_type = other DNA
gatttgtgttttgccctcac

SEQ ID NO: 4989 - DNA, 20 bp, synthetic construct
  misc_feature 1..20: note = Description of Artificial Sequence: Synthetic oligonucleotide
  source 1..20: mol_type = other DNA
atttgtgttttgccctcaca

SEQ ID NO: 4990 - DNA, 20 bp, synthetic construct
  misc_feature 1..20: note = Description of Artificial Sequence: Synthetic oligonucleotide
  source 1..20: mol_type = other DNA
tttgtgttttgccctcacat

SEQ ID NO: 4991 - DNA, 20 bp, synthetic construct
  misc_feature 1..20: note = Description of Artificial Sequence: Synthetic oligonucleotide
  source 1..20: mol_type = other DNA
ttgtgttttgccctcacata

SEQ ID NO: 4992 - DNA, 20 bp, synthetic construct
  misc_feature 1..20: note = Description of Artificial Sequence: Synthetic oligonucleotide
  source 1..20: mol_type = other DNA
tgtgttttgccctcacatag

SEQ ID NO: 4993 - DNA, 20 bp, synthetic construct
  misc_feature 1..20: note = Description of Artificial Sequence: Synthetic oligonucleotide
  source 1..20: mol_type = other DNA
gtgttttgccctcacatagc

SEQ ID NO: 4994 - DNA, 20 bp, synthetic construct
  misc_feature 1..20: note = Description of Artificial Sequence: Synthetic oligonucleotide
  source 1..20: mol_type = other DNA
tgttttgccctcacatagcc

SEQ ID NO: 4995 - DNA, 20 bp, synthetic construct
  misc_feature 1..20: note = Description of Artificial Sequence: Synthetic oligonucleotide
  source 1..20: mol_type = other DNA
gttttgccctcacatagcct

SEQ ID NO: 4996 - DNA, 20 bp, synthetic construct
  misc_feature 1..20: note = Description of Artificial Sequence: Synthetic oligonucleotide
  source 1..20: mol_type = other DNA
ttttgccctcacatagccta

SEQ ID NO: 4997 - DNA, 20 bp, synthetic construct
  misc_feature 1..20: note = Description of Artificial Sequence: Synthetic oligonucleotide
  source 1..20: mol_type = other DNA
tttgccctcacatagcctaa

SEQ ID NO: 4998 - DNA, 20 bp, synthetic construct
  misc_feature 1..20: note = Description of Artificial Sequence: Synthetic oligonucleotide
  source 1..20: mol_type = other DNA
ttgccctcacatagcctaag

SEQ ID NO: 4999 - DNA, 20 bp, synthetic construct
  misc_feature 1..20: note = Description of Artificial Sequence: Synthetic oligonucleotide
  source 1..20: mol_type = other DNA
tgccctcacatagcctaagc

SEQ ID NO: 5000 - DNA, 20 bp, synthetic construct
  misc_feature 1..20: note = Description of Artificial Sequence: Synthetic oligonucleotide
  source 1..20: mol_type = other DNA
gccctcacatagcctaagcc

SEQ ID NO: 5001 - DNA, 20 bp, synthetic construct
  misc_feature 1..20: note = Description of Artificial Sequence: Synthetic oligonucleotide
  source 1..20: mol_type = other DNA
ccctcacatagcctaagccg

SEQ ID NO: 5002 - DNA, 20 bp, synthetic construct
  misc_feature 1..20: note = Description of Artificial Sequence: Synthetic oligonucleotide
  source 1..20: mol_type = other DNA
cctcacatagcctaagccgt

SEQ ID NO: 5003 - DNA, 20 bp, synthetic construct
  misc_feature 1..20: note = Description of Artificial Sequence: Synthetic oligonucleotide
  source 1..20: mol_type = other DNA
ctcacatagcctaagccgta

SEQ ID NO: 5004 - DNA, 20 bp, synthetic construct
  misc_feature 1..20: note = Description of Artificial Sequence: Synthetic oligonucleotide
  source 1..20: mol_type = other DNA
tcacatagcctaagccgtag

SEQ ID NO: 5005 - DNA, 20 bp, synthetic construct
  misc_feature 1..20: note = Description of Artificial Sequence: Synthetic oligonucleotide
  source 1..20: mol_type = other DNA
cacatagcctaagccgtaga

SEQ ID NO: 5006 - DNA, 20 bp, synthetic construct
  misc_feature 1..20: note = Description of Artificial Sequence: Synthetic oligonucleotide
  source 1..20: mol_type = other DNA
acatagcctaagccgtagag

SEQ ID NO: 5007 - DNA, 20 bp, synthetic construct
  misc_feature 1..20: note = Description of Artificial Sequence: Synthetic oligonucleotide
  source 1..20: mol_type = other DNA
catagcctaagccgtagaga

SEQ ID NO: 5008 - DNA, 20 bp, synthetic construct
  misc_feature 1..20: note = Description of Artificial Sequence: Synthetic oligonucleotide
  source 1..20: mol_type = other DNA
atagcctaagccgtagagaa

SEQ ID NO: 5009 - DNA, 20 bp, synthetic construct
  misc_feature 1..20: note = Description of Artificial Sequence: Synthetic oligonucleotide
  source 1..20: mol_type = other DNA
tagcctaagccgtagagaaa

SEQ ID NO: 5010 - DNA, 20 bp, synthetic construct
  misc_feature 1..20: note = Description of Artificial Sequence: Synthetic oligonucleotide
  source 1..20: mol_type = other DNA
agcctaagccgtagagaaaa

SEQ ID NO: 5011 - DNA, 20 bp, synthetic construct
  misc_feature 1..20: note = Description of Artificial Sequence: Synthetic oligonucleotide
  source 1..20: mol_type = other DNA
gcctaagccgtagagaaaat

SEQ ID NO: 5012 - DNA, 20 bp, synthetic construct
  misc_feature 1..20: note = Description of Artificial Sequence: Synthetic oligonucleotide
  source 1..20: mol_type = other DNA
cctaagccgtagagaaaata

SEQ ID NO: 5013 - DNA, 20 bp, synthetic construct
  misc_feature 1..20: note = Description of Artificial Sequence: Synthetic oligonucleotide
  source 1..20: mol_type = other DNA
ctaagccgtagagaaaatag

SEQ ID NO: 5014 - DNA, 20 bp, synthetic construct
  misc_feature 1..20: note = Description of Artificial Sequence: Synthetic oligonucleotide
  source 1..20: mol_type = other DNA
taagccgtagagaaaataga

SEQ ID NO: 5015 - DNA, 20 bp, synthetic construct
  misc_feature 1..20: note = Description of Artificial Sequence: Synthetic oligonucleotide
  source 1..20: mol_type = other DNA
aagccgtagagaaaatagat

SEQ ID NO: 5016 - DNA, 20 bp, synthetic construct
  misc_feature 1..20: note = Description of Artificial Sequence: Synthetic oligonucleotide
  source 1..20: mol_type = other DNA
agccgtagagaaaatagata

SEQ ID NO: 5017 - DNA, 20 bp, synthetic construct
  misc_feature 1..20: note = Description of Artificial Sequence: Synthetic oligonucleotide
  source 1..20: mol_type = other DNA
gccgtagagaaaatagataa

SEQ ID NO: 5018 - DNA, 20 bp, synthetic construct
  misc_feature 1..20: note = Description of Artificial Sequence: Synthetic oligonucleotide
  source 1..20: mol_type = other DNA
ccgtagagaaaatagataaa

SEQ ID NO: 5019 - DNA, 20 bp, synthetic construct
  misc_feature 1..20: note = Description of Artificial Sequence: Synthetic oligonucleotide
  source 1..20: mol_type = other DNA
cgtagagaaaatagataaaa

SEQ ID NO: 5020 - DNA, 20 bp, synthetic construct
  misc_feature 1..20: note = Description of Artificial Sequence: Synthetic oligonucleotide
  source 1..20: mol_type = other DNA
gtagagaaaatagataaaac

SEQ ID NO: 5021 - DNA, 20 bp, synthetic construct
  misc_feature 1..20: note = Description of Artificial Sequence: Synthetic oligonucleotide
  source 1..20: mol_type = other DNA
tagagaaaatagataaaacg

SEQ ID NO: 5022 - DNA, 20 bp, synthetic construct
  misc_feature 1..20: note = Description of Artificial Sequence: Synthetic oligonucleotide
  source 1..20: mol_type = other DNA
agagaaaatagataaaacga

SEQ ID NO: 5023 - DNA, 20 bp, synthetic construct
  misc_feature 1..20: note = Description of Artificial Sequence: Synthetic oligonucleotide
  source 1..20: mol_type = other DNA
gagaaaatagataaaacgat

SEQ ID NO: 5024 - DNA, 20 bp, synthetic construct
  misc_feature 1..20: note = Description of Artificial Sequence: Synthetic oligonucleotide
  source 1..20: mol_type = other DNA
agaaaatagataaaacgatc

SEQ ID NO: 5025 - DNA, 20 bp, synthetic construct
  misc_feature 1..20: note = Description of Artificial Sequence: Synthetic oligonucleotide
  source 1..20: mol_type = other DNA
gaaaatagataaaacgatct

SEQ ID NO: 5026 - DNA, 20 bp, synthetic construct
  misc_feature 1..20: note = Description of Artificial Sequence: Synthetic oligonucleotide
  source 1..20: mol_type = other DNA
aaaatagataaaacgatctc

SEQ ID NO: 5027 - DNA, 20 bp, synthetic construct
  misc_feature 1..20: note = Description of Artificial Sequence: Synthetic oligonucleotide
  source 1..20: mol_type = other DNA
aaatagataaaacgatctca

SEQ ID NO: 5028 - DNA, 20 bp, synthetic construct
  misc_feature 1..20: note = Description of Artificial Sequence: Synthetic oligonucleotide
  source 1..20: mol_type = other DNA
aatagataaaacgatctcaa

SEQ ID NO: 5029 - DNA, 20 bp, synthetic construct
  misc_feature 1..20: note = Description of Artificial Sequence: Synthetic oligonucleotide
  source 1..20: mol_type = other DNA
atagataaaacgatctcaaa

SEQ ID NO: 5030 - DNA, 20 bp, synthetic construct
  misc_feature 1..20: note = Description of Artificial Sequence: Synthetic oligonucleotide
  source 1..20: mol_type = other DNA
tagataaaacgatctcaaaa

SEQ ID NO: 5031 - DNA, 20 bp, synthetic construct
  misc_feature 1..20: note = Description of Artificial Sequence: Synthetic oligonucleotide
  source 1..20: mol_type = other DNA
agataaaacgatctcaaaat

SEQ ID NO: 5032 - DNA, 20 bp, synthetic construct
  misc_feature 1..20: note = Description of Artificial Sequence: Synthetic oligonucleotide
  source 1..20: mol_type = other DNA
gataaaacgatctcaaaatt

SEQ ID NO: 5033 - DNA, 20 bp, synthetic construct
  misc_feature 1..20: note = Description of Artificial Sequence: Synthetic oligonucleotide
  source 1..20: mol_type = other DNA
ataaaacgatctcaaaatta

SEQ ID NO: 5034 - DNA, 20 bp, synthetic construct
  misc_feature 1..20: note = Description of Artificial Sequence: Synthetic oligonucleotide
  source 1..20: mol_type = other DNA
taaaacgatctcaaaattat

SEQ ID NO: 5035 - DNA, 20 bp, synthetic construct
  misc_feature 1..20: note = Description of Artificial Sequence: Synthetic oligonucleotide
  source 1..20: mol_type = other DNA
aaaacgatctcaaaattatt

SEQ ID NO: 5036 - DNA, 20 bp, synthetic construct
  misc_feature 1..20: note = Description of Artificial Sequence: Synthetic oligonucleotide
  source 1..20: mol_type = other DNA
aaacgatctcaaaattattt

SEQ ID NO: 5037 - DNA, 20 bp, synthetic construct
  misc_feature 1..20: note = Description of Artificial Sequence: Synthetic oligonucleotide
  source 1..20: mol_type = other DNA
aacgatctcaaaattatttt

SEQ ID NO: 5038 - DNA, 20 bp, synthetic construct
  misc_feature 1..20: note = Description of Artificial Sequence: Synthetic oligonucleotide
  source 1..20: mol_type = other DNA
acgatctcaaaattattttc

SEQ ID NO: 5039 - DNA, 20 bp, synthetic construct
  misc_feature 1..20: note = Description of Artificial Sequence: Synthetic oligonucleotide
  source 1..20: mol_type = other DNA
cgatctcaaaattattttct

SEQ ID NO: 5040 - DNA, 20 bp, synthetic construct
  misc_feature 1..20: note = Description of Artificial Sequence: Synthetic oligonucleotide
  source 1..20: mol_type = other DNA
gatctcaaaattattttctt

SEQ ID NO: 5041 - DNA, 20 bp, synthetic construct
  misc_feature 1..20: note = Description of Artificial Sequence: Synthetic oligonucleotide
  source 1..20: mol_type = other DNA
atctcaaaattattttcttt

SEQ ID NO: 5042 - DNA, 20 bp, synthetic construct
  misc_feature 1..20: note = Description of Artificial Sequence: Synthetic oligonucleotide
  source 1..20: mol_type = other DNA
tctcaaaattattttctttc

SEQ ID NO: 5043 - DNA, 20 bp, synthetic construct
  misc_feature 1..20: note = Description of Artificial Sequence: Synthetic oligonucleotide
  source 1..20: mol_type = other DNA
ctcaaaattattttctttca

SEQ ID NO: 5044 - DNA, 20 bp, synthetic construct
  misc_feature 1..20: note = Description of Artificial Sequence: Synthetic oligonucleotide
  source 1..20: mol_type = other DNA
tcaaaattattttctttcac

SEQ ID NO: 5045 - DNA, 20 bp, synthetic construct
  misc_feature 1..20: note = Description of Artificial Sequence: Synthetic oligonucleotide
  source 1..20: mol_type = other DNA
caaaattattttctttcaca

SEQ ID NO: 5046 - DNA, 20 bp, synthetic construct
  misc_feature 1..20: note = Description of Artificial Sequence: Synthetic oligonucleotide
  source 1..20: mol_type = other DNA
aaaattattttctttcacag

SEQ ID NO: 5047 - DNA, 20 bp, synthetic construct
  misc_feature 1..20: note = Description of Artificial Sequence: Synthetic oligonucleotide
  source 1..20: mol_type = other DNA
aaattattttctttcacaga

SEQ ID NO: 5048 - DNA, 20 bp, synthetic construct
  misc_feature 1..20: note = Description of Artificial Sequence: Synthetic oligonucleotide
  source 1..20: mol_type = other DNA
aattattttctttcacagac

SEQ ID NO: 5049 - DNA, 20 bp, synthetic construct
  misc_feature 1..20: note = Description of Artificial Sequence: Synthetic oligonucleotide
  source 1..20: mol_type = other DNA
attattttctttcacagaca

SEQ ID NO: 5050 - DNA, 20 bp, synthetic construct
  misc_feature 1..20: note = Description of Artificial Sequence: Synthetic oligonucleotide
  source 1..20: mol_type = other DNA
ttattttctttcacagacaa

SEQ ID NO: 5051 - DNA, 20 bp, synthetic construct
  misc_feature 1..20: note = Description of Artificial Sequence: Synthetic oligonucleotide
  source 1..20: mol_type = other DNA
tattttctttcacagacaaa

SEQ ID NO: 5052 - DNA, 20 bp, synthetic construct
  misc_feature 1..20: note = Description of Artificial Sequence: Synthetic oligonucleotide
  source 1..20: mol_type = other DNA
attttctttcacagacaaat

SEQ ID NO: 5053 - DNA, 20 bp, synthetic construct
  misc_feature 1..20: note = Description of Artificial Sequence: Synthetic oligonucleotide
  source 1..20: mol_type = other DNA
ttttctttcacagacaaatc

SEQ ID NO: 5054 - DNA, 20 bp, synthetic construct
  misc_feature 1..20: note = Description of Artificial Sequence: Synthetic oligonucleotide
  source 1..20: mol_type = other DNA
tttctttcacagacaaatca

SEQ ID NO: 5055 - DNA, 20 bp, synthetic construct
  misc_feature 1..20: note = Description of Artificial Sequence: Synthetic oligonucleotide
  source 1..20: mol_type = other DNA
ttctttcacagacaaatcat

SEQ ID NO: 5056 - DNA, 20 bp, synthetic construct
  misc_feature 1..20: note = Description of Artificial Sequence: Synthetic oligonucleotide
  source 1..20: mol_type = other DNA
tctttcacagacaaatcatg

SEQ ID NO: 5057 - DNA, 20 bp, synthetic construct
  misc_feature 1..20: note = Description of Artificial Sequence: Synthetic oligonucleotide
  source 1..20: mol_type = other DNA
ctttcacagacaaatcatgt

SEQ ID NO: 5058 - DNA, 20 bp, synthetic construct
  misc_feature 1..20: note = Description of Artificial Sequence: Synthetic oligonucleotide
  source 1..20: mol_type = other DNA
tttcacagacaaatcatgtg

SEQ ID NO: 5059 - DNA, 20 bp, synthetic construct
  misc_feature 1..20: note = Description of Artificial Sequence: Synthetic oligonucleotide
  source 1..20: mol_type = other DNA
ttcacagacaaatcatgtgg

SEQ ID NO: 5060 - DNA, 20 bp, synthetic construct
  misc_feature 1..20: note = Description of Artificial Sequence: Synthetic oligonucleotide
  source 1..20: mol_type = other DNA
tcacagacaaatcatgtgga

SEQ ID NO: 5061 - DNA, 20 bp, synthetic construct
  misc_feature 1..20: note = Description of Artificial Sequence: Synthetic oligonucleotide
  source 1..20: mol_type = other DNA
cacagacaaatcatgtggaa

SEQ ID NO: 5062 - DNA, 20 bp, synthetic construct
  misc_feature 1..20: note = Description of Artificial Sequence: Synthetic oligonucleotide
  source 1..20: mol_type = other DNA
acagacaaatcatgtggaaa

SEQ ID NO: 5063 - DNA, 20 bp, synthetic construct
  misc_feature 1..20: note = Description of Artificial Sequence: Synthetic oligonucleotide
  source 1..20: mol_type = other DNA
cagacaaatcatgtggaaaa

SEQ ID NO: 5064 - DNA, 20 bp, synthetic construct
  misc_feature 1..20: note = Description of Artificial Sequence: Synthetic oligonucleotide
  source 1..20: mol_type = other DNA
agacaaatcatgtggaaaag

SEQ ID NO: 5065 - DNA, 20 bp, synthetic construct
  misc_feature 1..20: note = Description of Artificial Sequence: Synthetic oligonucleotide
  source 1..20: mol_type = other DNA
gacaaatcatgtggaaaaga

SEQ ID NO: 5066 - DNA, 20 bp, synthetic construct
  misc_feature 1..20: note = Description of Artificial Sequence: Synthetic oligonucleotide
  source 1..20: mol_type = other DNA
acaaatcatgtggaaaagac

SEQ ID NO: 5067 - DNA, 20 bp, synthetic construct
  misc_feature 1..20: note = Description of Artificial Sequence: Synthetic oligonucleotide
  source 1..20: mol_type = other DNA
caaatcatgtggaaaagaca

SEQ ID NO: 5068 - DNA, 20 bp, synthetic construct
  misc_feature 1..20: note = Description of Artificial Sequence: Synthetic oligonucleotide
  source 1..20: mol_type = other DNA
aaatcatgtggaaaagacaa

SEQ ID NO: 5069 - DNA, 20 bp, synthetic construct
  misc_feature 1..20: note = Description of Artificial Sequence: Synthetic oligonucleotide
  source 1..20: mol_type = other DNA
aatcatgtggaaaagacaag

SEQ ID NO: 5070 - DNA, 20 bp, synthetic construct
  misc_feature 1..20: note = Description of Artificial Sequence: Synthetic oligonucleotide
  source 1..20: mol_type = other DNA
atcatgtggaaaagacaagc

SEQ ID NO: 5071 - DNA, 20 bp, synthetic construct
  misc_feature 1..20: note = Description of Artificial Sequence: Synthetic oligonucleotide
  source 1..20: mol_type = other DNA
tcatgtggaaaagacaagct

SEQ ID NO: 5072 - DNA, 20 bp, synthetic construct
  misc_feature 1..20: note = Description of Artificial Sequence: Synthetic oligonucleotide
  source 1..20: mol_type = other DNA
catgtggaaaagacaagcta

SEQ ID NO: 5073 - DNA, 20 bp, synthetic construct
  misc_feature 1..20: note = Description of Artificial Sequence: Synthetic oligonucleotide
  source 1..20: mol_type = other DNA
atgtggaaaagacaagctac

SEQ ID NO: 5074 - DNA, 20 bp, synthetic construct
  misc_feature 1..20: note = Description of Artificial Sequence: Synthetic oligonucleotide
  source 1..20: mol_type = other DNA
tgtggaaaagacaagctact

SEQ ID NO: 5075 - DNA, 20 bp, synthetic construct
  misc_feature 1..20: note = Description of Artificial Sequence: Synthetic oligonucleotide
  source 1..20: mol_type = other DNA
gtggaaaagacaagctactg

SEQ ID NO: 5076 - DNA, 20 bp, synthetic construct
  misc_feature 1..20: note = Description of Artificial Sequence: Synthetic oligonucleotide
  source 1..20: mol_type = other DNA
tggaaaagacaagctactgc

SEQ ID NO: 5077 - DNA, 20 bp, synthetic construct
  misc_feature 1..20: note = Description of Artificial Sequence: Synthetic oligonucleotide
  source 1..20: mol_type = other DNA
ggaaaagacaagctactgct

SEQ ID NO: 5078 - DNA, 20 bp, synthetic construct
  misc_feature 1..20: note = Description of Artificial Sequence: Synthetic oligonucleotide
  source 1..20: mol_type = other DNA
gaaaagacaagctactgcta

SEQ ID NO: 5079 - DNA, 20 bp, synthetic construct
  misc_feature 1..20: note = Description of Artificial Sequence: Synthetic oligonucleotide
  source 1..20: mol_type = other DNA
aaaagacaagctactgctat

SEQ ID NO: 5080 - DNA, 20 bp, synthetic construct
  misc_feature 1..20: note = Description of Artificial Sequence: Synthetic oligonucleotide
  source 1..20: mol_type = other DNA
aaagacaagctactgctatg

SEQ ID NO: 5081 - DNA, 20 bp, synthetic construct
  misc_feature 1..20: note = Description of Artificial Sequence: Synthetic oligonucleotide
  source 1..20: mol_type = other DNA
aagacaagctactgctatgt

SEQ ID NO: 5082 - DNA, 20 bp, synthetic construct
  misc_feature 1..20: note = Description of Artificial Sequence: Synthetic oligonucleotide
  source 1..20: mol_type = other DNA
agacaagctactgctatgtc

SEQ ID NO: 5083 - DNA, 20 bp, synthetic construct
  misc_feature 1..20: note = Description of Artificial Sequence: Synthetic oligonucleotide
  source 1..20: mol_type = other DNA
gacaagctactgctatgtca

SEQ ID NO: 5084 - DNA, 20 bp, synthetic construct
  misc_feature 1..20: note = Description of Artificial Sequence: Synthetic oligonucleotide
  source 1..20: mol_type = other DNA
acaagctactgctatgtcag

SEQ ID NO: 5085 - DNA, 20 bp, synthetic construct
  misc_feature 1..20: note = Description of Artificial Sequence: Synthetic oligonucleotide
  source 1..20: mol_type = other DNA
caagctactgctatgtcagg

SEQ ID NO: 5086 - DNA, 20 bp, synthetic construct
  misc_feature 1..20: note = Description of Artificial Sequence: Synthetic oligonucleotide
  source 1..20: mol_type = other DNA
aagctactgctatgtcaggg

SEQ ID NO: 5087 - DNA, 20 bp, synthetic construct
  misc_feature 1..20: note = Description of Artificial Sequence: Synthetic oligonucleotide
  source 1..20: mol_type = other DNA
agctactgctatgtcaggga

SEQ ID NO: 5088 - DNA, 20 bp, synthetic construct
  misc_feature 1..20: note = Description of Artificial Sequence: Synthetic oligonucleotide
  source 1..20: mol_type = other DNA
gctactgctatgtcagggat

SEQ ID NO: 5089 - DNA, 20 bp, synthetic construct
  misc_feature 1..20: note = Description of Artificial Sequence: Synthetic oligonucleotide
  source 1..20: mol_type = other DNA
ctactgctatgtcagggatc

SEQ ID NO: 5090 - DNA, 20 bp, synthetic construct
  misc_feature 1..20: note = Description of Artificial Sequence: Synthetic oligonucleotide
  source 1..20: mol_type = other DNA
tactgctatgtcagggatct

SEQ ID NO: 5091 - DNA, 20 bp, synthetic construct
  misc_feature 1..20: note = Description of Artificial Sequence: Synthetic oligonucleotide
  source 1..20: mol_type = other DNA
actgctatgtcagggatctt

SEQ ID NO: 5092 - DNA, 20 bp, synthetic construct
  misc_feature 1..20: note = Description of Artificial Sequence: Synthetic oligonucleotide
  source 1..20: mol_type = other DNA
ctgctatgtcagggatcttg

SEQ ID NO: 5093 - DNA, 20 bp, synthetic construct
  misc_feature 1..20: note = Description of Artificial Sequence: Synthetic oligonucleotide
  source 1..20: mol_type = other DNA
tgctatgtcagggatcttgg

SEQ ID NO: 5094 - DNA, 20 bp, synthetic construct
  misc_feature 1..20: note = Description of Artificial Sequence: Synthetic oligonucleotide
  source 1..20: mol_type = other DNA
gctatgtcagggatcttggg

SEQ ID NO: 5095 - DNA, 20 bp, synthetic construct
  misc_feature 1..20: note = Description of Artificial Sequence: Synthetic oligonucleotide
  source 1..20: mol_type = other DNA
ctatgtcagggatcttgggc

SEQ ID NO: 5096 - DNA, 20 bp, synthetic construct
  misc_feature 1..20: note = Description of Artificial Sequence: Synthetic oligonucleotide
  source 1..20: mol_type = other DNA
tatgtcagggatcttgggca

SEQ ID NO: 5097 - DNA, 20 bp, synthetic construct
  misc_feature 1..20: note = Description of Artificial Sequence: Synthetic oligonucleotide
  source 1..20: mol_type = other DNA
atgtcagggatcttgggcag

SEQ ID NO: 5098 - DNA, 20 bp, synthetic construct
  misc_feature 1..20: note = Description of Artificial Sequence: Synthetic oligonucleotide
  source 1..20: mol_type = other DNA
tgtcagggatcttgggcaga

SEQ ID NO: 5099 - DNA, 20 bp, synthetic construct
  misc_feature 1..20: note = Description of Artificial Sequence: Synthetic oligonucleotide
  source 1..20: mol_type = other DNA
gtcagggatcttgggcagag

SEQ ID NO: 5100 - DNA, 20 bp, synthetic construct
  misc_feature 1..20: note = Description of Artificial Sequence: Synthetic oligonucleotide
  source 1..20: mol_type = other DNA
tcagggatcttgggcagaga

SEQ ID NO: 5101 - DNA, 20 bp, synthetic construct
  misc_feature 1..20: note = Description of Artificial Sequence: Synthetic oligonucleotide
  source 1..20: mol_type = other DNA
cagggatcttgggcagagag

SEQ ID NO: 5102 - DNA, 20 bp, synthetic construct
  misc_feature 1..20: note = Description of Artificial Sequence: Synthetic oligonucleotide
  source 1..20: mol_type = other DNA
agggatcttgggcagagaga

SEQ ID NO: 5103 - DNA, 20 bp, synthetic construct
  misc_feature 1..20: note = Description of Artificial Sequence: Synthetic oligonucleotide
  source 1..20: mol_type = other DNA
gggatcttgggcagagagac

SEQ ID NO: 5104 - DNA, 20 bp, synthetic construct
  misc_feature 1..20: note = Description of Artificial Sequence: Synthetic oligonucleotide
  source 1..20: mol_type = other DNA
ggatcttgggcagagagacc

SEQ ID NO: 5105 - DNA, 20 bp, synthetic construct
  misc_feature 1..20: note = Description of Artificial Sequence: Synthetic oligonucleotide
  source 1..20: mol_type = other DNA
gatcttgggcagagagaccc

SEQ ID NO: 5106 - DNA, 20 bp, synthetic construct
  misc_feature 1..20: note = Description of Artificial Sequence: Synthetic oligonucleotide
  source 1..20: mol_type = other DNA
atcttgggcagagagacccc

SEQ ID NO: 5107 - DNA, 20 bp, synthetic construct
  misc_feature 1..20: note = Description of Artificial Sequence: Synthetic oligonucleotide
  source 1..20: mol_type = other DNA
tcttgggcagagagacccca

SEQ ID NO: 5108 - DNA, 20 bp, synthetic construct
  misc_feature 1..20: note = Description of Artificial Sequence: Synthetic oligonucleotide
  source 1..20: mol_type = other DNA
cttgggcagagagaccccac

SEQ ID NO: 5109 - DNA, 20 bp, synthetic construct
  misc_feature 1..20: note = Description of Artificial Sequence: Synthetic oligonucleotide
  source 1..20: mol_type = other DNA
ttgggcagagagaccccact

SEQ ID NO: 5110 - DNA, 20 bp, synthetic construct
  misc_feature 1..20: note = Description of Artificial Sequence: Synthetic oligonucleotide
  source 1..20: mol_type = other DNA
tgggcagagagaccccactc

SEQ ID NO: 5111 - DNA, 20 bp, synthetic construct
  misc_feature 1..20: note = Description of Artificial Sequence: Synthetic oligonucleotide
  source 1..20: mol_type = other DNA
gggcagagagaccccactca

SEQ ID NO: 5112 - DNA, 20 bp, synthetic construct
  misc_feature 1..20: note = Description of Artificial Sequence: Synthetic oligonucleotide
  source 1..20: mol_type = other DNA
ggcagagagaccccactcag

SEQ ID NO: 5113 - DNA, 20 bp, synthetic construct
  misc_feature 1..20: note = Description of Artificial Sequence: Synthetic oligonucleotide
  source 1..20: mol_type = other DNA
gcagagagaccccactcagt

SEQ ID NO: 5114 - DNA, 20 bp, synthetic construct
  misc_feature 1..20: note = Description of Artificial Sequence: Synthetic oligonucleotide
  source 1..20: mol_type = other DNA
cagagagaccccactcagtc

SEQ ID NO: 5115 - DNA, 20 bp, synthetic construct
  misc_feature 1..20: note = Description of Artificial Sequence: Synthetic oligonucleotide
  source 1..20: mol_type = other DNA
agagagaccccactcagtct

SEQ ID NO: 5116 - DNA, 20 bp, synthetic construct
  misc_feature 1..20: note = Description of Artificial Sequence: Synthetic oligonucleotide
  source 1..20: mol_type = other DNA
gagagaccccactcagtcta

SEQ ID NO: 5117 - DNA, 20 bp, synthetic construct
  misc_feature 1..20: note = Description of Artificial Sequence: Synthetic oligonucleotide
  source 1..20: mol_type = other DNA
agagaccccactcagtctac

SEQ ID NO: 5118 - DNA, 20 bp, synthetic construct
  misc_feature 1..20: note = Description of Artificial Sequence: Synthetic oligonucleotide
  source 1..20: mol_type = other DNA
gagaccccactcagtctacc

SEQ ID NO: 5119 - DNA, 20 bp, synthetic construct
  misc_feature 1..20: note = Description of Artificial Sequence: Synthetic oligonucleotide
  source 1..20: mol_type = other DNA
agaccccactcagtctacca

SEQ ID NO: 5120 - DNA, 20 bp, synthetic construct
  misc_feature 1..20: note = Description of Artificial Sequence: Synthetic oligonucleotide
  source 1..20: mol_type = other DNA
gaccccactcagtctaccac

SEQ ID NO: 5121 - DNA, 20 bp, synthetic construct
  misc_feature 1..20: note = Description of Artificial Sequence: Synthetic oligonucleotide
  source 1..20: mol_type = other DNA
accccactcagtctaccacc

SEQ ID NO: 5122 - DNA, 20 bp, synthetic construct
  misc_feature 1..20: note = Description of Artificial Sequence: Synthetic oligonucleotide
  source 1..20: mol_type = other DNA
ccccactcagtctaccacct

SEQ ID NO: 5123 - DNA, 20 bp, synthetic construct
  misc_feature 1..20: note = Description of Artificial Sequence: Synthetic oligonucleotide
  source 1..20: mol_type = other DNA
cccactcagtctaccacctt

SEQ ID NO: 5124 - DNA, 20 bp, synthetic construct
  misc_feature 1..20: note = Description of Artificial Sequence: Synthetic oligonucleotide
  source 1..20: mol_type = other DNA
ccactcagtctaccaccttg

SEQ ID NO: 5125 - DNA, 20 bp, synthetic construct
  misc_feature 1..20: note = Description of Artificial Sequence: Synthetic oligonucleotide
  source 1..20: mol_type = other DNA
cactcagtctaccaccttga

SEQ ID NO: 5126 - DNA, 20 bp, synthetic construct
  misc_feature 1..20: note = Description of Artificial Sequence: Synthetic oligonucleotide
  source 1..20: mol_type = other DNA
actcagtctaccaccttgag

SEQ ID NO: 5127 - DNA, 20 bp, synthetic construct
  misc_feature 1..20: note = Description of Artificial Sequence: Synthetic oligonucleotide
  source 1..20: mol_type = other DNA
ctcagtctaccaccttgaga

SEQ ID NO: 5128 - DNA, 20 bp, synthetic construct
  misc_feature 1..20: note = Description of Artificial Sequence: Synthetic oligonucleotide
  source 1..20: mol_type = other DNA
tcagtctaccaccttgagaa

SEQ ID NO: 5129 - DNA, 20 bp, synthetic construct
  misc_feature 1..20: note = Description of Artificial Sequence: Synthetic oligonucleotide
  source 1..20: mol_type = other DNA
cagtctaccaccttgagaag

SEQ ID NO: 5130 - DNA, 20 bp, synthetic construct
  misc_feature 1..20: note = Description of Artificial Sequence: Synthetic oligonucleotide
  source 1..20: mol_type = other DNA
agtctaccaccttgagaagg

SEQ ID NO: 5131 - DNA, 20 bp, synthetic construct
  misc_feature 1..20: note = Description of Artificial Sequence: Synthetic oligonucleotide
  source 1..20: mol_type = other DNA
gtctaccaccttgagaagga

SEQ ID NO: 5132 - DNA, 20 bp, synthetic construct
  misc_feature 1..20: note = Description of Artificial Sequence: Synthetic oligonucleotide
  source 1..20: mol_type = other DNA
tctaccaccttgagaaggat

SEQ ID NO: 5133 - DNA, 20 bp, synthetic construct
  misc_feature 1..20: note = Description of Artificial Sequence: Synthetic oligonucleotide
  source 1..20: mol_type = other DNA
ctaccaccttgagaaggatg

SEQ ID NO: 5134 - DNA, 20 bp, synthetic construct
  misc_feature 1..20: note = Description of Artificial Sequence: Synthetic oligonucleotide
  source 1..20: mol_type = other DNA
taccaccttgagaaggatgt

SEQ ID NO: 5135 - DNA, 20 bp, synthetic construct
  misc_feature 1..20: note = Description of Artificial Sequence: Synthetic oligonucleotide
  source 1..20: mol_type = other DNA
accaccttgagaaggatgtg

SEQ ID NO: 5136 - DNA, 20 bp, synthetic construct
  misc_feature 1..20: note = Description of Artificial Sequence: Synthetic oligonucleotide
  source 1..20: mol_type = other DNA
ccaccttgagaaggatgtgg

SEQ ID NO: 5137 - DNA, 20 bp, synthetic construct
  misc_feature 1..20: note = Description of Artificial Sequence: Synthetic oligonucleotide
  source 1..20: mol_type = other DNA
caccttgagaaggatgtggc

SEQ ID NO: 5138 - DNA, 20 bp, synthetic construct
  misc_feature 1..20: note = Description of Artificial Sequence: Synthetic oligonucleotide
  source 1..20: mol_type = other DNA
accttgagaaggatgtggca

SEQ ID NO: 5139 - DNA, 20 bp, synthetic construct
  misc_feature 1..20: note = Description of Artificial Sequence: Synthetic oligonucleotide
  source 1..20: mol_type = other DNA
ccttgagaaggatgtggcag

SEQ ID NO: 5140 - DNA, 20 bp, synthetic construct
  misc_feature 1..20: note = Description of Artificial Sequence: Synthetic oligonucleotide
  source 1..20: mol_type = other DNA
cttgagaaggatgtggcagg

SEQ ID NO: 5141 - DNA, 20 bp, synthetic construct
  misc_feature 1..20: note = Description of Artificial Sequence: Synthetic oligonucleotide
  source 1..20: mol_type = other DNA
ttgagaaggatgtggcagga

SEQ ID NO: 5142 - DNA, 20 bp, synthetic construct
  misc_feature 1..20: note = Description of Artificial Sequence: Synthetic oligonucleotide
  source 1..20: mol_type = other DNA
tgagaaggatgtggcaggac

SEQ ID NO: 5143 - DNA, 20 bp, synthetic construct
  misc_feature 1..20: note = Description of Artificial Sequence: Synthetic oligonucleotide
  source 1..20: mol_type = other DNA
gagaaggatgtggcaggacc

SEQ ID NO: 5144 - DNA, 20 bp, synthetic construct
  misc_feature 1..20: note = Description of Artificial Sequence: Synthetic oligonucleotide
  source 1..20: mol_type = other DNA
agaaggatgtggcaggaccc

SEQ ID NO: 5145 - DNA, 20 bp, synthetic construct
  misc_feature 1..20: note = Description of Artificial Sequence: Synthetic oligonucleotide
  source 1..20: mol_type = other DNA
gaaggatgtggcaggaccca

SEQ ID NO: 5146 - DNA, 20 bp, synthetic construct
  misc_feature 1..20: note = Description of Artificial Sequence: Synthetic oligonucleotide
  source 1..20: mol_type = other DNA
aaggatgtggcaggacccag

SEQ ID NO: 5147 - DNA, 20 bp, synthetic construct
  misc_feature 1..20: note = Description of Artificial Sequence: Synthetic oligonucleotide
  source 1..20: mol_type = other DNA
aggatgtggcaggacccagt

SEQ ID NO: 5148 - DNA, 20 bp, synthetic construct
  misc_feature 1..20: note = Description of Artificial Sequence: Synthetic oligonucleotide
  source 1..20: mol_type = other DNA
ggatgtggcaggacccagtg

SEQ ID NO: 5149 - DNA, 20 bp, synthetic construct
  misc_feature 1..20: note = Description of Artificial Sequence: Synthetic oligonucleotide
  source 1..20: mol_type = other DNA
gatgtggcaggacccagtgg

SEQ ID NO: 5150 - DNA, 20 bp, synthetic construct
  misc_feature 1..20: note = Description of Artificial Sequence: Synthetic oligonucleotide
  source 1..20: mol_type = other DNA
atgtggcaggacccagtggg

SEQ ID NO: 5151 - DNA, 20 bp, synthetic construct
  misc_feature 1..20: note = Description of Artificial Sequence: Synthetic oligonucleotide
  source 1..20: mol_type = other DNA
tgtggcaggacccagtgggt

SEQ ID NO: 5152 - DNA, 20 bp, synthetic construct
  misc_feature 1..20: note = Description of Artificial Sequence: Synthetic oligonucleotide
  source 1..20: mol_type = other DNA
gtggcaggacccagtgggtt

SEQ ID NO: 5153 - DNA, 20 bp, synthetic construct
  misc_feature 1..20: note = Description of Artificial Sequence: Synthetic oligonucleotide
  source 1..20: mol_type = other DNA
tggcaggacccagtgggttt

SEQ ID NO: 5154 - DNA, 20 bp, synthetic construct
  misc_feature 1..20: note = Description of Artificial Sequence: Synthetic oligonucleotide
  source 1..20: mol_type = other DNA
ggcaggacccagtgggttta

SEQ ID NO: 5155 - DNA, 20 bp, synthetic construct
  misc_feature 1..20: note = Description of Artificial Sequence: Synthetic oligonucleotide
  source 1..20: mol_type = other DNA
gcaggacccagtgggtttaa

SEQ ID NO: 5156 - DNA, 20 bp, synthetic construct
  misc_feature 1..20: note = Description of Artificial Sequence: Synthetic oligonucleotide
  source 1..20: mol_type = other DNA
caggacccagtgggtttaaa

SEQ ID NO: 5157 - DNA, 20 bp, synthetic construct
  misc_feature 1..20: note = Description of Artificial Sequence: Synthetic oligonucleotide
  source 1..20: mol_type = other DNA
aggacccagtgggtttaaat

SEQ ID NO: 5158 - DNA, 20 bp, synthetic construct
  misc_feature 1..20: note = Description of Artificial Sequence: Synthetic oligonucleotide
  source 1..20: mol_type = other DNA
ggacccagtgggtttaaata

SEQ ID NO: 5159 - DNA, 20 bp, synthetic construct
  misc_feature 1..20: note = Description of Artificial Sequence: Synthetic oligonucleotide
  source 1..20: mol_type = other DNA
gacccagtgggtttaaatag

SEQ ID NO: 5160 - DNA, 20 bp, synthetic construct
  misc_feature 1..20: note = Description of Artificial Sequence: Synthetic oligonucleotide
  source 1..20: mol_type = other DNA
acccagtgggtttaaatagt

SEQ ID NO: 5161 - DNA, 20 bp, synthetic construct
  misc_feature 1..20: note = Description of Artificial Sequence: Synthetic oligonucleotide
  source 1..20: mol_type = other DNA
cccagtgggtttaaatagtt

SEQ ID NO: 5162 - DNA, 20 bp, synthetic construct
  misc_feature 1..20: note = Description of Artificial Sequence: Synthetic oligonucleotide
  source 1..20: mol_type = other DNA
ccagtgggtttaaatagttc

SEQ ID NO: 5163 - DNA, 20 bp, synthetic construct
  misc_feature 1..20: note = Description of Artificial Sequence: Synthetic oligonucleotide
  source 1..20: mol_type = other DNA
cagtgggtttaaatagttca

SEQ ID NO: 5164 - DNA, 20 bp, synthetic construct
  misc_feature 1..20: note = Description of Artificial Sequence: Synthetic oligonucleotide
  source 1..20: mol_type = other DNA
agtgggtttaaatagttcat

SEQ ID NO: 5165 - DNA, 20 bp, synthetic construct
  misc_feature 1..20: note = Description of Artificial Sequence: Synthetic oligonucleotide
  source 1..20: mol_type = other DNA
gtgggtttaaatagttcatc

SEQ ID NO: 5166 - DNA, 20 bp, synthetic construct
  misc_feature 1..20: note = Description of Artificial Sequence: Synthetic oligonucleotide
  source 1..20: mol_type = other DNA
tgggtttaaatagttcatcc

SEQ ID NO: 5167 - DNA, 20 bp, synthetic construct
  misc_feature 1..20: note = Description of Artificial Sequence: Synthetic oligonucleotide
  source 1..20: mol_type = other DNA
gggtttaaatagttcatcct

SEQ ID NO: 5168 - DNA, 20 bp, synthetic construct
  misc_feature 1..20: note = Description of Artificial Sequence: Synthetic oligonucleotide
  source 1..20: mol_type = other DNA
ggtttaaatagttcatcctg

SEQ ID NO: 5169 - DNA, 20 bp, synthetic construct
  misc_feature 1..20: note = Description of Artificial Sequence: Synthetic oligonucleotide
  source 1..20: mol_type = other DNA
gtttaaatagttcatcctgt

SEQ ID NO: 5170 - DNA, 20 bp, synthetic construct
  misc_feature 1..20: note = Description of Artificial Sequence: Synthetic oligonucleotide
  source 1..20: mol_type = other DNA
tttaaatagttcatcctgtt

SEQ ID NO: 5171 - DNA, 20 bp, synthetic construct
  misc_feature 1..20: note = Description of Artificial Sequence: Synthetic oligonucleotide
  source 1..20: mol_type = other DNA
ttaaatagttcatcctgttt

SEQ ID NO: 5172 - DNA, 20 bp, synthetic construct
  misc_feature 1..20: note = Description of Artificial Sequence: Synthetic oligonucleotide
  source 1..20: mol_type = other DNA
taaatagttcatcctgttta

SEQ ID NO: 5173 - DNA, 20 bp, synthetic construct
  misc_feature 1..20: note = Description of Artificial Sequence: Synthetic oligonucleotide
  source 1..20: mol_type = other DNA
aaatagttcatcctgtttac

SEQ ID NO: 5174 - DNA, 20 bp, synthetic construct
  misc_feature 1..20: note = Description of Artificial Sequence: Synthetic oligonucleotide
  source 1..20: mol_type = other DNA
aatagttcatcctgtttact

SEQ ID NO: 5175 - DNA, 20 bp, synthetic construct
  misc_feature 1..20: note = Description of Artificial Sequence: Synthetic oligonucleotide
  source 1..20: mol_type = other DNA
atagttcatcctgtttactg

SEQ ID NO: 5176 - DNA, 20 bp, synthetic construct
  misc_feature 1..20: note = Description of Artificial Sequence: Synthetic oligonucleotide
  source 1..20: mol_type = other DNA
tagttcatcctgtttactgt

SEQ ID NO: 5177 - DNA, 20 bp, synthetic construct
  misc_feature 1..20: note = Description of Artificial Sequence: Synthetic oligonucleotide
  source 1..20: mol_type = other DNA
agttcatcctgtttactgta

SEQ ID NO: 5178 - DNA, 20 bp, synthetic construct
  misc_feature 1..20: note = Description of Artificial Sequence: Synthetic oligonucleotide
  source 1..20: mol_type = other DNA
gttcatcctgtttactgtaa

SEQ ID NO: 5179 - DNA, 20 bp, synthetic construct
  misc_feature 1..20: note = Description of Artificial Sequence: Synthetic oligonucleotide
  source 1..20: mol_type = other DNA
ttcatcctgtttactgtaac

SEQ ID NO: 5180 - DNA, 20 bp, synthetic construct
  misc_feature 1..20: note = Description of Artificial Sequence: Synthetic oligonucleotide
  source 1..20: mol_type = other DNA
tcatcctgtttactgtaaca

SEQ ID NO: 5181 - DNA, 20 bp, synthetic construct
  misc_feature 1..20: note = Description of Artificial Sequence: Synthetic oligonucleotide
  source 1..20: mol_type = other DNA
catcctgtttactgtaacat

SEQ ID NO: 5182 - DNA, 20 bp, synthetic construct
  misc_feature 1..20: note = Description of Artificial Sequence: Synthetic oligonucleotide
  source 1..20: mol_type = other DNA
atcctgtttactgtaacatc

SEQ ID NO: 5183 - DNA, 20 bp, synthetic construct
  misc_feature 1..20: note = Description of Artificial Sequence: Synthetic oligonucleotide
  source 1..20: mol_type = other DNA
tcctgtttactgtaacatcc

SEQ ID NO: 5184 - DNA, 20 bp, synthetic construct
  misc_feature 1..20: note = Description of Artificial Sequence: Synthetic oligonucleotide
  source 1..20: mol_type = other DNA
cctgtttactgtaacatcct

SEQ ID NO: 5185 - DNA, 20 bp, synthetic construct
  misc_feature 1..20: note = Description of Artificial Sequence: Synthetic oligonucleotide
  source 1..20: mol_type = other DNA
ctgtttactgtaacatcctt

SEQ ID NO: 5186 - DNA, 20 bp, synthetic construct
  misc_feature 1..20: note = Description of Artificial Sequence: Synthetic oligonucleotide
  source 1..20: mol_type = other DNA
tgtttactgtaacatccttg

SEQ ID NO: 5187 - DNA, 20 bp, synthetic construct
  misc_feature 1..20: note = Description of Artificial Sequence: Synthetic oligonucleotide
  source 1..20: mol_type = other DNA
gtttactgtaacatccttgg

SEQ ID NO: 5188 - DNA, 20 bp, synthetic construct
  misc_feature 1..20: note = Description of Artificial Sequence: Synthetic oligonucleotide
  source 1..20: mol_type = other DNA
tttactgtaacatccttggt

SEQ ID NO: 5189 - DNA, 20 bp, synthetic construct
  misc_feature 1..20: note = Description of Artificial Sequence: Synthetic oligonucleotide
  source 1..20: mol_type = other DNA
ttactgtaacatccttggta

SEQ ID NO: 5190 - DNA, 20 bp, synthetic construct
  misc_feature 1..20: note = Description of Artificial Sequence: Synthetic oligonucleotide
  source 1..20: mol_type = other DNA
tactgtaacatccttggtac

SEQ ID NO: 5191 - DNA, 20 bp, synthetic construct
  misc_feature 1..20: note = Description of Artificial Sequence: Synthetic oligonucleotide
  source 1..20: mol_type = other DNA
actgtaacatccttggtaca

SEQ ID NO: 5192 - DNA, 20 bp, synthetic construct
  misc_feature 1..20: note = Description of Artificial Sequence: Synthetic oligonucleotide
  source 1..20: mol_type = other DNA
ctgtaacatccttggtacat

SEQ ID NO: 5193 - DNA, 20 bp, synthetic construct
  misc_feature 1..20: note = Description of Artificial Sequence: Synthetic oligonucleotide
  source 1..20: mol_type = other DNA
tgtaacatccttggtacata

SEQ ID NO: 5194 - DNA, 20 bp, synthetic construct
  misc_feature 1..20: note = Description of Artificial Sequence: Synthetic oligonucleotide
  source 1..20: mol_type = other DNA
gtaacatccttggtacatat

SEQ ID NO: 5195 - DNA, 20 bp, synthetic construct
  misc_feature 1..20: note = Description of Artificial Sequence: Synthetic oligonucleotide
  source 1..20: mol_type = other DNA
taacatccttggtacatatg

SEQ ID NO: 5196 - DNA, 20 bp, synthetic construct
  misc_feature 1..20: note = Description of Artificial Sequence: Synthetic oligonucleotide
  source 1..20: mol_type = other DNA
aacatccttggtacatatga

SEQ ID NO: 5197 - DNA, 20 bp, synthetic construct
  misc_feature 1..20: note = Description of Artificial Sequence: Synthetic oligonucleotide
  source 1..20: mol_type = other DNA
acatccttggtacatatgat

SEQ ID NO: 5198 - DNA, 20 bp, synthetic construct
  misc_feature 1..20: note = Description of Artificial Sequence: Synthetic oligonucleotide
  source 1..20: mol_type = other DNA
catccttggtacatatgatt

SEQ ID NO: 5199 - DNA, 20 bp, synthetic construct
  misc_feature 1..20: note = Description of Artificial Sequence: Synthetic oligonucleotide
  source 1..20: mol_type = other DNA
atccttggtacatatgattt

SEQ ID NO: 5200 - DNA, 20 bp, synthetic construct
  misc_feature 1..20: note = Description of Artificial Sequence: Synthetic oligonucleotide
  source 1..20: mol_type = other DNA
tccttggtacatatgatttt

SEQ ID NO: 5201 - DNA, 20 bp, synthetic construct
  misc_feature 1..20: note = Description of Artificial Sequence: Synthetic oligonucleotide
  source 1..20: mol_type = other DNA
ccttggtacatatgattttt

SEQ ID NO: 5202 - DNA, 20 bp, synthetic construct
  misc_feature 1..20: note = Description of Artificial Sequence: Synthetic oligonucleotide
  source 1..20: mol_type = other DNA
cttggtacatatgatttttt

SEQ ID NO: 5203 - DNA, 20 bp, synthetic construct
  misc_feature 1..20: note = Description of Artificial Sequence: Synthetic oligonucleotide
  source 1..20: mol_type = other DNA
ttggtacatatgattttttt

SEQ ID NO: 5204 - DNA, 20 bp, synthetic construct
  misc_feature 1..20: note = Description of Artificial Sequence: Synthetic oligonucleotide
  source 1..20: mol_type = other DNA
tggtacatatgatttttttg

SEQ ID NO: 5205 - DNA, 20 bp, synthetic construct
  misc_feature 1..20: note = Description of Artificial Sequence: Synthetic oligonucleotide
  source 1..20: mol_type = other DNA
ggtacatatgatttttttgt

SEQ ID NO: 5206 - DNA, 20 bp, synthetic construct
  misc_feature 1..20: note = Description of Artificial Sequence: Synthetic oligonucleotide
  source 1..20: mol_type = other DNA
gtacatatgatttttttgtg

SEQ ID NO: 5207 - DNA, 20 bp, synthetic construct
  misc_feature 1..20: note = Description of Artificial Sequence: Synthetic oligonucleotide
  source 1..20: mol_type = other DNA
tacatatgatttttttgtgc

SEQ ID NO: 5208 - DNA, 20 bp, synthetic construct
  misc_feature 1..20: note = Description of Artificial Sequence: Synthetic oligonucleotide
  source 1..20: mol_type = other DNA
acatatgatttttttgtgct

SEQ ID NO: 5209 - DNA, 20 bp, synthetic construct
  misc_feature 1..20: note = Description of Artificial Sequence: Synthetic oligonucleotide
  source 1..20: mol_type = other DNA
catatgatttttttgtgctc

SEQ ID NO: 5210 - DNA, 20 bp, synthetic construct
  misc_feature 1..20: note = Description of Artificial Sequence: Synthetic oligonucleotide
  source 1..20: mol_type = other DNA
atatgatttttttgtgctcc

SEQ ID NO: 5211 - DNA, 20 bp, synthetic construct
  misc_feature 1..20: note = Description of Artificial Sequence: Synthetic oligonucleotide
  source 1..20: mol_type = other DNA
tatgatttttttgtgctcct

SEQ ID NO: 5212 - DNA, 20 bp, synthetic construct
  misc_feature 1..20: note = Description of Artificial Sequence: Synthetic oligonucleotide
  source 1..20: mol_type = other DNA
atgatttttttgtgctcctt

SEQ ID NO: 5213 - DNA, 20 bp, synthetic construct
  misc_feature 1..20: note = Description of Artificial Sequence: Synthetic oligonucleotide
  source 1..20: mol_type = other DNA
tgatttttttgtgctccttg

SEQ ID NO: 5214 - DNA, 20 bp, synthetic construct
  misc_feature 1..20: note = Description of Artificial Sequence: Synthetic oligonucleotide
  source 1..20: mol_type = other DNA
gatttttttgtgctccttgg

SEQ ID NO: 5215 - DNA, 20 bp, synthetic construct
  misc_feature 1..20: note = Description of Artificial Sequence: Synthetic oligonucleotide
  source 1..20: mol_type = other DNA
atttttttgtgctccttgga

SEQ ID NO: 5216 - DNA, 20 bp, synthetic construct
  misc_feature 1..20: note = Description of Artificial Sequence: Synthetic oligonucleotide
  source 1..20: mol_type = other DNA
tttttttgtgctccttggag

SEQ ID NO: 5217 - DNA, 20 bp, synthetic construct
  misc_feature 1..20: note = Description of Artificial Sequence: Synthetic oligonucleotide
  source 1..20: mol_type = other DNA
ttttttgtgctccttggaga

SEQ ID NO: 5218 - DNA, 20 bp, synthetic construct
  misc_feature 1..20: note = Description of Artificial Sequence: Synthetic oligonucleotide
  source 1..20: mol_type = other DNA
tttttgtgctccttggagac

SEQ ID NO: 5219 - DNA, 20 bp, synthetic construct
  misc_feature 1..20: note = Description of Artificial Sequence: Synthetic oligonucleotide
  source 1..20: mol_type = other DNA
ttttgtgctccttggagact

SEQ ID NO: 5220 - DNA, 20 bp, synthetic construct
  misc_feature 1..20: note = Description of Artificial Sequence: Synthetic oligonucleotide
  source 1..20: mol_type = other DNA
tttgtgctccttggagactt

SEQ ID NO: 5221 - DNA, 20 bp, synthetic construct
  misc_feature 1..20: note = Description of Artificial Sequence: Synthetic oligonucleotide
  source 1..20: mol_type = other DNA
ttgtgctccttggagactta

SEQ ID NO: 5222 - DNA, 20 bp, synthetic construct
  misc_feature 1..20: note = Description of Artificial Sequence: Synthetic oligonucleotide
  source 1..20: mol_type = other DNA
tgtgctccttggagacttat

SEQ ID NO: 5223 - DNA, 20 bp, synthetic construct
  misc_feature 1..20: note = Description of Artificial Sequence: Synthetic oligonucleotide
  source 1..20: mol_type = other DNA
gtgctccttggagacttatt

SEQ ID NO: 5224 - DNA, 20 bp, synthetic construct
  misc_feature 1..20: note = Description of Artificial Sequence: Synthetic oligonucleotide
  source 1..20: mol_type = other DNA
tgctccttggagacttattc

SEQ ID NO: 5225 - DNA, 20 bp, synthetic construct
  misc_feature 1..20: note = Description of Artificial Sequence: Synthetic oligonucleotide
  source 1..20: mol_type = other DNA
gctccttggagacttattct

SEQ ID NO: 5226 - DNA, 20 bp, synthetic construct
  misc_feature 1..20: note = Description of Artificial Sequence: Synthetic oligonucleotide
  source 1..20: mol_type = other DNA
ctccttggagacttattctt

SEQ ID NO: 5227 - DNA, 20 bp, synthetic construct
  misc_feature 1..20: note = Description of Artificial Sequence: Synthetic oligonucleotide
  source 1..20: mol_type = other DNA
tccttggagacttattcttt

SEQ ID NO: 5228 - DNA, 20 bp, synthetic construct
  misc_feature 1..20: note = Description of Artificial Sequence: Synthetic oligonucleotide
  source 1..20: mol_type = other DNA
ccttggagacttattctttc

SEQ ID NO: 5229 - DNA, 20 bp, synthetic construct
  misc_feature 1..20: note = Description of Artificial Sequence: Synthetic oligonucleotide
  source 1..20: mol_type = other DNA
cttggagacttattctttct

SEQ ID NO: 5230 - DNA, 20 bp, synthetic construct
  misc_feature 1..20: note = Description of Artificial Sequence: Synthetic oligonucleotide
  source 1..20: mol_type = other DNA
ttggagacttattctttctt

SEQ ID NO: 5231 - DNA, 20 bp, synthetic construct
  misc_feature 1..20: note = Description of Artificial Sequence: Synthetic oligonucleotide
  source 1..20: mol_type = other DNA
tggagacttattctttcttt

SEQ ID NO: 5232 - DNA, 20 bp, synthetic construct
  misc_feature 1..20: note = Description of Artificial Sequence: Synthetic oligonucleotide
  source 1..20: mol_type = other DNA
ggagacttattctttctttg

SEQ ID NO: 5233 - DNA, 20 bp, synthetic construct
  misc_feature 1..20: note = Description of Artificial Sequence: Synthetic oligonucleotide
  source 1..20: mol_type = other DNA
gagacttattctttctttgg

SEQ ID NO: 5234 - DNA, 20 bp, synthetic construct
  misc_feature 1..20: note = Description of Artificial Sequence: Synthetic oligonucleotide
  source 1..20: mol_type = other DNA
agacttattctttctttgga

SEQ ID NO: 5235 - DNA, 20 bp, synthetic construct
  misc_feature 1..20: note = Description of Artificial Sequence: Synthetic oligonucleotide
  source 1..20: mol_type = other DNA
gacttattctttctttggag

SEQ ID NO: 5236 - DNA, 20 bp, synthetic construct
  misc_feature 1..20: note = Description of Artificial Sequence: Synthetic oligonucleotide
  source 1..20: mol_type = other DNA
acttattctttctttggaga

SEQ ID NO: 5237 - DNA, 20 bp, synthetic construct
  misc_feature 1..20: note = Description of Artificial Sequence: Synthetic oligonucleotide
  source 1..20: mol_type = other DNA
cttattctttctttggagat

SEQ ID NO: 5238 - DNA, 20 bp, synthetic construct
  misc_feature 1..20: note = Description of Artificial Sequence: Synthetic oligonucleotide
  source 1..20: mol_type = other DNA
ttattctttctttggagatt

SEQ ID NO: 5239 - DNA, 20 bp, synthetic construct
  misc_feature 1..20: note = Description of Artificial Sequence: Synthetic oligonucleotide
  source 1..20: mol_type = other DNA
tattctttctttggagatta

SEQ ID NO: 5240 - DNA, 20 bp, synthetic construct
  misc_feature 1..20: note = Description of Artificial Sequence: Synthetic oligonucleotide
  source 1..20: mol_type = other DNA
attctttctttggagattat

SEQ ID NO: 5241 - DNA, 20 bp, synthetic construct
  misc_feature 1..20: note = Description of Artificial Sequence: Synthetic oligonucleotide
  source 1..20: mol_type = other DNA
ttctttctttggagattata

SEQ ID NO: 5242 - DNA, 20 bp, synthetic construct
  misc_feature 1..20: note = Description of Artificial Sequence: Synthetic oligonucleotide
  source 1..20: mol_type = other DNA
tctttctttggagattatag

SEQ ID NO: 5243 - DNA, 20 bp, synthetic construct
  misc_feature 1..20: note = Description of Artificial Sequence: Synthetic oligonucleotide
  source 1..20: mol_type = other DNA
ctttctttggagattatagg

SEQ ID NO: 5244 - DNA, 20 bp, synthetic construct
  misc_feature 1..20: note = Description of Artificial Sequence: Synthetic oligonucleotide
  source 1..20: mol_type = other DNA
tttctttggagattataggc

SEQ ID NO: 5245 - DNA, 20 bp, synthetic construct
  misc_feature 1..20: note = Description of Artificial Sequence: Synthetic oligonucleotide
  source 1..20: mol_type = other DNA
ttctttggagattataggct

SEQ ID NO: 5246 - DNA, 20 bp, synthetic construct
  misc_feature 1..20: note = Description of Artificial Sequence: Synthetic oligonucleotide
  source 1..20: mol_type = other DNA
tctttggagattataggctg

SEQ ID NO: 5247 - DNA, 20 bp, synthetic construct
  misc_feature 1..20: note = Description of Artificial Sequence: Synthetic oligonucleotide
  source 1..20: mol_type = other DNA
ctttggagattataggctgt

SEQ ID NO: 5248 - DNA, 20 bp, synthetic construct
  misc_feature 1..20: note = Description of Artificial Sequence: Synthetic oligonucleotide
  source 1..20: mol_type = other DNA
tttggagattataggctgtt

SEQ ID NO: 5249 - DNA, 20 bp, synthetic construct
  misc_feature 1..20: note = Description of Artificial Sequence: Synthetic oligonucleotide
  source 1..20: mol_type = other DNA
ttggagattataggctgttt

SEQ ID NO: 5250 - DNA, 20 bp, synthetic construct
  misc_feature 1..20: note = Description of Artificial Sequence: Synthetic oligonucleotide
  source 1..20: mol_type = other DNA
tggagattataggctgtttc

SEQ ID NO: 5251 - DNA, 20 bp, synthetic construct
  misc_feature 1..20: note = Description of Artificial Sequence: Synthetic oligonucleotide
  source 1..20: mol_type = other DNA
ggagattataggctgtttct

SEQ ID NO: 5252 - DNA, 20 bp, synthetic construct
  misc_feature 1..20: note = Description of Artificial Sequence: Synthetic oligonucleotide
  source 1..20: mol_type = other DNA
gagattataggctgtttctc

SEQ ID NO: 5253 - DNA, 20 bp, synthetic construct
  misc_feature 1..20: note = Description of Artificial Sequence: Synthetic oligonucleotide
  source 1..20: mol_type = other DNA
agattataggctgtttctca

SEQ ID NO: 5254 - DNA, 20 bp, synthetic construct
  misc_feature 1..20: note = Description of Artificial Sequence: Synthetic oligonucleotide
  source 1..20: mol_type = other DNA
gattataggctgtttctcag

SEQ ID NO: 5255 - DNA, 20 bp, synthetic construct
  misc_feature 1..20: note = Description of Artificial Sequence: Synthetic oligonucleotide
  source 1..20: mol_type = other DNA
attataggctgtttctcagt

SEQ ID NO: 5256 - DNA, 20 bp, synthetic construct
  misc_feature 1..20: note = Description of Artificial Sequence: Synthetic oligonucleotide
  source 1..20: mol_type = other DNA
ttataggctgtttctcagtc

SEQ ID NO: 5257 - DNA, 20 bp, synthetic construct
  misc_feature 1..20: note = Description of Artificial Sequence: Synthetic oligonucleotide
  source 1..20: mol_type = other DNA
tataggctgtttctcagtcc

SEQ ID NO: 5258 - DNA, 20 bp, synthetic construct
  misc_feature 1..20: note = Description of Artificial Sequence: Synthetic oligonucleotide
  source 1..20: mol_type = other DNA
ataggctgtttctcagtcct

SEQ ID NO: 5259 - DNA, 20 bp, synthetic construct
  misc_feature 1..20: note = Description of Artificial Sequence: Synthetic oligonucleotide
  source 1..20: mol_type = other DNA
taggctgtttctcagtccta

SEQ ID NO: 5260 - DNA, 20 bp, synthetic construct
  misc_feature 1..20: note = Description of Artificial Sequence: Synthetic oligonucleotide
  source 1..20: mol_type = other DNA
aggctgtttctcagtcctac

SEQ ID NO: 5261 - DNA, 20 bp, synthetic construct
  misc_feature 1..20: note = Description of Artificial Sequence: Synthetic oligonucleotide
  source 1..20: mol_type = other DNA
ggctgtttctcagtcctacc

SEQ ID NO: 5262 - DNA, 20 bp, synthetic construct
  misc_feature 1..20: note = Description of Artificial Sequence: Synthetic oligonucleotide
  source 1..20: mol_type = other DNA
gctgtttctcagtcctaccc

SEQ ID NO: 5263 - DNA, 20 bp, synthetic construct
  misc_feature 1..20: note = Description of Artificial Sequence: Synthetic oligonucleotide
  source 1..20: mol_type = other DNA
ctgtttctcagtcctaccct

SEQ ID NO: 5264 - DNA, 20 bp, synthetic construct
  misc_feature 1..20: note = Description of Artificial Sequence: Synthetic oligonucleotide
  source 1..20: mol_type = other DNA
tgtttctcagtcctaccctt

SEQ ID NO: 5265 - DNA, 20 bp, synthetic construct
  misc_feature 1..20: note = Description of Artificial Sequence: Synthetic oligonucleotide
  source 1..20: mol_type = other DNA
gtttctcagtcctacccttt

SEQ ID NO: 5266 - DNA, 20 bp, synthetic construct
  misc_feature 1..20: note = Description of Artificial Sequence: Synthetic oligonucleotide
  source 1..20: mol_type = other DNA
tttctcagtcctaccctttc

SEQ ID NO: 5267 - DNA, 20 bp, synthetic construct
  misc_feature 1..20: note = Description of Artificial Sequence: Synthetic oligonucleotide
  source 1..20: mol_type = other DNA
ttctcagtcctaccctttct

SEQ ID NO: 5268 - DNA, 20 bp, synthetic construct
  misc_feature 1..20: note = Description of Artificial Sequence: Synthetic oligonucleotide
  source 1..20: mol_type = other DNA
tctcagtcctaccctttcta

SEQ ID NO: 5269 - DNA, 20 bp, synthetic construct
  misc_feature 1..20: note = Description of Artificial Sequence: Synthetic oligonucleotide
  source 1..20: mol_type = other DNA
ctcagtcctaccctttctaa

SEQ ID NO: 5270 - DNA, 20 bp, synthetic construct
  misc_feature 1..20: note = Description of Artificial Sequence: Synthetic oligonucleotide
  source 1..20: mol_type = other DNA
tcagtcctaccctttctaac

SEQ ID NO: 5271 - DNA, 20 bp, synthetic construct
  misc_feature 1..20: note = Description of Artificial Sequence: Synthetic oligonucleotide
  source 1..20: mol_type = other DNA
cagtcctaccctttctaaca

SEQ ID NO: 5272 - DNA, 20 bp, synthetic construct
  misc_feature 1..20: note = Description of Artificial Sequence: Synthetic oligonucleotide
  source 1..20: mol_type = other DNA
agtcctaccctttctaacac

SEQ ID NO: 5273 - DNA, 20 bp, synthetic construct
  misc_feature 1..20: note = Description of Artificial Sequence: Synthetic oligonucleotide
  source 1..20: mol_type = other DNA
gtcctaccctttctaacact

SEQ ID NO: 5274 - DNA, 20 bp, synthetic construct
  misc_feature 1..20: note = Description of Artificial Sequence: Synthetic oligonucleotide
  source 1..20: mol_type = other DNA
tcctaccctttctaacactc

SEQ ID NO: 5275 - DNA, 20 bp, synthetic construct
  misc_feature 1..20: note = Description of Artificial Sequence: Synthetic oligonucleotide
  source 1..20: mol_type = other DNA
cctaccctttctaacactct

SEQ ID NO: 5276 - DNA, 20 bp, synthetic construct
  misc_feature 1..20: note = Description of Artificial Sequence: Synthetic oligonucleotide
  source 1..20: mol_type = other DNA
ctaccctttctaacactctc

SEQ ID NO: 5277 - DNA, 20 bp, synthetic construct
  misc_feature 1..20: note = Description of Artificial Sequence: Synthetic oligonucleotide
  source 1..20: mol_type = other DNA
taccctttctaacactctct

SEQ ID NO: 5278 - DNA, 20 bp, synthetic construct
  misc_feature 1..20: note = Description of Artificial Sequence: Synthetic oligonucleotide
  source 1..20: mol_type = other DNA
accctttctaacactctctt

SEQ ID NO: 5279 - DNA, 20 bp, synthetic construct
  misc_feature 1..20: note = Description of Artificial Sequence: Synthetic oligonucleotide
  source 1..20: mol_type = other DNA
ccctttctaacactctcttc

SEQ ID NO: 5280 - DNA, 20 bp, synthetic construct
  misc_feature 1..20: note = Description of Artificial Sequence: Synthetic oligonucleotide
  source 1..20: mol_type = other DNA
cctttctaacactctcttcc

SEQ ID NO: 5281 - DNA, 20 bp, synthetic construct
  misc_feature 1..20: note = Description of Artificial Sequence: Synthetic oligonucleotide
  source 1..20: mol_type = other DNA
ctttctaacactctcttcct

SEQ ID NO: 5282 - DNA, 20 bp, synthetic construct
  misc_feature 1..20: note = Description of Artificial Sequence: Synthetic oligonucleotide
  source 1..20: mol_type = other DNA
tttctaacactctcttcctg

SEQ ID NO: 5283 - DNA, 20 bp, synthetic construct
  misc_feature 1..20: note = Description of Artificial Sequence: Synthetic oligonucleotide
  source 1..20: mol_type = other DNA
ttctaacactctcttcctgt

SEQ ID NO: 5284 - DNA, 20 bp, synthetic construct
  misc_feature 1..20: note = Description of Artificial Sequence: Synthetic oligonucleotide
  source 1..20: mol_type = other DNA
tctaacactctcttcctgtc

SEQ ID NO: 5285 - DNA, 20 bp, synthetic construct
  misc_feature 1..20: note = Description of Artificial Sequence: Synthetic oligonucleotide
  source 1..20: mol_type = other DNA
ctaacactctcttcctgtcc

SEQ ID NO: 5286 - DNA, 20 bp, synthetic construct
  misc_feature 1..20: note = Description of Artificial Sequence: Synthetic oligonucleotide
  source 1..20: mol_type = other DNA
taacactctcttcctgtcct

SEQ ID NO: 5287 - DNA, 20 bp, synthetic construct
  misc_feature 1..20: note = Description of Artificial Sequence: Synthetic oligonucleotide
  source 1..20: mol_type = other DNA
aacactctcttcctgtcctc

SEQ ID NO: 5288 - DNA, 20 bp, synthetic construct
  misc_feature 1..20: note = Description of Artificial Sequence: Synthetic oligonucleotide
  source 1..20: mol_type = other DNA
acactctcttcctgtcctca

SEQ ID NO: 5289 - DNA, 20 bp, synthetic construct
  misc_feature 1..20: note = Description of Artificial Sequence: Synthetic oligonucleotide
  source 1..20: mol_type = other DNA
cactctcttcctgtcctcat

SEQ ID NO: 5290 - DNA, 20 bp, synthetic construct
  misc_feature 1..20: note = Description of Artificial Sequence: Synthetic oligonucleotide
  source 1..20: mol_type = other DNA
actctcttcctgtcctcatc

SEQ ID NO: 5291 - DNA, 20 bp, synthetic construct
  misc_feature 1..20: note = Description of Artificial Sequence: Synthetic oligonucleotide
  source 1..20: mol_type = other DNA
ctctcttcctgtcctcatct

SEQ ID NO: 5292 - DNA, 20 bp, synthetic construct
  misc_feature 1..20: note = Description of Artificial Sequence: Synthetic oligonucleotide
  source 1..20: mol_type = other DNA
tctcttcctgtcctcatctg

SEQ ID NO: 5293 - DNA, 20 bp, synthetic construct
  misc_feature 1..20: note = Description of Artificial Sequence: Synthetic oligonucleotide
  source 1..20: mol_type = other DNA
ctcttcctgtcctcatctgc

SEQ ID NO: 5294 - DNA, 20 bp, synthetic construct
  misc_feature 1..20: note = Description of Artificial Sequence: Synthetic oligonucleotide
  source 1..20: mol_type = other DNA
tcttcctgtcctcatctgcc

SEQ ID NO: 5295 - DNA, 20 bp, synthetic construct
  misc_feature 1..20: note = Description of Artificial Sequence: Synthetic oligonucleotide
  source 1..20: mol_type = other DNA
cttcctgtcctcatctgccc

SEQ ID NO: 5296 - DNA, 20 bp, synthetic construct
  misc_feature 1..20: note = Description of Artificial Sequence: Synthetic oligonucleotide
  source 1..20: mol_type = other DNA
ttcctgtcctcatctgccct

SEQ ID NO: 5297 - DNA, 20 bp, synthetic construct
  misc_feature 1..20: note = Description of Artificial Sequence: Synthetic oligonucleotide
  source 1..20: mol_type = other DNA
tcctgtcctcatctgccctc

SEQ ID NO: 5298 - DNA, 20 bp, synthetic construct
  misc_feature 1..20: note = Description of Artificial Sequence: Synthetic oligonucleotide
  source 1..20: mol_type = other DNA
cctgtcctcatctgccctca

SEQ ID NO: 5299 - DNA, 20 bp, synthetic construct
  misc_feature 1..20: note = Description of Artificial Sequence: Synthetic oligonucleotide
  source 1..20: mol_type = other DNA
ctgtcctcatctgccctcat

SEQ ID NO: 5300 - DNA, 20 bp, synthetic construct
  misc_feature 1..20: note = Description of Artificial Sequence: Synthetic oligonucleotide
  source 1..20: mol_type = other DNA
tgtcctcatctgccctcatc

SEQ ID NO: 5301 - DNA, 20 bp, synthetic construct
  misc_feature 1..20: note = Description of Artificial Sequence: Synthetic oligonucleotide
  source 1..20: mol_type = other DNA
gtcctcatctgccctcatcc

SEQ ID NO: 5302 - DNA, 20 bp, synthetic construct
  misc_feature 1..20: note = Description of Artificial Sequence: Synthetic oligonucleotide
  source 1..20: mol_type = other DNA
tcctcatctgccctcatcca

SEQ ID NO: 5303 - DNA, 20 bp, synthetic construct
  misc_feature 1..20: note = Description of Artificial Sequence: Synthetic oligonucleotide
  source 1..20: mol_type = other DNA
cctcatctgccctcatccag

SEQ ID NO: 5304 - DNA, 20 bp, synthetic construct
  misc_feature 1..20: note = Description of Artificial Sequence: Synthetic oligonucleotide
  source 1..20: mol_type = other DNA
ctcatctgccctcatccagt

SEQ ID NO: 5305 - DNA, 20 bp, synthetic construct
  misc_feature 1..20: note = Description of Artificial Sequence: Synthetic oligonucleotide
  source 1..20: mol_type = other DNA
tcatctgccctcatccagtc

SEQ ID NO: 5306 - DNA, 20 bp, synthetic construct
  misc_feature 1..20: note = Description of Artificial Sequence: Synthetic oligonucleotide
  source 1..20: mol_type = other DNA
catctgccctcatccagtct

SEQ ID NO: 5307 - DNA, 20 bp, synthetic construct
  misc_feature 1..20: note = Description of Artificial Sequence: Synthetic oligonucleotide
  source 1..20: mol_type = other DNA
atctgccctcatccagtctc

SEQ ID NO: 5308 - DNA, 20 bp, synthetic construct
  misc_feature 1..20: note = Description of Artificial Sequence: Synthetic oligonucleotide
  source 1..20: mol_type = other DNA
tctgccctcatccagtctcc

SEQ ID NO: 5309 - DNA, 20 bp, synthetic construct
  misc_feature 1..20: note = Description of Artificial Sequence: Synthetic oligonucleotide
  source 1..20: mol_type = other DNA
ctgccctcatccagtctcca

SEQ ID NO: 5310 - DNA, 20 bp, synthetic construct
  misc_feature 1..20: note = Description of Artificial Sequence: Synthetic oligonucleotide
  source 1..20: mol_type = other DNA
tgccctcatccagtctccac

SEQ ID NO: 5311 - DNA, 20 bp, synthetic construct
  misc_feature 1..20: note = Description of Artificial Sequence: Synthetic oligonucleotide
  source 1..20: mol_type = other DNA
gccctcatccagtctccacg

SEQ ID NO: 5312 - DNA, 20 bp, synthetic construct
  misc_feature 1..20: note = Description of Artificial Sequence: Synthetic oligonucleotide
  source 1..20: mol_type = other DNA
ccctcatccagtctccacgt

SEQ ID NO: 5313 - DNA, 20 bp, synthetic construct
  misc_feature 1..20: note = Description of Artificial Sequence: Synthetic oligonucleotide
  source 1..20: mol_type = other DNA
cctcatccagtctccacgtg

SEQ ID NO: 5314 - DNA, 20 bp, synthetic construct
  misc_feature 1..20: note = Description of Artificial Sequence: Synthetic oligonucleotide
  source 1..20: mol_type = other DNA
ctcatccagtctccacgtgt

SEQ ID NO: 5315 - DNA, 20 bp, synthetic construct
  misc_feature 1..20: note = Description of Artificial Sequence: Synthetic oligonucleotide
  source 1..20: mol_type = other DNA
tcatccagtctccacgtgtc

SEQ ID NO: 5316 - DNA, 20 bp, synthetic construct
  misc_feature 1..20: note = Description of Artificial Sequence: Synthetic oligonucleotide
  source 1..20: mol_type = other DNA
catccagtctccacgtgtct

SEQ ID NO: 5317 - DNA, 20 bp, synthetic construct
  misc_feature 1..20: note = Description of Artificial Sequence: Synthetic oligonucleotide
  source 1..20: mol_type = other DNA
atccagtctccacgtgtctc

SEQ ID NO: 5318 - DNA, 20 bp, synthetic construct
  misc_feature 1..20: note = Description of Artificial Sequence: Synthetic oligonucleotide
  source 1..20: mol_type = other DNA
tccagtctccacgtgtctca

SEQ ID NO: 5319 - DNA, 20 bp, synthetic construct
  misc_feature 1..20: note = Description of Artificial Sequence: Synthetic oligonucleotide
  source 1..20: mol_type = other DNA
ccagtctccacgtgtctcag

SEQ ID NO: 5320 - DNA, 20 bp, synthetic construct
  misc_feature 1..20: note = Description of Artificial Sequence: Synthetic oligonucleotide
  source 1..20: mol_type = other DNA
cagtctccacgtgtctcagt

SEQ ID NO: 5321 - DNA, 20 bp, synthetic construct
  misc_feature 1..20: note = Description of Artificial Sequence: Synthetic oligonucleotide
  source 1..20: mol_type = other DNA
agtctccacgtgtctcagtt

SEQ ID NO: 5322 - DNA, 20 bp, synthetic construct
  misc_feature 1..20: note = Description of Artificial Sequence: Synthetic oligonucleotide
  source 1..20: mol_type = other DNA
gtctccacgtgtctcagttt

SEQ ID NO: 5323 - DNA, 20 bp, synthetic construct
  misc_feature 1..20: note = Description of Artificial Sequence: Synthetic oligonucleotide
  source 1..20: mol_type = other DNA
tctccacgtgtctcagtttc

SEQ ID NO: 5324 - DNA, 20 bp, synthetic construct
  misc_feature 1..20: note = Description of Artificial Sequence: Synthetic oligonucleotide
  source 1..20: mol_type = other DNA
ctccacgtgtctcagtttct

SEQ ID NO: 5325 - DNA, 20 bp, synthetic construct
  misc_feature 1..20: note = Description of Artificial Sequence: Synthetic oligonucleotide
  source 1..20: mol_type = other DNA
tccacgtgtctcagtttctg

SEQ ID NO: 5326 - DNA, 20 bp, synthetic construct
  misc_feature 1..20: note = Description of Artificial Sequence: Synthetic oligonucleotide
  source 1..20: mol_type = other DNA
ccacgtgtctcagtttctgt

SEQ ID NO: 5327 - DNA, 20 bp, synthetic construct
  misc_feature 1..20: note = Description of Artificial Sequence: Synthetic oligonucleotide
  source 1..20: mol_type = other DNA
cacgtgtctcagtttctgta

SEQ ID NO: 5328 - DNA, 20 bp, synthetic construct
  misc_feature 1..20: note = Description of Artificial Sequence: Synthetic oligonucleotide
  source 1..20: mol_type = other DNA
acgtgtctcagtttctgtat

SEQ ID NO: 5329 - DNA, 20 bp, synthetic construct
  misc_feature 1..20: note = Description of Artificial Sequence: Synthetic oligonucleotide
  source 1..20: mol_type = other DNA
cgtgtctcagtttctgtatc

SEQ ID NO: 5330 - DNA, 20 bp, synthetic construct
  misc_feature 1..20: note = Description of Artificial Sequence: Synthetic oligonucleotide
  source 1..20: mol_type = other DNA
gtgtctcagtttctgtatcc

SEQ ID NO: 5331 - DNA, 20 bp, synthetic construct
  misc_feature 1..20: note = Description of Artificial Sequence: Synthetic oligonucleotide
  source 1..20: mol_type = other DNA
tgtctcagtttctgtatccg

SEQ ID NO: 5332 - DNA, 20 bp, synthetic construct
  misc_feature 1..20: note = Description of Artificial Sequence: Synthetic oligonucleotide
  source 1..20: mol_type = other DNA
gtctcagtttctgtatccgt

SEQ ID NO: 5333 - DNA, 20 bp, synthetic construct
  misc_feature 1..20: note = Description of Artificial Sequence: Synthetic oligonucleotide
  source 1..20: mol_type = other DNA
tctcagtttctgtatccgtg

SEQ ID NO: 5334 - DNA, 20 bp, synthetic construct
  misc_feature 1..20: note = Description of Artificial Sequence: Synthetic oligonucleotide
  source 1..20: mol_type = other DNA
ctcagtttctgtatccgtgc

SEQ ID NO: 5335 - DNA, 20 bp, synthetic construct
  misc_feature 1..20: note = Description of Artificial Sequence: Synthetic oligonucleotide
  source 1..20: mol_type = other DNA
tcagtttctgtatccgtgct

SEQ ID NO: 5336 - DNA, 20 bp, synthetic construct
  misc_feature 1..20: note = Description of Artificial Sequence: Synthetic oligonucleotide
  source 1..20: mol_type = other DNA
cagtttctgtatccgtgctc

SEQ ID NO: 5337 - DNA, 20 bp, synthetic construct
  misc_feature 1..20: note = Description of Artificial Sequence: Synthetic oligonucleotide
  source 1..20: mol_type = other DNA
agtttctgtatccgtgctcc

SEQ ID NO: 5338 - DNA, 20 bp, synthetic construct
  misc_feature 1..20: note = Description of Artificial Sequence: Synthetic oligonucleotide
  source 1..20: mol_type = other DNA
gtttctgtatccgtgctcca

SEQ ID NO: 5339 - DNA, 20 bp, synthetic construct
  misc_feature 1..20: note = Description of Artificial Sequence: Synthetic oligonucleotide
  source 1..20: mol_type = other DNA
tttctgtatccgtgctccac

SEQ ID NO: 5340 - DNA, 20 bp, synthetic construct
  misc_feature 1..20: note = Description of Artificial Sequence: Synthetic oligonucleotide
  source 1..20: mol_type = other DNA
ttctgtatccgtgctccacg

SEQ ID NO: 5341 - DNA, 20 bp, synthetic construct
  misc_feature 1..20: note = Description of Artificial Sequence: Synthetic oligonucleotide
  source 1..20: mol_type = other DNA
tctgtatccgtgctccacgg

SEQ ID NO: 5342 - DNA, 20 bp, synthetic construct
  misc_feature 1..20: note = Description of Artificial Sequence: Synthetic oligonucleotide
  source 1..20: mol_type = other DNA
ctgtatccgtgctccacggc

SEQ ID NO: 5343 - DNA, 20 bp, synthetic construct
  misc_feature 1..20: note = Description of Artificial Sequence: Synthetic oligonucleotide
  source 1..20: mol_type = other DNA
tgtatccgtgctccacggca

SEQ ID NO: 5344 - DNA, 20 bp, synthetic construct
  misc_feature 1..20: note = Description of Artificial Sequence: Synthetic oligonucleotide
  source 1..20: mol_type = other DNA
gtatccgtgctccacggcag

SEQ ID NO: 5345 - DNA, 20 bp, synthetic construct
  misc_feature 1..20: note = Description of Artificial Sequence: Synthetic oligonucleotide
  source 1..20: mol_type = other DNA
tatccgtgctccacggcagc

SEQ ID NO: 5346 - DNA, 20 bp, synthetic construct
  misc_feature 1..20: note = Description of Artificial Sequence: Synthetic oligonucleotide
  source 1..20: mol_type = other DNA
atccgtgctccacggcagcc

SEQ ID NO: 5347 - DNA, 20 bp, synthetic construct
  misc_feature 1..20: note = Description of Artificial Sequence: Synthetic oligonucleotide
  source 1..20: mol_type = other DNA
tccgtgctccacggcagcct

SEQ ID NO: 5348 - DNA, 20 bp, synthetic construct
  misc_feature 1..20: note = Description of Artificial Sequence: Synthetic oligonucleotide
  source 1..20: mol_type = other DNA
ccgtgctccacggcagcctc

SEQ ID NO: 5349 - DNA, 20 bp, synthetic construct
  misc_feature 1..20: note = Description of Artificial Sequence: Synthetic oligonucleotide
  source 1..20: mol_type = other DNA
cgtgctccacggcagcctcc

SEQ ID NO: 5350 - DNA, 20 bp, synthetic construct
  misc_feature 1..20: note = Description of Artificial Sequence: Synthetic oligonucleotide
  source 1..20: mol_type = other DNA
gtgctccacggcagcctcct

SEQ ID NO: 5351 - DNA, 20 bp, synthetic construct
  misc_feature 1..20: note = Description of Artificial Sequence: Synthetic oligonucleotide
  source 1..20: mol_type = other DNA
tgctccacggcagcctcctt

SEQ ID NO: 5352 - DNA, 20 bp, synthetic construct
  misc_feature 1..20: note = Description of Artificial Sequence: Synthetic oligonucleotide
  source 1..20: mol_type = other DNA
gctccacggcagcctccttt

SEQ ID NO: 5353 - DNA, 20 bp, synthetic construct
  misc_feature 1..20: note = Description of Artificial Sequence: Synthetic oligonucleotide
  source 1..20: mol_type = other DNA
ctccacggcagcctcctttt

SEQ ID NO: 5354 - DNA, 20 bp, synthetic construct
  misc_feature 1..20: note = Description of Artificial Sequence: Synthetic oligonucleotide
  source 1..20: mol_type = other DNA
tccacggcagcctcctttta

SEQ ID NO: 5355 - DNA, 20 bp, synthetic construct
  misc_feature 1..20: note = Description of Artificial Sequence: Synthetic oligonucleotide
  source 1..20: mol_type = other DNA
ccacggcagcctccttttaa

SEQ ID NO: 5356 - DNA, 20 bp, synthetic construct
  misc_feature 1..20: note = Description of Artificial Sequence: Synthetic oligonucleotide
  source 1..20: mol_type = other DNA
cacggcagcctccttttaag

SEQ ID NO: 5357 - DNA, 20 bp, synthetic construct
  misc_feature 1..20: note = Description of Artificial Sequence: Synthetic oligonucleotide
  source 1..20: mol_type = other DNA
acggcagcctccttttaagg

SEQ ID NO: 5358 - DNA, 20 bp, synthetic construct
  misc_feature 1..20: note = Description of Artificial Sequence: Synthetic oligonucleotide
  source 1..20: mol_type = other DNA
cggcagcctccttttaaggc

SEQ ID NO: 5359 - DNA, 20 bp, synthetic construct
  misc_feature 1..20: note = Description of Artificial Sequence: Synthetic oligonucleotide
  source 1..20: mol_type = other DNA
ggcagcctccttttaaggct

SEQ ID NO: 5360 - DNA, 20 bp, synthetic construct
  misc_feature 1..20: note = Description of Artificial Sequence: Synthetic oligonucleotide
  source 1..20: mol_type = other DNA
gcagcctccttttaaggctt

SEQ ID NO: 5361 - DNA, 20 bp, synthetic construct
  misc_feature 1..20: note = Description of Artificial Sequence: Synthetic oligonucleotide
  source 1..20: mol_type = other DNA
cagcctccttttaaggcttg

SEQ ID NO: 5362 - DNA, 20 bp, synthetic construct
  misc_feature 1..20: note = Description of Artificial Sequence: Synthetic oligonucleotide
  source 1..20: mol_type = other DNA
agcctccttttaaggcttga

SEQ ID NO: 5363 - DNA, 20 bp, synthetic construct
  misc_feature 1..20: note = Description of Artificial Sequence: Synthetic oligonucleotide
  source 1..20: mol_type = other DNA
gcctccttttaaggcttgaa

SEQ ID NO: 5364 - DNA, 20 bp, synthetic construct
  misc_feature 1..20: note = Description of Artificial Sequence: Synthetic oligonucleotide
  source 1..20: mol_type = other DNA
cctccttttaaggcttgaag

SEQ ID NO: 5365 - DNA, 20 bp, synthetic construct
  misc_feature 1..20: note = Description of Artificial Sequence: Synthetic oligonucleotide
  source 1..20: mol_type = other DNA
ctccttttaaggcttgaagt

SEQ ID NO: 5366 - DNA, 20 bp, synthetic construct
  misc_feature 1..20: note = Description of Artificial Sequence: Synthetic oligonucleotide
  source 1..20: mol_type = other DNA
tccttttaaggcttgaagtc

SEQ ID NO: 5367 - DNA, 20 bp, synthetic construct
  misc_feature 1..20: note = Description of Artificial Sequence: Synthetic oligonucleotide
  source 1..20: mol_type = other DNA
ccttttaaggcttgaagtct

SEQ ID NO: 5368 - DNA, 20 bp, synthetic construct
  misc_feature 1..20: note = Description of Artificial Sequence: Synthetic oligonucleotide
  source 1..20: mol_type = other DNA
cttttaaggcttgaagtctt

SEQ ID NO: 5369 - DNA, 20 bp, synthetic construct
  misc_feature 1..20: note = Description of Artificial Sequence: Synthetic oligonucleotide
  source 1..20: mol_type = other DNA
ttttaaggcttgaagtcttc

SEQ ID NO: 5370 - DNA, 20 bp, synthetic construct
  misc_feature 1..20: note = Description of Artificial Sequence: Synthetic oligonucleotide
  source 1..20: mol_type = other DNA
tttaaggcttgaagtcttct

SEQ ID NO: 5371 - DNA, 20 bp, synthetic construct
  misc_feature 1..20: note = Description of Artificial Sequence: Synthetic oligonucleotide
  source 1..20: mol_type = other DNA
ttaaggcttgaagtcttctg

SEQ ID NO: 5372 - DNA, 20 bp, synthetic construct
  misc_feature 1..20: note = Description of Artificial Sequence: Synthetic oligonucleotide
  source 1..20: mol_type = other DNA
taaggcttgaagtcttctgg

SEQ ID NO: 5373 - DNA, 20 bp, synthetic construct
  misc_feature 1..20: note = Description of Artificial Sequence: Synthetic oligonucleotide
  source 1..20: mol_type = other DNA
aaggcttgaagtcttctggg

SEQ ID NO: 5374 - DNA, 20 bp, synthetic construct
  misc_feature 1..20: note = Description of Artificial Sequence: Synthetic oligonucleotide
  source 1..20: mol_type = other DNA
aggcttgaagtcttctgggc

SEQ ID NO: 5375 - DNA, 20 bp, synthetic construct
  misc_feature 1..20: note = Description of Artificial Sequence: Synthetic oligonucleotide
  source 1..20: mol_type = other DNA
ggcttgaagtcttctgggcg

SEQ ID NO: 5376 - DNA, 20 bp, synthetic construct
  misc_feature 1..20: note = Description of Artificial Sequence: Synthetic oligonucleotide
  source 1..20: mol_type = other DNA
gcttgaagtcttctgggcgg

SEQ ID NO: 5377 - DNA, 20 bp, synthetic construct
  misc_feature 1..20: note = Description of Artificial Sequence: Synthetic oligonucleotide
  source 1..20: mol_type = other DNA
cttgaagtcttctgggcgga

SEQ ID NO: 5378 - DNA, 20 bp, synthetic construct
  misc_feature 1..20: note = Description of Artificial Sequence: Synthetic oligonucleotide
  source 1..20: mol_type = other DNA
ttgaagtcttctgggcggat

SEQ ID NO: 5379 - DNA, 20 bp, synthetic construct
  misc_feature 1..20: note = Description of Artificial Sequence: Synthetic oligonucleotide
  source 1..20: mol_type = other DNA
tgaagtcttctgggcggatt

SEQ ID NO: 5380 - DNA, 20 bp, synthetic construct
  misc_feature 1..20: note = Description of Artificial Sequence: Synthetic oligonucleotide
  source 1..20: mol_type = other DNA
gaagtcttctgggcggattt

SEQ ID NO: 5381 - DNA, 20 bp, synthetic construct
  misc_feature 1..20: note = Description of Artificial Sequence: Synthetic oligonucleotide
  source 1..20: mol_type = other DNA
aagtcttctgggcggatttt

SEQ ID NO: 5382 - DNA, 20 bp, synthetic construct
  misc_feature 1..20: note = Description of Artificial Sequence: Synthetic oligonucleotide
  source 1..20: mol_type = other DNA
agtcttctgggcggattttc

SEQ ID NO: 5383 - DNA, 20 bp, synthetic construct
  misc_feature 1..20: note = Description of Artificial Sequence: Synthetic oligonucleotide
  source 1..20: mol_type = other DNA
gtcttctgggcggattttca

SEQ ID NO: 5384 - DNA, 20 bp, synthetic construct
  misc_feature 1..20: note = Description of Artificial Sequence: Synthetic oligonucleotide
  source 1..20: mol_type = other DNA
tcttctgggcggattttcat

SEQ ID NO: 5385 - DNA, 20 bp, synthetic construct
  misc_feature 1..20: note = Description of Artificial Sequence: Synthetic oligonucleotide
  source 1..20: mol_type = other DNA
cttctgggcggattttcatc

SEQ ID NO: 5386 - DNA, 20 bp, synthetic construct
  misc_feature 1..20: note = Description of Artificial Sequence: Synthetic oligonucleotide
  source 1..20: mol_type = other DNA
ttctgggcggattttcatct

SEQ ID NO: 5387 - DNA, 20 bp, synthetic construct
  misc_feature 1..20: note = Description of Artificial Sequence: Synthetic oligonucleotide
  source 1..20: mol_type = other DNA
tctgggcggattttcatctc

SEQ ID NO: 5388 - DNA, 20 bp, synthetic construct
  misc_feature 1..20: note = Description of Artificial Sequence: Synthetic oligonucleotide
  source 1..20: mol_type = other DNA
ctgggcggattttcatctcc

SEQ ID NO: 5389 - DNA, 20 bp, synthetic construct
  misc_feature 1..20: note = Description of Artificial Sequence: Synthetic oligonucleotide
  source 1..20: mol_type = other DNA
tgggcggattttcatctcca

SEQ ID NO: 5390 - DNA, 20 bp, synthetic construct
  misc_feature 1..20: note = Description of Artificial Sequence: Synthetic oligonucleotide
  source 1..20: mol_type = other DNA
gggcggattttcatctccac

SEQ ID NO: 5391 - DNA, 20 bp, synthetic construct
  misc_feature 1..20: note = Description of Artificial Sequence: Synthetic oligonucleotide
  source 1..20: mol_type = other DNA
ggcggattttcatctccacc

SEQ ID NO: 5392 - DNA, 20 bp, synthetic construct
  misc_feature 1..20: note = Description of Artificial Sequence: Synthetic oligonucleotide
  source 1..20: mol_type = other DNA
gcggattttcatctccaccc

SEQ ID NO: 5393 - DNA, 20 bp, synthetic construct
  misc_feature 1..20: note = Description of Artificial Sequence: Synthetic oligonucleotide
  source 1..20: mol_type = other DNA
cggattttcatctccacccg

SEQ ID NO: 5394 - DNA, 20 bp, synthetic construct
  misc_feature 1..20: note = Description of Artificial Sequence: Synthetic oligonucleotide
  source 1..20: mol_type = other DNA
ggattttcatctccacccgt

SEQ ID NO: 5395 - DNA, 20 bp, synthetic construct
  misc_feature 1..20: note = Description of Artificial Sequence: Synthetic oligonucleotide
  source 1..20: mol_type = other DNA
gattttcatctccacccgtt

SEQ ID NO: 5396 - DNA, 20 bp, synthetic construct
  misc_feature 1..20: note = Description of Artificial Sequence: Synthetic oligonucleotide
  source 1..20: mol_type = other DNA
attttcatctccacccgttt

SEQ ID NO: 5397 - DNA, 20 bp, synthetic construct
  misc_feature 1..20: note = Description of Artificial Sequence: Synthetic oligonucleotide
  source 1..20: mol_type = other DNA
ttttcatctccacccgtttg

SEQ ID NO: 5398 - DNA, 20 bp, synthetic construct
  misc_feature 1..20: note = Description of Artificial Sequence: Synthetic oligonucleotide
  source 1..20: mol_type = other DNA
tttcatctccacccgtttga

SEQ ID NO: 5399 - DNA, 20 bp, synthetic construct
  misc_feature 1..20: note = Description of Artificial Sequence: Synthetic oligonucleotide
  source 1..20: mol_type = other DNA
ttcatctccacccgtttgag

SEQ ID NO: 5400 - DNA, 20 bp, synthetic construct
  misc_feature 1..20: note = Description of Artificial Sequence: Synthetic oligonucleotide
  source 1..20: mol_type = other DNA
tcatctccacccgtttgagg

SEQ ID NO: 5401 - DNA, 20 bp, synthetic construct
  misc_feature 1..20: note = Description of Artificial Sequence: Synthetic oligonucleotide
  source 1..20: mol_type = other DNA
catctccacccgtttgaggg

SEQ ID NO: 5402 - DNA, 20 bp, synthetic construct
  misc_feature 1..20: note = Description of Artificial Sequence: Synthetic oligonucleotide
  source 1..20: mol_type = other DNA
atctccacccgtttgaggga

SEQ ID NO: 5403 - DNA, 20 bp, synthetic construct
  misc_feature 1..20: note = Description of Artificial Sequence: Synthetic oligonucleotide
  source 1..20: mol_type = other DNA
tctccacccgtttgagggag

SEQ ID NO: 5404 - DNA, 20 bp, synthetic construct
  misc_feature 1..20: note = Description of Artificial Sequence: Synthetic oligonucleotide
  source 1..20: mol_type = other DNA
ctccacccgtttgagggagt

SEQ ID NO: 5405 - DNA, 20 bp, synthetic construct
  misc_feature 1..20: note = Description of Artificial Sequence: Synthetic oligonucleotide
  source 1..20: mol_type = other DNA
tccacccgtttgagggagta

SEQ ID NO: 5406 - DNA, 20 bp, synthetic construct
  misc_feature 1..20: note = Description of Artificial Sequence: Synthetic oligonucleotide
  source 1..20: mol_type = other DNA
ccacccgtttgagggagtag

SEQ ID NO: 5407 - DNA, 20 bp, synthetic construct
  misc_feature 1..20: note = Description of Artificial Sequence: Synthetic oligonucleotide
  source 1..20: mol_type = other DNA
cacccgtttgagggagtagg

SEQ ID NO: 5408 - DNA, 20 bp, synthetic construct
  misc_feature 1..20: note = Description of Artificial Sequence: Synthetic oligonucleotide
  source 1..20: mol_type = other DNA
acccgtttgagggagtaggt

SEQ ID NO: 5409 - DNA, 20 bp, synthetic construct
  misc_feature 1..20: note = Description of Artificial Sequence: Synthetic oligonucleotide
  source 1..20: mol_type = other DNA
cccgtttgagggagtaggta

SEQ ID NO: 5410 - DNA, 20 bp, synthetic construct
  misc_feature 1..20: note = Description of Artificial Sequence: Synthetic oligonucleotide
  source 1..20: mol_type = other DNA
ccgtttgagggagtaggtag

SEQ ID NO: 5411 - DNA, 20 bp, synthetic construct
  misc_feature 1..20: note = Description of Artificial Sequence: Synthetic oligonucleotide
  source 1..20: mol_type = other DNA
cgtttgagggagtaggtaga

SEQ ID NO: 5412 - DNA, 20 bp, synthetic construct
  misc_feature 1..20: note = Description of Artificial Sequence: Synthetic oligonucleotide
  source 1..20: mol_type = other DNA
gtttgagggagtaggtagat

SEQ ID NO: 5413 - DNA, 20 bp, synthetic construct
  misc_feature 1..20: note = Description of Artificial Sequence: Synthetic oligonucleotide
  source 1..20: mol_type = other DNA
tttgagggagtaggtagatc

SEQ ID NO: 5414 - DNA, 20 bp, synthetic construct
  misc_feature 1..20: note = Description of Artificial Sequence: Synthetic oligonucleotide
  source 1..20: mol_type = other DNA
ttgagggagtaggtagatcc

SEQ ID NO: 5415 - DNA, 20 bp, synthetic construct
  misc_feature 1..20: note = Description of Artificial Sequence: Synthetic oligonucleotide
  source 1..20: mol_type = other DNA
tgagggagtaggtagatcca

SEQ ID NO: 5416 - DNA, 20 bp, synthetic construct
  misc_feature 1..20: note = Description of Artificial Sequence: Synthetic oligonucleotide
  source 1..20: mol_type = other DNA
gagggagtaggtagatccat

SEQ ID NO: 5417 - DNA, 20 bp, synthetic construct
  misc_feature 1..20: note = Description of Artificial Sequence: Synthetic oligonucleotide
  source 1..20: mol_type = other DNA
agggagtaggtagatccatg

SEQ ID NO: 5418 - DNA, 20 bp, synthetic construct
  misc_feature 1..20: note = Description of Artificial Sequence: Synthetic oligonucleotide
  source 1..20: mol_type = other DNA
gggagtaggtagatccatgc

SEQ ID NO: 5419 - DNA, 20 bp, synthetic construct
  misc_feature 1..20: note = Description of Artificial Sequence: Synthetic oligonucleotide
  source 1..20: mol_type = other DNA
ggagtaggtagatccatgcc

SEQ ID NO: 5420 - DNA, 20 bp, synthetic construct
  misc_feature 1..20: note = Description of Artificial Sequence: Synthetic oligonucleotide
  source 1..20: mol_type = other DNA
gagtaggtagatccatgcca

SEQ ID NO: 5421 - DNA, 20 bp, synthetic construct
  misc_feature 1..20: note = Description of Artificial Sequence: Synthetic oligonucleotide
  source 1..20: mol_type = other DNA
agtaggtagatccatgccag

SEQ ID NO: 5422 - DNA, 20 bp, synthetic construct
  misc_feature 1..20: note = Description of Artificial Sequence: Synthetic oligonucleotide
  source 1..20: mol_type = other DNA
gtaggtagatccatgccagc

SEQ ID NO: 5423 - DNA, 20 bp, synthetic construct
  misc_feature 1..20: note = Description of Artificial Sequence: Synthetic oligonucleotide
  source 1..20: mol_type = other DNA
taggtagatccatgccagcc

SEQ ID NO: 5424 - DNA, 20 bp, synthetic construct
  misc_feature 1..20: note = Description of Artificial Sequence: Synthetic oligonucleotide
  source 1..20: mol_type = other DNA
aggtagatccatgccagcca

SEQ ID NO: 5425 - DNA, 20 bp, synthetic construct
  misc_feature 1..20: note = Description of Artificial Sequence: Synthetic oligonucleotide
  source 1..20: mol_type = other DNA
ggtagatccatgccagccat

SEQ ID NO: 5426 - DNA, 20 bp, synthetic construct
  misc_feature 1..20: note = Description of Artificial Sequence: Synthetic oligonucleotide
  source 1..20: mol_type = other DNA
gtagatccatgccagccata

SEQ ID NO: 5427 - DNA, 20 bp, synthetic construct
  misc_feature 1..20: note = Description of Artificial Sequence: Synthetic oligonucleotide
  source 1..20: mol_type = other DNA
tagatccatgccagccatac

SEQ ID NO: 5428 - DNA, 20 bp, synthetic construct
  misc_feature 1..20: note = Description of Artificial Sequence: Synthetic oligonucleotide
  source 1..20: mol_type = other DNA
agatccatgccagccatacc

SEQ ID NO: 5429 - DNA, 20 bp, synthetic construct
  misc_feature 1..20: note = Description of Artificial Sequence: Synthetic oligonucleotide
  source 1..20: mol_type = other DNA
gatccatgccagccatacca

SEQ ID NO: 5430 - DNA, 20 bp, synthetic construct
  misc_feature 1..20: note = Description of Artificial Sequence: Synthetic oligonucleotide
  source 1..20: mol_type = other DNA
atccatgccagccataccag

SEQ ID NO: 5431 - DNA, 20 bp, synthetic construct
  misc_feature 1..20: note = Description of Artificial Sequence: Synthetic oligonucleotide
  source 1..20: mol_type = other DNA
tccatgccagccataccagg

SEQ ID NO: 5432 - DNA, 20 bp, synthetic construct
  misc_feature 1..20: note = Description of Artificial Sequence: Synthetic oligonucleotide
  source 1..20: mol_type = other DNA
ccatgccagccataccaggt

SEQ ID NO: 5433 - DNA, 20 bp, synthetic construct
  misc_feature 1..20: note = Description of Artificial Sequence: Synthetic oligonucleotide
  source 1..20: mol_type = other DNA
catgccagccataccaggtg

SEQ ID NO: 5434 - DNA, 20 bp, synthetic construct
  misc_feature 1..20: note = Description of Artificial Sequence: Synthetic oligonucleotide
  source 1..20: mol_type = other DNA
atgccagccataccaggtga

SEQ ID NO: 5435 - DNA, 20 bp, synthetic construct
  misc_feature 1..20: note = Description of Artificial Sequence: Synthetic oligonucleotide
  source 1..20: mol_type = other DNA
tgccagccataccaggtgat

SEQ ID NO: 5436 - DNA, 20 bp, synthetic construct
  misc_feature 1..20: note = Description of Artificial Sequence: Synthetic oligonucleotide
  source 1..20: mol_type = other DNA
gccagccataccaggtgatg

SEQ ID NO: 5437 - DNA, 20 bp, synthetic construct
  misc_feature 1..20: note = Description of Artificial Sequence: Synthetic oligonucleotide
  source 1..20: mol_type = other DNA
ccagccataccaggtgatgc

SEQ ID NO: 5438 - DNA, 20 bp, synthetic construct
  misc_feature 1..20: note = Description of Artificial Sequence: Synthetic oligonucleotide
  source 1..20: mol_type = other DNA
cagccataccaggtgatgcc

SEQ ID NO: 5439 - DNA, 20 bp, synthetic construct
  misc_feature 1..20: note = Description of Artificial Sequence: Synthetic oligonucleotide
  source 1..20: mol_type = other DNA
agccataccaggtgatgcca

SEQ ID NO: 5440 - DNA, 20 bp, synthetic construct
  misc_feature 1..20: note = Description of Artificial Sequence: Synthetic oligonucleotide
  source 1..20: mol_type = other DNA
gccataccaggtgatgccat

SEQ ID NO: 5441 - DNA, 20 bp, synthetic construct
  misc_feature 1..20: note = Description of Artificial Sequence: Synthetic oligonucleotide
  source 1..20: mol_type = other DNA
ccataccaggtgatgccatc

SEQ ID NO: 5442 - DNA, 20 bp, synthetic construct
  misc_feature 1..20: note = Description of Artificial Sequence: Synthetic oligonucleotide
  source 1..20: mol_type = other DNA
cataccaggtgatgccatcc

SEQ ID NO: 5443 - DNA, 20 bp, synthetic construct
  misc_feature 1..20: note = Description of Artificial Sequence: Synthetic oligonucleotide
  source 1..20: mol_type = other DNA
ataccaggtgatgccatcca

SEQ ID NO: 5444 - DNA, 20 bp, synthetic construct
  misc_feature 1..20: note = Description of Artificial Sequence: Synthetic oligonucleotide
  source 1..20: mol_type = other DNA
taccaggtgatgccatccag

SEQ ID NO: 5445 - DNA, 20 bp, synthetic construct
  misc_feature 1..20: note = Description of Artificial Sequence: Synthetic oligonucleotide
  source 1..20: mol_type = other DNA
accaggtgatgccatccagg

SEQ ID NO: 5446 - DNA, 20 bp, synthetic construct
  misc_feature 1..20: note = Description of Artificial Sequence: Synthetic oligonucleotide
  source 1..20: mol_type = other DNA
ccaggtgatgccatccaggt

SEQ ID NO: 5447 - DNA, 20 bp, synthetic construct
  misc_feature 1..20: note = Description of Artificial Sequence: Synthetic oligonucleotide
  source 1..20: mol_type = other DNA
caggtgatgccatccaggtg

SEQ ID NO: 5448 - DNA, 20 bp, synthetic construct
  misc_feature 1..20: note = Description of Artificial Sequence: Synthetic oligonucleotide
  source 1..20: mol_type = other DNA
aggtgatgccatccaggtgc

SEQ ID NO: 5449 - DNA, 20 bp, synthetic construct
  misc_feature 1..20: note = Description of Artificial Sequence: Synthetic oligonucleotide
  source 1..20: mol_type = other DNA
ggtgatgccatccaggtgct

SEQ ID NO: 5450 - DNA, 20 bp, synthetic construct
  misc_feature 1..20: note = Description of Artificial Sequence: Synthetic oligonucleotide
  source 1..20: mol_type = other DNA
gtgatgccatccaggtgctt

SEQ ID NO: 5451 - DNA, 20 bp, synthetic construct
  misc_feature 1..20: note = Description of Artificial Sequence: Synthetic oligonucleotide
  source 1..20: mol_type = other DNA
tgatgccatccaggtgctta

SEQ ID NO: 5452 - DNA, 20 bp, synthetic construct
  misc_feature 1..20: note = Description of Artificial Sequence: Synthetic oligonucleotide
  source 1..20: mol_type = other DNA
gatgccatccaggtgcttat

SEQ ID NO: 5453 - DNA, 20 bp, synthetic construct
  misc_feature 1..20: note = Description of Artificial Sequence: Synthetic oligonucleotide
  source 1..20: mol_type = other DNA
atgccatccaggtgcttatt

SEQ ID NO: 5454 - DNA, 20 bp, synthetic construct
  misc_feature 1..20: note = Description of Artificial Sequence: Synthetic oligonucleotide
  source 1..20: mol_type = other DNA
tgccatccaggtgcttattg

SEQ ID NO: 5455 - DNA, 20 bp, synthetic construct
  misc_feature 1..20: note = Description of Artificial Sequence: Synthetic oligonucleotide
  source 1..20: mol_type = other DNA
gccatccaggtgcttattgt

SEQ ID NO: 5456 - DNA, 20 bp, synthetic construct
  misc_feature 1..20: note = Description of Artificial Sequence: Synthetic oligonucleotide
  source 1..20: mol_type = other DNA
ccatccaggtgcttattgtg

SEQ ID NO: 5457 - DNA, 20 bp, synthetic construct
  misc_feature 1..20: note = Description of Artificial Sequence: Synthetic oligonucleotide
  source 1..20: mol_type = other DNA
catccaggtgcttattgtgc

SEQ ID NO: 5458 - DNA, 20 bp, synthetic construct
  misc_feature 1..20: note = Description of Artificial Sequence: Synthetic oligonucleotide
  source 1..20: mol_type = other DNA
atccaggtgcttattgtgct

SEQ ID NO: 5459 - DNA, 20 bp, synthetic construct
  misc_feature 1..20: note = Description of Artificial Sequence: Synthetic oligonucleotide
  source 1..20: mol_type = other DNA
tccaggtgcttattgtgctc

SEQ ID NO: 5460 - DNA, 20 bp, synthetic construct
  misc_feature 1..20: note = Description of Artificial Sequence: Synthetic oligonucleotide
  source 1..20: mol_type = other DNA
ccaggtgcttattgtgctca

SEQ ID NO: 5461 - DNA, 20 bp, synthetic construct
  misc_feature 1..20: note = Description of Artificial Sequence: Synthetic oligonucleotide
  source 1..20: mol_type = other DNA
caggtgcttattgtgctcac

SEQ ID NO: 5462 - DNA, 20 bp, synthetic construct
  misc_feature 1..20: note = Description of Artificial Sequence: Synthetic oligonucleotide
  source 1..20: mol_type = other DNA
aggtgcttattgtgctcacc

SEQ ID NO: 5463 - DNA, 20 bp, synthetic construct
  misc_feature 1..20: note = Description of Artificial Sequence: Synthetic oligonucleotide
  source 1..20: mol_type = other DNA
ggtgcttattgtgctcaccc

SEQ ID NO: 5464 - DNA, 20 bp, synthetic construct
  misc_feature 1..20: note = Description of Artificial Sequence: Synthetic oligonucleotide
  source 1..20: mol_type = other DNA
gtgcttattgtgctcaccca

SEQ ID NO: 5465 - DNA, 20 bp, synthetic construct
  misc_feature 1..20: note = Description of Artificial Sequence: Synthetic oligonucleotide
  source 1..20: mol_type = other DNA
tgcttattgtgctcacccag

SEQ ID NO: 5466 - DNA, 20 bp, synthetic construct
  misc_feature 1..20: note = Description of Artificial Sequence: Synthetic oligonucleotide
  source 1..20: mol_type = other DNA
gcttattgtgctcacccagg

SEQ ID NO: 5467 - DNA, 20 bp, synthetic construct
  misc_feature 1..20: note = Description of Artificial Sequence: Synthetic oligonucleotide
  source 1..20: mol_type = other DNA
cttattgtgctcacccaggc

SEQ ID NO: 5468 - DNA, 20 bp, synthetic construct
  misc_feature 1..20: note = Description of Artificial Sequence: Synthetic oligonucleotide
  source 1..20: mol_type = other DNA
ttattgtgctcacccaggcg

SEQ ID NO: 5469 - DNA, 20 bp, synthetic construct
  misc_feature 1..20: note = Description of Artificial Sequence: Synthetic oligonucleotide
  source 1..20: mol_type = other DNA
tattgtgctcacccaggcgg

SEQ ID NO: 5470 - DNA, 20 bp, synthetic construct
  misc_feature 1..20: note = Description of Artificial Sequence: Synthetic oligonucleotide
  source 1..20: mol_type = other DNA
attgtgctcacccaggcggt

SEQ ID NO: 5471 - DNA, 20 bp, synthetic construct
  misc_feature 1..20: note = Description of Artificial Sequence: Synthetic oligonucleotide
  source 1..20: mol_type = other DNA
ttgtgctcacccaggcggta

SEQ ID NO: 5472 - DNA, 20 bp, synthetic construct
  misc_feature 1..20: note = Description of Artificial Sequence: Synthetic oligonucleotide
  source 1..20: mol_type = other DNA
tgtgctcacccaggcggtag

SEQ ID NO: 5473 - DNA, 20 bp, synthetic construct
  misc_feature 1..20: note = Description of Artificial Sequence: Synthetic oligonucleotide
  source 1..20: mol_type = other DNA
gtgctcacccaggcggtagt

SEQ ID NO: 5474 - DNA, 20 bp, synthetic construct
  misc_feature 1..20: note = Description of Artificial Sequence: Synthetic oligonucleotide
  source 1..20: mol_type = other DNA
tgctcacccaggcggtagta

SEQ ID NO: 5475 - DNA, 20 bp, synthetic construct
  misc_feature 1..20: note = Description of Artificial Sequence: Synthetic oligonucleotide
  source 1..20: mol_type = other DNA
gctcacccaggcggtagtac

SEQ ID NO: 5476 - DNA, 20 bp, synthetic construct
  misc_feature 1..20: note = Description of Artificial Sequence: Synthetic oligonucleotide
  source 1..20: mol_type = other DNA
ctcacccaggcggtagtaca

SEQ ID NO: 5477 - DNA, 20 bp, synthetic construct
  misc_feature 1..20: note = Description of Artificial Sequence: Synthetic oligonucleotide
  source 1..20: mol_type = other DNA
tcacccaggcggtagtacac

SEQ ID NO: 5478 - DNA, 20 bp, synthetic construct
  misc_feature 1..20: note = Description of Artificial Sequence: Synthetic oligonucleotide
  source 1..20: mol_type = other DNA
cacccaggcggtagtacact

SEQ ID NO: 5479 - DNA, 20 bp, synthetic construct
  misc_feature 1..20: note = Description of Artificial Sequence: Synthetic oligonucleotide
  source 1..20: mol_type = other DNA
acccaggcggtagtacactc

SEQ ID NO: 5480 - DNA, 20 bp, synthetic construct
  misc_feature 1..20: note = Description of Artificial Sequence: Synthetic oligonucleotide
  source 1..20: mol_type = other DNA
cccaggcggtagtacactcc

SEQ ID NO: 5481 - DNA, 20 bp, synthetic construct
  misc_feature 1..20: note = Description of Artificial Sequence: Synthetic oligonucleotide
  source 1..20: mol_type = other DNA
ccaggcggtagtacactcca

SEQ ID NO: 5482 - DNA, 20 bp, synthetic construct
  misc_feature 1..20: note = Description of Artificial Sequence: Synthetic oligonucleotide
  source 1..20: mol_type = other DNA
caggcggtagtacactccat

SEQ ID NO: 5483 - DNA, 20 bp, synthetic construct
  misc_feature 1..20: note = Description of Artificial Sequence: Synthetic oligonucleotide
  source 1..20: mol_type = other DNA
aggcggtagtacactccatt

SEQ ID NO: 5484 - DNA, 20 bp, synthetic construct
  misc_feature 1..20: note = Description of Artificial Sequence: Synthetic oligonucleotide
  source 1..20: mol_type = other DNA
ggcggtagtacactccattg

SEQ ID NO: 5485 - DNA, 20 bp, synthetic construct
  misc_feature 1..20: note = Description of Artificial Sequence: Synthetic oligonucleotide
  source 1..20: mol_type = other DNA
gcggtagtacactccattga

SEQ ID NO: 5486 - DNA, 20 bp, synthetic construct
  misc_feature 1..20: note = Description of Artificial Sequence: Synthetic oligonucleotide
  source 1..20: mol_type = other DNA
cggtagtacactccattgag

SEQ ID NO: 5487 - DNA, 20 bp, synthetic construct
  misc_feature 1..20: note = Description of Artificial Sequence: Synthetic oligonucleotide
  source 1..20: mol_type = other DNA
ggtagtacactccattgagg

SEQ ID NO: 5488 - DNA, 20 bp, synthetic construct
  misc_feature 1..20: note = Description of Artificial Sequence: Synthetic oligonucleotide
  source 1..20: mol_type = other DNA
gtagtacactccattgaggt

SEQ ID NO: 5489 - DNA, 20 bp, synthetic construct
  misc_feature 1..20: note = Description of Artificial Sequence: Synthetic oligonucleotide
  source 1..20: mol_type = other DNA
tagtacactccattgaggtt

SEQ ID NO: 5490 - DNA, 20 bp, synthetic construct
  misc_feature 1..20: note = Description of Artificial Sequence: Synthetic oligonucleotide
  source 1..20: mol_type = other DNA
agtacactccattgaggttg

SEQ ID NO: 5491 - DNA, 20 bp, synthetic construct
  misc_feature 1..20: note = Description of Artificial Sequence: Synthetic oligonucleotide
  source 1..20: mol_type = other DNA
gtacactccattgaggttgg

SEQ ID NO: 5492 - DNA, 20 bp, synthetic construct
  misc_feature 1..20: note = Description of Artificial Sequence: Synthetic oligonucleotide
  source 1..20: mol_type = other DNA
tacactccattgaggttgga

SEQ ID NO: 5493 - DNA, 20 bp, synthetic construct
  misc_feature 1..20: note = Description of Artificial Sequence: Synthetic oligonucleotide
  source 1..20: mol_type = other DNA
acactccattgaggttggag

SEQ ID NO: 5494 - DNA, 20 bp, synthetic construct
  misc_feature 1..20: note = Description of Artificial Sequence: Synthetic oligonucleotide
  source 1..20: mol_type = other DNA
cactccattgaggttggagt

SEQ ID NO: 5495 - DNA, 20 bp, synthetic construct
  misc_feature 1..20: note = Description of Artificial Sequence: Synthetic oligonucleotide
  source 1..20: mol_type = other DNA
actccattgaggttggagtc

SEQ ID NO: 5496 - DNA, 20 bp, synthetic construct
  misc_feature 1..20: note = Description of Artificial Sequence: Synthetic oligonucleotide
  source 1..20: mol_type = other DNA
ctccattgaggttggagtct

SEQ ID NO: 5497 - DNA, 20 bp, synthetic construct
  misc_feature 1..20: note = Description of Artificial Sequence: Synthetic oligonucleotide
  source 1..20: mol_type = other DNA
tccattgaggttggagtctg

SEQ ID NO: 5498 - DNA, 20 bp, synthetic construct
  misc_feature 1..20: note = Description of Artificial Sequence: Synthetic oligonucleotide
  source 1..20: mol_type = other DNA
ccattgaggttggagtctgt

SEQ ID NO: 5499 - DNA, 20 bp, synthetic construct
  misc_feature 1..20: note = Description of Artificial Sequence: Synthetic oligonucleotide
  source 1..20: mol_type = other DNA
cattgaggttggagtctgtg

SEQ ID NO: 5500 - DNA, 20 bp, synthetic construct
  misc_feature 1..20: note = Description of Artificial Sequence: Synthetic oligonucleotide
  source 1..20: mol_type = other DNA
attgaggttggagtctgtgc

SEQ ID NO: 5501 - DNA, 20 bp, synthetic construct
  misc_feature 1..20: note = Description of Artificial Sequence: Synthetic oligonucleotide
  source 1..20: mol_type = other DNA
ttgaggttggagtctgtgca

SEQ ID NO: 5502 - DNA, 20 bp, synthetic construct
  misc_feature 1..20: note = Description of Artificial Sequence: Synthetic oligonucleotide
  source 1..20: mol_type = other DNA
tgaggttggagtctgtgcag

SEQ ID NO: 5503 - DNA, 20 bp, synthetic construct
  misc_feature 1..20: note = Description of Artificial Sequence: Synthetic oligonucleotide
  source 1..20: mol_type = other DNA
gaggttggagtctgtgcagc

SEQ ID NO: 5504 - DNA, 20 bp, synthetic construct
  misc_feature 1..20: note = Description of Artificial Sequence: Synthetic oligonucleotide
  source 1..20: mol_type = other DNA
aggttggagtctgtgcagca

SEQ ID NO: 5505 - DNA, 20 bp, synthetic construct
  misc_feature 1..20: note = Description of Artificial Sequence: Synthetic oligonucleotide
  source 1..20: mol_type = other DNA
ggttggagtctgtgcagcag

SEQ ID NO: 5506 - DNA, 20 bp, synthetic construct
  misc_feature 1..20: note = Description of Artificial Sequence: Synthetic oligonucleotide
  source 1..20: mol_type = other DNA
gttggagtctgtgcagcagt

SEQ ID NO: 5507 - DNA, 20 bp, synthetic construct
  misc_feature 1..20: note = Description of Artificial Sequence: Synthetic oligonucleotide
  source 1..20: mol_type = other DNA
ttggagtctgtgcagcagtt

SEQ ID NO: 5508 - DNA, 20 bp, synthetic construct
  misc_feature 1..20: note = Description of Artificial Sequence: Synthetic oligonucleotide
  source 1..20: mol_type = other DNA
tggagtctgtgcagcagttg

SEQ ID NO: 5509 - DNA, 20 bp, synthetic construct
  misc_feature 1..20: note = Description of Artificial Sequence: Synthetic oligonucleotide
  source 1..20: mol_type = other DNA
ggagtctgtgcagcagttgt

SEQ ID NO: 5510 - DNA, 20 bp, synthetic construct
  misc_feature 1..20: note = Description of Artificial Sequence: Synthetic oligonucleotide
  source 1..20: mol_type = other DNA
gagtctgtgcagcagttgta

SEQ ID NO: 5511 - DNA, 20 bp, synthetic construct
  misc_feature 1..20: note = Description of Artificial Sequence: Synthetic oligonucleotide
  source 1..20: mol_type = other DNA
agtctgtgcagcagttgtac

SEQ ID NO: 5512 - DNA, 20 bp, synthetic construct
  misc_feature 1..20: note = Description of Artificial Sequence: Synthetic oligonucleotide
  source 1..20: mol_type = other DNA
gtctgtgcagcagttgtacc

SEQ ID NO: 5513 - DNA, 20 bp, synthetic construct
  misc_feature 1..20: note = Description of Artificial Sequence: Synthetic oligonucleotide
  source 1..20: mol_type = other DNA
tctgtgcagcagttgtacca

SEQ ID NO: 5514 - DNA, 20 bp, synthetic construct
  misc_feature 1..20: note = Description of Artificial Sequence: Synthetic oligonucleotide
  source 1..20: mol_type = other DNA
ctgtgcagcagttgtaccag

SEQ ID NO: 5515 - DNA, 20 bp, synthetic construct
  misc_feature 1..20: note = Description of Artificial Sequence: Synthetic oligonucleotide
  source 1..20: mol_type = other DNA
tgtgcagcagttgtaccagt

SEQ ID NO: 5516 - DNA, 20 bp, synthetic construct
  misc_feature 1..20: note = Description of Artificial Sequence: Synthetic oligonucleotide
  source 1..20: mol_type = other DNA
gtgcagcagttgtaccagta

SEQ ID NO: 5517 - DNA, 20 bp, synthetic construct
  misc_feature 1..20: note = Description of Artificial Sequence: Synthetic oligonucleotide
  source 1..20: mol_type = other DNA
tgcagcagttgtaccagtag

SEQ ID NO: 5518 - DNA, 20 bp, synthetic construct
  misc_feature 1..20: note = Description of Artificial Sequence: Synthetic oligonucleotide
  source 1..20: mol_type = other DNA
gcagcagttgtaccagtagc

SEQ ID NO: 5519 - DNA, 20 bp, synthetic construct
  misc_feature 1..20: note = Description of Artificial Sequence: Synthetic oligonucleotide
  source 1..20: mol_type = other DNA
cagcagttgtaccagtagcc

SEQ ID NO: 5520 - DNA, 20 bp, synthetic construct
  misc_feature 1..20: note = Description of Artificial Sequence: Synthetic oligonucleotide
  source 1..20: mol_type = other DNA
agcagttgtaccagtagcca

SEQ ID NO: 5521 - DNA, 20 bp, synthetic construct
  misc_feature 1..20: note = Description of Artificial Sequence: Synthetic oligonucleotide
  source 1..20: mol_type = other DNA
gcagttgtaccagtagccac

SEQ ID NO: 5522 - DNA, 20 bp, synthetic construct
  misc_feature 1..20: note = Description of Artificial Sequence: Synthetic oligonucleotide
  source 1..20: mol_type = other DNA
cagttgtaccagtagccacc

SEQ ID NO: 5523 - DNA, 20 bp, synthetic construct
  misc_feature 1..20: note = Description of Artificial Sequence: Synthetic oligonucleotide
  source 1..20: mol_type = other DNA
agttgtaccagtagccacct

SEQ ID NO: 5524 - DNA, 20 bp, synthetic construct
  misc_feature 1..20: note = Description of Artificial Sequence: Synthetic oligonucleotide
  source 1..20: mol_type = other DNA
gttgtaccagtagccacctg

SEQ ID NO: 5525 - DNA, 20 bp, synthetic construct
  misc_feature 1..20: note = Description of Artificial Sequence: Synthetic oligonucleotide
  source 1..20: mol_type = other DNA
ttgtaccagtagccacctgg

SEQ ID NO: 5526 - DNA, 20 bp, synthetic construct
  misc_feature 1..20: note = Description of Artificial Sequence: Synthetic oligonucleotide
  source 1..20: mol_type = other DNA
tgtaccagtagccacctggc

SEQ ID NO: 5527 - DNA, 20 bp, synthetic construct
  misc_feature 1..20: note = Description of Artificial Sequence: Synthetic oligonucleotide
  source 1..20: mol_type = other DNA
gtaccagtagccacctggca

SEQ ID NO: 5528 - DNA, 20 bp, synthetic construct
  misc_feature 1..20: note = Description of Artificial Sequence: Synthetic oligonucleotide
  source 1..20: mol_type = other DNA
taccagtagccacctggcat

SEQ ID NO: 5529 - DNA, 20 bp, synthetic construct
  misc_feature 1..20: note = Description of Artificial Sequence: Synthetic oligonucleotide
  source 1..20: mol_type = other DNA
accagtagccacctggcatg

SEQ ID NO: 5530 - DNA, 20 bp, synthetic construct
  misc_feature 1..20: note = Description of Artificial Sequence: Synthetic oligonucleotide
  source 1..20: mol_type = other DNA
ccagtagccacctggcatga

SEQ ID NO: 5531 - DNA, 20 bp, synthetic construct
  misc_feature 1..20: note = Description of Artificial Sequence: Synthetic oligonucleotide
  source 1..20: mol_type = other DNA
cagtagccacctggcatgag

SEQ ID NO: 5532 - DNA, 20 bp, synthetic construct
  misc_feature 1..20: note = Description of Artificial Sequence: Synthetic oligonucleotide
  source 1..20: mol_type = other DNA
agtagccacctggcatgaga

SEQ ID NO: 5533 - DNA, 20 bp, synthetic construct
  misc_feature 1..20: note = Description of Artificial Sequence: Synthetic oligonucleotide
  source 1..20: mol_type = other DNA
gtagccacctggcatgagaa

SEQ ID NO: 5534 - DNA, 20 bp, synthetic construct
  misc_feature 1..20: note = Description of Artificial Sequence: Synthetic oligonucleotide
  source 1..20: mol_type = other DNA
tagccacctggcatgagaaa

SEQ ID NO: 5535 - DNA, 20 bp, synthetic construct
  misc_feature 1..20: note = Description of Artificial Sequence: Synthetic oligonucleotide
  source 1..20: mol_type = other DNA
agccacctggcatgagaaac

SEQ ID NO: 5536 - DNA, 20 bp, synthetic construct
  misc_feature 1..20: note = Description of Artificial Sequence: Synthetic oligonucleotide
  source 1..20: mol_type = other DNA
gccacctggcatgagaaaca

SEQ ID NO: 5537 - DNA, 20 bp, synthetic construct
  misc_feature 1..20: note = Description of Artificial Sequence: Synthetic oligonucleotide
  source 1..20: mol_type = other DNA
ccacctggcatgagaaacag

SEQ ID NO: 5538 - DNA, 20 bp, synthetic construct
  misc_feature 1..20: note = Description of Artificial Sequence: Synthetic oligonucleotide
  source 1..20: mol_type = other DNA
cacctggcatgagaaacaga

SEQ ID NO: 5539 - DNA, 20 bp, synthetic construct
  misc_feature 1..20: note = Description of Artificial Sequence: Synthetic oligonucleotide
  source 1..20: mol_type = other DNA
acctggcatgagaaacagac

SEQ ID NO: 5540 - DNA, 20 bp, synthetic construct
  misc_feature 1..20: note = Description of Artificial Sequence: Synthetic oligonucleotide
  source 1..20: mol_type = other DNA
cctggcatgagaaacagacc

SEQ ID NO: 5541 - DNA, 20 bp, synthetic construct
  misc_feature 1..20: note = Description of Artificial Sequence: Synthetic oligonucleotide
  source 1..20: mol_type = other DNA
ctggcatgagaaacagaccc

SEQ ID NO: 5542 - DNA, 20 bp, synthetic construct
  misc_feature 1..20: note = Description of Artificial Sequence: Synthetic oligonucleotide
  source 1..20: mol_type = other DNA
tggcatgagaaacagaccca

SEQ ID NO: 5543 - DNA, 20 bp, synthetic construct
  misc_feature 1..20: note = Description of Artificial Sequence: Synthetic oligonucleotide
  source 1..20: mol_type = other DNA
ggcatgagaaacagacccag

SEQ ID NO: 5544 - DNA, 20 bp, synthetic construct
  misc_feature 1..20: note = Description of Artificial Sequence: Synthetic oligonucleotide
  source 1..20: mol_type = other DNA
gcatgagaaacagacccagt

SEQ ID NO: 5545 - DNA, 20 bp, synthetic construct
  misc_feature 1..20: note = Description of Artificial Sequence: Synthetic oligonucleotide
  source 1..20: mol_type = other DNA
catgagaaacagacccagtg

SEQ ID NO: 5546 - DNA, 20 bp, synthetic construct
  misc_feature 1..20: note = Description of Artificial Sequence: Synthetic oligonucleotide
  source 1..20: mol_type = other DNA
atgagaaacagacccagtgc

SEQ ID NO: 5547 - DNA, 20 bp, synthetic construct
  misc_feature 1..20: note = Description of Artificial Sequence: Synthetic oligonucleotide
  source 1..20: mol_type = other DNA
tgagaaacagacccagtgct

SEQ ID NO: 5548 - DNA, 20 bp, synthetic construct
  misc_feature 1..20: note = Description of Artificial Sequence: Synthetic oligonucleotide
  source 1..20: mol_type = other DNA
gagaaacagacccagtgcta

SEQ ID NO: 5549 - DNA, 20 bp, synthetic construct
  misc_feature 1..20: note = Description of Artificial Sequence: Synthetic oligonucleotide
  source 1..20: mol_type = other DNA
agaaacagacccagtgctag

SEQ ID NO: 5550 - DNA, 20 bp, synthetic construct
  misc_feature 1..20: note = Description of Artificial Sequence: Synthetic oligonucleotide
  source 1..20: mol_type = other DNA
gaaacagacccagtgctagt

SEQ ID NO: 5551 - DNA, 20 bp, synthetic construct
  misc_feature 1..20: note = Description of Artificial Sequence: Synthetic oligonucleotide
  source 1..20: mol_type = other DNA
aaacagacccagtgctagta

SEQ ID NO: 5552 - DNA, 20 bp, synthetic construct
  misc_feature 1..20: note = Description of Artificial Sequence: Synthetic oligonucleotide
  source 1..20: mol_type = other DNA
aacagacccagtgctagtaa

SEQ ID NO: 5553 - DNA, 20 bp, synthetic construct
  misc_feature 1..20: note = Description of Artificial Sequence: Synthetic oligonucleotide
  source 1..20: mol_type = other DNA
acagacccagtgctagtaag

SEQ ID NO: 5554 - DNA, 20 bp, synthetic construct
  misc_feature 1..20: note = Description of Artificial Sequence: Synthetic oligonucleotide
  source 1..20: mol_type = other DNA
cagacccagtgctagtaagt

SEQ ID NO: 5555 - DNA, 20 bp, synthetic construct
  misc_feature 1..20: note = Description of Artificial Sequence: Synthetic oligonucleotide
  source 1..20: mol_type = other DNA
agacccagtgctagtaagtt

SEQ ID NO: 5556 - DNA, 20 bp, synthetic construct
  misc_feature 1..20: note = Description of Artificial Sequence: Synthetic oligonucleotide
  source 1..20: mol_type = other DNA
gacccagtgctagtaagttg

SEQ ID NO: 5557 - DNA, 20 bp, synthetic construct
  misc_feature 1..20: note = Description of Artificial Sequence: Synthetic oligonucleotide
  source 1..20: mol_type = other DNA
acccagtgctagtaagttga

SEQ ID NO: 5558 - DNA, 20 bp, synthetic construct
  misc_feature 1..20: note = Description of Artificial Sequence: Synthetic oligonucleotide
  source 1..20: mol_type = other DNA
cccagtgctagtaagttgac

SEQ ID NO: 5559 - DNA, 20 bp, synthetic construct
  misc_feature 1..20: note = Description of Artificial Sequence: Synthetic oligonucleotide
  source 1..20: mol_type = other DNA
ccagtgctagtaagttgact

SEQ ID NO: 5560 - DNA, 20 bp, synthetic construct
  misc_feature 1..20: note = Description of Artificial Sequence: Synthetic oligonucleotide
  source 1..20: mol_type = other DNA
cagtgctagtaagttgactg

SEQ ID NO: 5561 - DNA, 20 bp, synthetic construct
  misc_feature 1..20: note = Description of Artificial Sequence: Synthetic oligonucleotide
  source 1..20: mol_type = other DNA
agtgctagtaagttgactgt

SEQ ID NO: 5562 - DNA, 20 bp, synthetic construct
  misc_feature 1..20: note = Description of Artificial Sequence: Synthetic oligonucleotide
  source 1..20: mol_type = other DNA
gtgctagtaagttgactgtg

SEQ ID NO: 5563 - DNA, 20 bp, synthetic construct
  misc_feature 1..20: note = Description of Artificial Sequence: Synthetic oligonucleotide
  source 1..20: mol_type = other DNA
tgctagtaagttgactgtga

SEQ ID NO: 5564 - DNA, 20 bp, synthetic construct
  misc_feature 1..20: note = Description of Artificial Sequence: Synthetic oligonucleotide
  source 1..20: mol_type = other DNA
gctagtaagttgactgtgat

SEQ ID NO: 5565 - DNA, 20 bp, synthetic construct
  misc_feature 1..20: note = Description of Artificial Sequence: Synthetic oligonucleotide
  source 1..20: mol_type = other DNA
ctagtaagttgactgtgata

SEQ ID NO: 5566 - DNA, 20 bp, synthetic construct
  misc_feature 1..20: note = Description of Artificial Sequence: Synthetic oligonucleotide
  source 1..20: mol_type = other DNA
tagtaagttgactgtgatag

SEQ ID NO: 5567 - DNA, 20 bp, synthetic construct
  misc_feature 1..20: note = Description of Artificial Sequence: Synthetic oligonucleotide
  source 1..20: mol_type = other DNA
agtaagttgactgtgataga

SEQ ID NO: 5568 - DNA, 20 bp, synthetic construct
  misc_feature 1..20: note = Description of Artificial Sequence: Synthetic oligonucleotide
  source 1..20: mol_type = other DNA
gtaagttgactgtgatagac

SEQ ID NO: 5569 - DNA, 20 bp, synthetic construct
  misc_feature 1..20: note = Description of Artificial Sequence: Synthetic oligonucleotide
  source 1..20: mol_type = other DNA
taagttgactgtgatagacc

SEQ ID NO: 5570 - DNA, 20 bp, synthetic construct
  misc_feature 1..20: note = Description of Artificial Sequence: Synthetic oligonucleotide
  source 1..20: mol_type = other DNA
aagttgactgtgatagacca

SEQ ID NO: 5571 - DNA, 20 bp, synthetic construct
  misc_feature 1..20: note = Description of Artificial Sequence: Synthetic oligonucleotide
  source 1..20: mol_type = other DNA
agttgactgtgatagaccag

SEQ ID NO: 5572 - DNA, 20 bp, synthetic construct
  misc_feature 1..20: note = Description of Artificial Sequence: Synthetic oligonucleotide
  source 1..20: mol_type = other DNA
gttgactgtgatagaccaga

SEQ ID NO: 5573 - DNA, 20 bp, synthetic construct
  misc_feature 1..20: note = Description of Artificial Sequence: Synthetic oligonucleotide
  source 1..20: mol_type = other DNA
ttgactgtgatagaccagac

SEQ ID NO: 5574 - DNA, 20 bp, synthetic construct
  misc_feature 1..20: note = Description of Artificial Sequence: Synthetic oligonucleotide
  source 1..20: mol_type = other DNA
tgactgtgatagaccagaca

SEQ ID NO: 5575 - DNA, 20 bp, synthetic construct
  misc_feature 1..20: note = Description of Artificial Sequence: Synthetic oligonucleotide
  source 1..20: mol_type = other DNA
gactgtgatagaccagacat

SEQ ID NO: 5576 - DNA, 20 bp, synthetic construct
  misc_feature 1..20: note = Description of Artificial Sequence: Synthetic oligonucleotide
  source 1..20: mol_type = other DNA
actgtgatagaccagacatc

SEQ ID NO: 5577 - DNA, 20 bp, synthetic construct
  misc_feature 1..20: note = Description of Artificial Sequence: Synthetic oligonucleotide
  source 1..20: mol_type = other DNA
ctgtgatagaccagacatca

SEQ ID NO: 5578 - DNA, 20 bp, synthetic construct
  misc_feature 1..20: note = Description of Artificial Sequence: Synthetic oligonucleotide
  source 1..20: mol_type = other DNA
tgtgatagaccagacatcag

SEQ ID NO: 5579 - DNA, 20 bp, synthetic construct
  misc_feature 1..20: note = Description of Artificial Sequence: Synthetic oligonucleotide
  source 1..20: mol_type = other DNA
gtgatagaccagacatcagg

SEQ ID NO: 5580 - DNA, 20 bp, synthetic construct
  misc_feature 1..20: note = Description of Artificial Sequence: Synthetic oligonucleotide
  source 1..20: mol_type = other DNA
tgatagaccagacatcaggt

SEQ ID NO: 5581 - DNA, 20 bp, synthetic construct
  misc_feature 1..20: note = Description of Artificial Sequence: Synthetic oligonucleotide
  source 1..20: mol_type = other DNA
gatagaccagacatcaggta

SEQ ID NO: 5582 - DNA, 20 bp, synthetic construct
  misc_feature 1..20: note = Description of Artificial Sequence: Synthetic oligonucleotide
  source 1..20: mol_type = other DNA
atagaccagacatcaggtaa

SEQ ID NO: 5583 - DNA, 20 bp, synthetic construct
  misc_feature 1..20: note = Description of Artificial Sequence: Synthetic oligonucleotide
  source 1..20: mol_type = other DNA
tagaccagacatcaggtaag

SEQ ID NO: 5584 - DNA, 20 bp, synthetic construct
  misc_feature 1..20: note = Description of Artificial Sequence: Synthetic oligonucleotide
  source 1..20: mol_type = other DNA
agaccagacatcaggtaagg

SEQ ID NO: 5585 - DNA, 20 bp, synthetic construct
  misc_feature 1..20: note = Description of Artificial Sequence: Synthetic oligonucleotide
  source 1..20: mol_type = other DNA
gaccagacatcaggtaagga

SEQ ID NO: 5586 - DNA, 20 bp, synthetic construct
  misc_feature 1..20: note = Description of Artificial Sequence: Synthetic oligonucleotide
  source 1..20: mol_type = other DNA
accagacatcaggtaaggag

SEQ ID NO: 5587 - DNA, 20 bp, synthetic construct
  misc_feature 1..20: note = Description of Artificial Sequence: Synthetic oligonucleotide
  source 1..20: mol_type = other DNA
ccagacatcaggtaaggagt

SEQ ID NO: 5588 - DNA, 20 bp, synthetic construct
  misc_feature 1..20: note = Description of Artificial Sequence: Synthetic oligonucleotide
  source 1..20: mol_type = other DNA
cagacatcaggtaaggagtt

SEQ ID NO: 5589 - DNA, 20 bp, synthetic construct
  misc_feature 1..20: note = Description of Artificial Sequence: Synthetic oligonucleotide
  source 1..20: mol_type = other DNA
agacatcaggtaaggagtta

SEQ ID NO: 5590 - DNA, 20 bp, synthetic construct
  misc_feature 1..20: note = Description of Artificial Sequence: Synthetic oligonucleotide
  source 1..20: mol_type = other DNA
gacatcaggtaaggagttag

SEQ ID NO: 5591 - DNA, 20 bp, synthetic construct
  misc_feature 1..20: note = Description of Artificial Sequence: Synthetic oligonucleotide
  source 1..20: mol_type = other DNA
acatcaggtaaggagttaga

SEQ ID NO: 5592 - DNA, 20 bp, synthetic construct
  misc_feature 1..20: note = Description of Artificial Sequence: Synthetic oligonucleotide
  source 1..20: mol_type = other DNA
catcaggtaaggagttagag

SEQ ID NO: 5593 - DNA, 20 bp, synthetic construct
  misc_feature 1..20: note = Description of Artificial Sequence: Synthetic oligonucleotide
  source 1..20: mol_type = other DNA
atcaggtaaggagttagagc

SEQ ID NO: 5594 - DNA, 20 bp, synthetic construct
  misc_feature 1..20: note = Description of Artificial Sequence: Synthetic oligonucleotide
  source 1..20: mol_type = other DNA
tcaggtaaggagttagagcc

SEQ ID NO: 5595 - DNA, 20 bp, synthetic construct
  misc_feature 1..20: note = Description of Artificial Sequence: Synthetic oligonucleotide
  source 1..20: mol_type = other DNA
caggtaaggagttagagcca

SEQ ID NO: 5596 - DNA, 20 bp, synthetic construct
  misc_feature 1..20: note = Description of Artificial Sequence: Synthetic oligonucleotide
  source 1..20: mol_type = other DNA
aggtaaggagttagagccag

SEQ ID NO: 5597 - DNA, 20 bp, synthetic construct
  misc_feature 1..20: note = Description of Artificial Sequence: Synthetic oligonucleotide
  source 1..20: mol_type = other DNA
ggtaaggagttagagccagg

SEQ ID NO: 5598 - DNA, 20 bp, synthetic construct
  misc_feature 1..20: note = Description of Artificial Sequence: Synthetic oligonucleotide
  source 1..20: mol_type = other DNA
gtaaggagttagagccaggg

SEQ ID NO: 5599 - DNA, 20 bp, synthetic construct
  misc_feature 1..20: note = Description of Artificial Sequence: Synthetic oligonucleotide
  source 1..20: mol_type = other DNA
taaggagttagagccagggt

SEQ ID NO: 5600 - DNA, 20 bp, synthetic construct
  misc_feature 1..20: note = Description of Artificial Sequence: Synthetic oligonucleotide
  source 1..20: mol_type = other DNA
aaggagttagagccagggtc

SEQ ID NO: 5601 - DNA, 20 bp, synthetic construct
  misc_feature 1..20: note = Description of Artificial Sequence: Synthetic oligonucleotide
  source 1..20: mol_type = other DNA
aggagttagagccagggtca

SEQ ID NO: 5602 - DNA, 20 bp, synthetic construct
  misc_feature 1..20: note = Description of Artificial Sequence: Synthetic oligonucleotide
  source 1..20: mol_type = other DNA
ggagttagagccagggtcag

SEQ ID NO: 5603 - DNA, 20 bp, synthetic construct
  misc_feature 1..20: note = Description of Artificial Sequence: Synthetic oligonucleotide
  source 1..20: mol_type = other DNA
gagttagagccagggtcaga

SEQ ID NO: 5604 - DNA, 20 bp, synthetic construct
  misc_feature 1..20: note = Description of Artificial Sequence: Synthetic oligonucleotide
  source 1..20: mol_type = other DNA
agttagagccagggtcagaa

SEQ ID NO: 5605 - DNA, 20 bp, synthetic construct
  misc_feature 1..20: note = Description of Artificial Sequence: Synthetic oligonucleotide
  source 1..20: mol_type = other DNA
gttagagccagggtcagaaa

SEQ ID NO: 5606 - DNA, 20 bp, synthetic construct
  misc_feature 1..20: note = Description of Artificial Sequence: Synthetic oligonucleotide
  source 1..20: mol_type = other DNA
ttagagccagggtcagaaag

SEQ ID NO: 5607 - DNA, 20 bp, synthetic construct
  misc_feature 1..20: note = Description of Artificial Sequence: Synthetic oligonucleotide
  source 1..20: mol_type = other DNA
tagagccagggtcagaaaga

SEQ ID NO: 5608 - DNA, 20 bp, synthetic construct
  misc_feature 1..20: note = Description of Artificial Sequence: Synthetic oligonucleotide
  source 1..20: mol_type = other DNA
agagccagggtcagaaagaa

SEQ ID NO: 5609 - DNA, 20 bp, synthetic construct
  misc_feature 1..20: note = Description of Artificial Sequence: Synthetic oligonucleotide
  source 1..20: mol_type = other DNA
gagccagggtcagaaagaat

SEQ ID NO: 5610 - DNA, 20 bp, synthetic construct
  misc_feature 1..20: note = Description of Artificial Sequence: Synthetic oligonucleotide
  source 1..20: mol_type = other DNA
agccagggtcagaaagaata

SEQ ID NO: 5611 - DNA, 20 bp, synthetic construct
  misc_feature 1..20: note = Description of Artificial Sequence: Synthetic oligonucleotide
  source 1..20: mol_type = other DNA
gccagggtcagaaagaatac

SEQ ID NO: 5612 - DNA, 20 bp, synthetic construct
  misc_feature 1..20: note = Description of Artificial Sequence: Synthetic oligonucleotide
  source 1..20: mol_type = other DNA
ccagggtcagaaagaatacc

SEQ ID NO: 5613 - DNA, 20 bp, synthetic construct
  misc_feature 1..20: note = Description of Artificial Sequence: Synthetic oligonucleotide
  source 1..20: mol_type = other DNA
cagggtcagaaagaatacca

SEQ ID NO: 5614 - DNA, 20 bp, synthetic construct
  misc_feature 1..20: note = Description of Artificial Sequence: Synthetic oligonucleotide
  source 1..20: mol_type = other DNA
agggtcagaaagaataccaa

SEQ ID NO: 5615 - DNA, 20 bp, synthetic construct
  misc_feature 1..20: note = Description of Artificial Sequence: Synthetic oligonucleotide
  source 1..20: mol_type = other DNA
gggtcagaaagaataccaaa

SEQ ID NO: 5616 - DNA, 20 bp, synthetic construct
  misc_feature 1..20: note = Description of Artificial Sequence: Synthetic oligonucleotide
  source 1..20: mol_type = other DNA
ggtcagaaagaataccaaaa

SEQ ID NO: 5617 - DNA, 20 bp, synthetic construct
  misc_feature 1..20: note = Description of Artificial Sequence: Synthetic oligonucleotide
  source 1..20: mol_type = other DNA
gtcagaaagaataccaaaac

SEQ ID NO: 5618 - DNA, 20 bp, synthetic construct
  misc_feature 1..20: note = Description of Artificial Sequence: Synthetic oligonucleotide
  source 1..20: mol_type = other DNA
tcagaaagaataccaaaacc

SEQ ID NO: 5619 - DNA, 20 bp, synthetic construct
  misc_feature 1..20: note = Description of Artificial Sequence: Synthetic oligonucleotide
  source 1..20: mol_type = other DNA
cagaaagaataccaaaaccg

SEQ ID NO: 5620 - DNA, 20 bp, synthetic construct
  misc_feature 1..20: note = Description of Artificial Sequence: Synthetic oligonucleotide
  source 1..20: mol_type = other DNA
agaaagaataccaaaaccgg

SEQ ID NO: 5621 - DNA, 20 bp, synthetic construct
  misc_feature 1..20: note = Description of Artificial Sequence: Synthetic oligonucleotide
  source 1..20: mol_type = other DNA
gaaagaataccaaaaccgga

SEQ ID NO: 5622 - DNA, 20 bp, synthetic construct
  misc_feature 1..20: note = Description of Artificial Sequence: Synthetic oligonucleotide
  source 1..20: mol_type = other DNA
aaagaataccaaaaccggaa

SEQ ID NO: 5623 - DNA, 20 bp, synthetic construct
  misc_feature 1..20: note = Description of Artificial Sequence: Synthetic oligonucleotide
  source 1..20: mol_type = other DNA
aagaataccaaaaccggaat

SEQ ID NO: 5624 - DNA, 20 bp, synthetic construct
  misc_feature 1..20: note = Description of Artificial Sequence: Synthetic oligonucleotide
  source 1..20: mol_type = other DNA
agaataccaaaaccggaata

SEQ ID NO: 5625 - DNA, 20 bp, synthetic construct
  misc_feature 1..20: note = Description of Artificial Sequence: Synthetic oligonucleotide
  source 1..20: mol_type = other DNA
gaataccaaaaccggaatat

SEQ ID NO: 5626 - DNA, 20 bp, synthetic construct
  misc_feature 1..20: note = Description of Artificial Sequence: Synthetic oligonucleotide
  source 1..20: mol_type = other DNA
aataccaaaaccggaatatc

SEQ ID NO: 5627 - DNA, 20 bp, synthetic construct
  misc_feature 1..20: note = Description of Artificial Sequence: Synthetic oligonucleotide
  source 1..20: mol_type = other DNA
ataccaaaaccggaatatca

SEQ ID NO: 5628 - DNA, 20 bp, synthetic construct
  misc_feature 1..20: note = Description of Artificial Sequence: Synthetic oligonucleotide
  source 1..20: mol_type = other DNA
taccaaaaccggaatatcaa

SEQ ID NO: 5629 - DNA, 20 bp, synthetic construct
  misc_feature 1..20: note = Description of Artificial Sequence: Synthetic oligonucleotide
  source 1..20: mol_type = other DNA
accaaaaccggaatatcaac

SEQ ID NO: 5630 - DNA, 20 bp, synthetic construct
  misc_feature 1..20: note = Description of Artificial Sequence: Synthetic oligonucleotide
  source 1..20: mol_type = other DNA
ccaaaaccggaatatcaact

SEQ ID NO: 5631 - DNA, 20 bp, synthetic construct
  misc_feature 1..20: note = Description of Artificial Sequence: Synthetic oligonucleotide
  source 1..20: mol_type = other DNA
caaaaccggaatatcaactg

SEQ ID NO: 5632 - DNA, 20 bp, synthetic construct
  misc_feature 1..20: note = Description of Artificial Sequence: Synthetic oligonucleotide
  source 1..20: mol_type = other DNA
aaaaccggaatatcaactgt

SEQ ID NO: 5633 - DNA, 20 bp, synthetic construct
  misc_feature 1..20: note = Description of Artificial Sequence: Synthetic oligonucleotide
  source 1..20: mol_type = other DNA
aaaccggaatatcaactgta

SEQ ID NO: 5634 - DNA, 20 bp, synthetic construct
  misc_feature 1..20: note = Description of Artificial Sequence: Synthetic oligonucleotide
  source 1..20: mol_type = other DNA
aaccggaatatcaactgtac

SEQ ID NO: 5635 - DNA, 20 bp, synthetic construct
  misc_feature 1..20: note = Description of Artificial Sequence: Synthetic oligonucleotide
  source 1..20: mol_type = other DNA
accggaatatcaactgtaca

SEQ ID NO: 5636 - DNA, 20 bp, synthetic construct
  misc_feature 1..20: note = Description of Artificial Sequence: Synthetic oligonucleotide
  source 1..20: mol_type = other DNA
ccggaatatcaactgtacag

SEQ ID NO: 5637 - DNA, 20 bp, synthetic construct
  misc_feature 1..20: note = Description of Artificial Sequence: Synthetic oligonucleotide
  source 1..20: mol_type = other DNA
cggaatatcaactgtacagt

SEQ ID NO: 5638 - DNA, 20 bp, synthetic construct
  misc_feature 1..20: note = Description of Artificial Sequence: Synthetic oligonucleotide
  source 1..20: mol_type = other DNA
ggaatatcaactgtacagtt

SEQ ID NO: 5639 - DNA, 20 bp, synthetic construct
  misc_feature 1..20: note = Description of Artificial Sequence: Synthetic oligonucleotide
  source 1..20: mol_type = other DNA
gaatatcaactgtacagtta

SEQ ID NO: 5640 - DNA, 20 bp, synthetic construct
  misc_feature 1..20: note = Description of Artificial Sequence: Synthetic oligonucleotide
  source 1..20: mol_type = other DNA
aatatcaactgtacagttat

SEQ ID NO: 5641 - DNA, 20 bp, synthetic construct
  misc_feature 1..20: note = Description of Artificial Sequence: Synthetic oligonucleotide
  source 1..20: mol_type = other DNA
atatcaactgtacagttata

SEQ ID NO: 5642 - DNA, 20 bp, synthetic construct
  misc_feature 1..20: note = Description of Artificial Sequence: Synthetic oligonucleotide
  source 1..20: mol_type = other DNA
tatcaactgtacagttataa

SEQ ID NO: 5643 - DNA, 20 bp, synthetic construct
  misc_feature 1..20: note = Description of Artificial Sequence: Synthetic oligonucleotide
  source 1..20: mol_type = other DNA
atcaactgtacagttataat

SEQ ID NO: 5644 - DNA, 20 bp, synthetic construct
  misc_feature 1..20: note = Description of Artificial Sequence: Synthetic oligonucleotide
  source 1..20: mol_type = other DNA
tcaactgtacagttataatt

SEQ ID NO: 5645 - DNA, 20 bp, synthetic construct
  misc_feature 1..20: note = Description of Artificial Sequence: Synthetic oligonucleotide
  source 1..20: mol_type = other DNA
caactgtacagttataattc

SEQ ID NO: 5646 - DNA, 20 bp, synthetic construct
  misc_feature 1..20: note = Description of Artificial Sequence: Synthetic oligonucleotide
  source 1..20: mol_type = other DNA
aactgtacagttataattca

SEQ ID NO: 5647 - DNA, 20 bp, synthetic construct
  misc_feature 1..20: note = Description of Artificial Sequence: Synthetic oligonucleotide
  source 1..20: mol_type = other DNA
actgtacagttataattcac

SEQ ID NO: 5648 - DNA, 20 bp, synthetic construct
  misc_feature 1..20: note = Description of Artificial Sequence: Synthetic oligonucleotide
  source 1..20: mol_type = other DNA
ctgtacagttataattcact

SEQ ID NO: 5649 - DNA, 20 bp, synthetic construct
  misc_feature 1..20: note = Description of Artificial Sequence: Synthetic oligonucleotide
  source 1..20: mol_type = other DNA
tgtacagttataattcactc

SEQ ID NO: 5650 - DNA, 20 bp, synthetic construct
  misc_feature 1..20: note = Description of Artificial Sequence: Synthetic oligonucleotide
  source 1..20: mol_type = other DNA
gtacagttataattcactct

SEQ ID NO: 5651 - DNA, 20 bp, synthetic construct
  misc_feature 1..20: note = Description of Artificial Sequence: Synthetic oligonucleotide
  source 1..20: mol_type = other DNA
tacagttataattcactctt

SEQ ID NO: 5652 - DNA, 20 bp, synthetic construct
  misc_feature 1..20: note = Description of Artificial Sequence: Synthetic oligonucleotide
  source 1..20: mol_type = other DNA
acagttataattcactcttt

SEQ ID NO: 5653 - DNA, 20 bp, synthetic construct
  misc_feature 1..20: note = Description of Artificial Sequence: Synthetic oligonucleotide
  source 1..20: mol_type = other DNA
cagttataattcactctttc

SEQ ID NO: 5654 - DNA, 20 bp, synthetic construct
  misc_feature 1..20: note = Description of Artificial Sequence: Synthetic oligonucleotide
  source 1..20: mol_type = other DNA
agttataattcactctttct

SEQ ID NO: 5655 - DNA, 20 bp, synthetic construct
  misc_feature 1..20: note = Description of Artificial Sequence: Synthetic oligonucleotide
  source 1..20: mol_type = other DNA
gttataattcactctttctc

SEQ ID NO: 5656 - DNA, 20 bp, synthetic construct
  misc_feature 1..20: note = Description of Artificial Sequence: Synthetic oligonucleotide
  source 1..20: mol_type = other DNA
ttataattcactctttctcc

SEQ ID NO: 5657 - DNA, 20 bp, synthetic construct
  misc_feature 1..20: note = Description of Artificial Sequence: Synthetic oligonucleotide
  source 1..20: mol_type = other DNA
tataattcactctttctcct

SEQ ID NO: 5658 - DNA, 20 bp, synthetic construct
  misc_feature 1..20: note = Description of Artificial Sequence: Synthetic oligonucleotide
  source 1..20: mol_type = other DNA
ataattcactctttctcctc

SEQ ID NO: 5659 - DNA, 20 bp, synthetic construct
  misc_feature 1..20: note = Description of Artificial Sequence: Synthetic oligonucleotide
  source 1..20: mol_type = other DNA
taattcactctttctcctca

SEQ ID NO: 5660 - DNA, 20 bp, synthetic construct
  misc_feature 1..20: note = Description of Artificial Sequence: Synthetic oligonucleotide
  source 1..20: mol_type = other DNA
aattcactctttctcctcaa

SEQ ID NO: 5661 - DNA, 20 bp, synthetic construct
  misc_feature 1..20: note = Description of Artificial Sequence: Synthetic oligonucleotide
  source 1..20: mol_type = other DNA
attcactctttctcctcaag

SEQ ID NO: 5662 - DNA, 20 bp, synthetic construct
  misc_feature 1..20: note = Description of Artificial Sequence: Synthetic oligonucleotide
  source 1..20: mol_type = other DNA
ttcactctttctcctcaagt

SEQ ID NO: 5663 - DNA, 20 bp, synthetic construct
  misc_feature 1..20: note = Description of Artificial Sequence: Synthetic oligonucleotide
  source 1..20: mol_type = other DNA
tcactctttctcctcaagtg

SEQ ID NO: 5664 - DNA, 20 bp, synthetic construct
  misc_feature 1..20: note = Description of Artificial Sequence: Synthetic oligonucleotide
  source 1..20: mol_type = other DNA
cactctttctcctcaagtgg

SEQ ID NO: 5665 - DNA, 20 bp, synthetic construct
  misc_feature 1..20: note = Description of Artificial Sequence: Synthetic oligonucleotide
  source 1..20: mol_type = other DNA
actctttctcctcaagtggg

SEQ ID NO: 5666 - DNA, 20 bp, synthetic construct
  misc_feature 1..20: note = Description of Artificial Sequence: Synthetic oligonucleotide
  source 1..20: mol_type = other DNA
ctctttctcctcaagtggga

SEQ ID NO: 5667 - DNA, 20 bp, synthetic construct
  misc_feature 1..20: note = Description of Artificial Sequence: Synthetic oligonucleotide
  source 1..20: mol_type = other DNA
tctttctcctcaagtgggat

SEQ ID NO: 5668 - DNA, 20 bp, synthetic construct
  misc_feature 1..20: note = Description of Artificial Sequence: Synthetic oligonucleotide
  source 1..20: mol_type = other DNA
ctttctcctcaagtgggatt

SEQ ID NO: 5669 - DNA, 20 bp, synthetic construct
  misc_feature 1..20: note = Description of Artificial Sequence: Synthetic oligonucleotide
  source 1..20: mol_type = other DNA
tttctcctcaagtgggatta

SEQ ID NO: 5670 - DNA, 20 bp, synthetic construct
  misc_feature 1..20: note = Description of Artificial Sequence: Synthetic oligonucleotide
  source 1..20: mol_type = other DNA
ttctcctcaagtgggattat

SEQ ID NO: 5671 - DNA, 20 bp, synthetic construct
  misc_feature 1..20: note = Description of Artificial Sequence: Synthetic oligonucleotide
  source 1..20: mol_type = other DNA
tctcctcaagtgggattatg

SEQ ID NO: 5672 - DNA, 20 bp, synthetic construct
  misc_feature 1..20: note = Description of Artificial Sequence: Synthetic oligonucleotide
  source 1..20: mol_type = other DNA
ctcctcaagtgggattatga

SEQ ID NO: 5673 - DNA, 20 bp, synthetic construct
  misc_feature 1..20: note = Description of Artificial Sequence: Synthetic oligonucleotide
  source 1..20: mol_type = other DNA
tcctcaagtgggattatgag

SEQ ID NO: 5674 - DNA, 20 bp, synthetic construct
  misc_feature 1..20: note = Description of Artificial Sequence: Synthetic oligonucleotide
  source 1..20: mol_type = other DNA
cctcaagtgggattatgagc

SEQ ID NO: 5675 - DNA, 20 bp, synthetic construct
  misc_feature 1..20: note = Description of Artificial Sequence: Synthetic oligonucleotide
  source 1..20: mol_type = other DNA
ctcaagtgggattatgagct

SEQ ID NO: 5676 - DNA, 20 bp, synthetic construct
  misc_feature 1..20: note = Description of Artificial Sequence: Synthetic oligonucleotide
  source 1..20: mol_type = other DNA
tcaagtgggattatgagctt

SEQ ID NO: 5677 - DNA, 20 bp, synthetic construct
  misc_feature 1..20: note = Description of Artificial Sequence: Synthetic oligonucleotide
  source 1..20: mol_type = other DNA
caagtgggattatgagcttg

SEQ ID NO: 5678 - DNA, 20 bp, synthetic construct
  misc_feature 1..20: note = Description of Artificial Sequence: Synthetic oligonucleotide
  source 1..20: mol_type = other DNA
aagtgggattatgagcttgt

SEQ ID NO: 5679 - DNA, 20 bp, synthetic construct
  misc_feature 1..20: note = Description of Artificial Sequence: Synthetic oligonucleotide
  source 1..20: mol_type = other DNA
agtgggattatgagcttgta

SEQ ID NO: 5680 - DNA, 20 bp, synthetic construct
  misc_feature 1..20: note = Description of Artificial Sequence: Synthetic oligonucleotide
  source 1..20: mol_type = other DNA
gtgggattatgagcttgtac

SEQ ID NO: 5681 - DNA, 20 bp, synthetic construct
  misc_feature 1..20: note = Description of Artificial Sequence: Synthetic oligonucleotide
  source 1..20: mol_type = other DNA
tgggattatgagcttgtacc

SEQ ID NO: 5682 - DNA, 20 bp, synthetic construct
  misc_feature 1..20: note = Description of Artificial Sequence: Synthetic oligonucleotide
  source 1..20: mol_type = other DNA
gggattatgagcttgtacct

SEQ ID NO: 5683 - DNA, 20 bp, synthetic construct
  misc_feature 1..20: note = Description of Artificial Sequence: Synthetic oligonucleotide
  source 1..20: mol_type = other DNA
ggattatgagcttgtacctg

SEQ ID NO: 5684 - DNA, 20 bp, synthetic construct
  misc_feature 1..20: note = Description of Artificial Sequence: Synthetic oligonucleotide
  source 1..20: mol_type = other DNA
gattatgagcttgtacctga

SEQ ID NO: 5685 - DNA, 20 bp, synthetic construct
  misc_feature 1..20: note = Description of Artificial Sequence: Synthetic oligonucleotide
  source 1..20: mol_type = other DNA
attatgagcttgtacctgaa

SEQ ID NO: 5686 - DNA, 20 bp, synthetic construct
  misc_feature 1..20: note = Description of Artificial Sequence: Synthetic oligonucleotide
  source 1..20: mol_type = other DNA
ttatgagcttgtacctgaac

SEQ ID NO: 5687 - DNA, 20 bp, synthetic construct
  misc_feature 1..20: note = Description of Artificial Sequence: Synthetic oligonucleotide
  source 1..20: mol_type = other DNA
tatgagcttgtacctgaact

SEQ ID NO: 5688 - DNA, 20 bp, synthetic construct
  misc_feature 1..20: note = Description of Artificial Sequence: Synthetic oligonucleotide
  source 1..20: mol_type = other DNA
atgagcttgtacctgaactt

SEQ ID NO: 5689 - DNA, 20 bp, synthetic construct
  misc_feature 1..20: note = Description of Artificial Sequence: Synthetic oligonucleotide
  source 1..20: mol_type = other DNA
tgagcttgtacctgaacttc

SEQ ID NO: 5690 - DNA, 20 bp, synthetic construct
  misc_feature 1..20: note = Description of Artificial Sequence: Synthetic oligonucleotide
  source 1..20: mol_type = other DNA
gagcttgtacctgaacttct

SEQ ID NO: 5691 - DNA, 20 bp, synthetic construct
  misc_feature 1..20: note = Description of Artificial Sequence: Synthetic oligonucleotide
  source 1..20: mol_type = other DNA
agcttgtacctgaacttctc

SEQ ID NO: 5692 - DNA, 20 bp, synthetic construct
  misc_feature 1..20: note = Description of Artificial Sequence: Synthetic oligonucleotide
  source 1..20: mol_type = other DNA
gcttgtacctgaacttctcc

SEQ ID NO: 5693 - DNA, 20 bp, synthetic construct
  misc_feature 1..20: note = Description of Artificial Sequence: Synthetic oligonucleotide
  source 1..20: mol_type = other DNA
cttgtacctgaacttctcct

SEQ ID NO: 5694 - DNA, 20 bp, synthetic construct
  misc_feature 1..20: note = Description of Artificial Sequence: Synthetic oligonucleotide
  source 1..20: mol_type = other DNA
ttgtacctgaacttctcctt

SEQ ID NO: 5695 - DNA, 20 bp, synthetic construct
  misc_feature 1..20: note = Description of Artificial Sequence: Synthetic oligonucleotide
  source 1..20: mol_type = other DNA
tgtacctgaacttctccttt

SEQ ID NO: 5696 - DNA, 20 bp, synthetic construct
  misc_feature 1..20: note = Description of Artificial Sequence: Synthetic oligonucleotide
  source 1..20: mol_type = other DNA
gtacctgaacttctcctttc

SEQ ID NO: 5697 - DNA, 20 bp, synthetic construct
  misc_feature 1..20: note = Description of Artificial Sequence: Synthetic oligonucleotide
  source 1..20: mol_type = other DNA
tacctgaacttctcctttcc

SEQ ID NO: 5698 - DNA, 20 bp, synthetic construct
  misc_feature 1..20: note = Description of Artificial Sequence: Synthetic oligonucleotide
  source 1..20: mol_type = other DNA
acctgaacttctcctttccg

SEQ ID NO: 5699 - DNA, 20 bp, synthetic construct
  misc_feature 1..20: note = Description of Artificial Sequence: Synthetic oligonucleotide
  source 1..20: mol_type = other DNA
cctgaacttctcctttccgg

SEQ ID NO: 5700 - DNA, 20 bp, synthetic construct
  misc_feature 1..20: note = Description of Artificial Sequence: Synthetic oligonucleotide
  source 1..20: mol_type = other DNA
ctgaacttctcctttccggt

SEQ ID NO: 5701 - DNA, 20 bp, synthetic construct
  misc_feature 1..20: note = Description of Artificial Sequence: Synthetic oligonucleotide
  source 1..20: mol_type = other DNA
tgaacttctcctttccggtc

SEQ ID NO: 5702 - DNA, 20 bp, synthetic construct
  misc_feature 1..20: note = Description of Artificial Sequence: Synthetic oligonucleotide
  source 1..20: mol_type = other DNA
gaacttctcctttccggtcc

SEQ ID NO: 5703 - DNA, 20 bp, synthetic construct
  misc_feature 1..20: note = Description of Artificial Sequence: Synthetic oligonucleotide
  source 1..20: mol_type = other DNA
aacttctcctttccggtccc

SEQ ID NO: 5704 - DNA, 20 bp, synthetic construct
  misc_feature 1..20: note = Description of Artificial Sequence: Synthetic oligonucleotide
  source 1..20: mol_type = other DNA
acttctcctttccggtcccc

SEQ ID NO: 5705 - DNA, 20 bp, synthetic construct
  misc_feature 1..20: note = Description of Artificial Sequence: Synthetic oligonucleotide
  source 1..20: mol_type = other DNA
cttctcctttccggtccccc

SEQ ID NO: 5706 - DNA, 20 bp, synthetic construct
  misc_feature 1..20: note = Description of Artificial Sequence: Synthetic oligonucleotide
  source 1..20: mol_type = other DNA
ttctcctttccggtcccccc

SEQ ID NO: 5707 - DNA, 20 bp, synthetic construct
  misc_feature 1..20: note = Description of Artificial Sequence: Synthetic oligonucleotide
  source 1..20: mol_type = other DNA
tctcctttccggtcccccca

SEQ ID NO: 5708 - DNA, 20 bp, synthetic construct
  misc_feature 1..20: note = Description of Artificial Sequence: Synthetic oligonucleotide
  source 1..20: mol_type = other DNA
ctcctttccggtccccccaa

SEQ ID NO: 5709 - DNA, 20 bp, synthetic construct
  misc_feature 1..20: note = Description of Artificial Sequence: Synthetic oligonucleotide
  source 1..20: mol_type = other DNA
tcctttccggtccccccaaa

SEQ ID NO: 5710 - DNA, 20 bp, synthetic construct
  misc_feature 1..20: note = Description of Artificial Sequence: Synthetic oligonucleotide
  source 1..20: mol_type = other DNA
cctttccggtccccccaaat

SEQ ID NO: 5711 - DNA, 20 bp, synthetic construct
  misc_feature 1..20: note = Description of Artificial Sequence: Synthetic oligonucleotide
  source 1..20: mol_type = other DNA
ctttccggtccccccaaatc

SEQ ID NO: 5712 - DNA, 20 bp, synthetic construct
  misc_feature 1..20: note = Description of Artificial Sequence: Synthetic oligonucleotide
  source 1..20: mol_type = other DNA
tttccggtccccccaaatct

SEQ ID NO: 5713 - DNA, 20 bp, synthetic construct
  misc_feature 1..20: note = Description of Artificial Sequence: Synthetic oligonucleotide
  source 1..20: mol_type = other DNA
ttccggtccccccaaatctc

SEQ ID NO: 5714 - DNA, 20 bp, synthetic construct
  misc_feature 1..20: note = Description of Artificial Sequence: Synthetic oligonucleotide
  source 1..20: mol_type = other DNA
tccggtccccccaaatctca

SEQ ID NO: 5715 - DNA, 20 bp, synthetic construct
  misc_feature 1..20: note = Description of Artificial Sequence: Synthetic oligonucleotide
  source 1..20: mol_type = other DNA
ccggtccccccaaatctcac

SEQ ID NO: 5716 - DNA, 20 bp, synthetic construct
  misc_feature 1..20: note = Description of Artificial Sequence: Synthetic oligonucleotide
  source 1..20: mol_type = other DNA
cggtccccccaaatctcacc

SEQ ID NO: 5717 - DNA, 20 bp, synthetic construct
  misc_feature 1..20: note = Description of Artificial Sequence: Synthetic oligonucleotide
  source 1..20: mol_type = other DNA
ggtccccccaaatctcacct

SEQ ID NO: 5718 - DNA, 20 bp, synthetic construct
  misc_feature 1..20: note = Description of Artificial Sequence: Synthetic oligonucleotide
  source 1..20: mol_type = other DNA
gtccccccaaatctcacctt

SEQ ID NO: 5719 - DNA, 20 bp, synthetic construct
  misc_feature 1..20: note = Description of Artificial Sequence: Synthetic oligonucleotide
  source 1..20: mol_type = other DNA
tccccccaaatctcaccttt

SEQ ID NO: 5720 - DNA, 20 bp, synthetic construct
  misc_feature 1..20: note = Description of Artificial Sequence: Synthetic oligonucleotide
  source 1..20: mol_type = other DNA
ccccccaaatctcacctttg

SEQ ID NO: 5721 - DNA, 20 bp, synthetic construct
  misc_feature 1..20: note = Description of Artificial Sequence: Synthetic oligonucleotide
  source 1..20: mol_type = other DNA
cccccaaatctcacctttgc

SEQ ID NO: 5722 - DNA, 20 bp, synthetic construct
  misc_feature 1..20: note = Description of Artificial Sequence: Synthetic oligonucleotide
  source 1..20: mol_type = other DNA
ccccaaatctcacctttgcg

SEQ ID NO: 5723 - DNA, 20 bp, synthetic construct
  misc_feature 1..20: note = Description of Artificial Sequence: Synthetic oligonucleotide
  source 1..20: mol_type = other DNA
cccaaatctcacctttgcgg

SEQ ID NO: 5724 - DNA, 20 bp, synthetic construct
  misc_feature 1..20: note = Description of Artificial Sequence: Synthetic oligonucleotide
  source 1..20: mol_type = other DNA
ccaaatctcacctttgcgga

SEQ ID NO: 5725 - DNA, 20 bp, synthetic construct
  misc_feature 1..20: note = Description of Artificial Sequence: Synthetic oligonucleotide
  source 1..20: mol_type = other DNA
caaatctcacctttgcggag

SEQ ID NO: 5726 - DNA, 20 bp, synthetic construct
  misc_feature 1..20: note = Description of Artificial Sequence: Synthetic oligonucleotide
  source 1..20: mol_type = other DNA
aaatctcacctttgcggagc

SEQ ID NO: 5727 - DNA, 20 bp, synthetic construct
  misc_feature 1..20: note = Description of Artificial Sequence: Synthetic oligonucleotide
  source 1..20: mol_type = other DNA
aatctcacctttgcggagct

SEQ ID NO: 5728 - DNA, 20 bp, synthetic construct
  misc_feature 1..20: note = Description of Artificial Sequence: Synthetic oligonucleotide
  source 1..20: mol_type = other DNA
atctcacctttgcggagctg

SEQ ID NO: 5729 - DNA, 20 bp, synthetic construct
  misc_feature 1..20: note = Description of Artificial Sequence: Synthetic oligonucleotide
  source 1..20: mol_type = other DNA
tctcacctttgcggagctgt

SEQ ID NO: 5730 - DNA, 20 bp, synthetic construct
  misc_feature 1..20: note = Description of Artificial Sequence: Synthetic oligonucleotide
  source 1..20: mol_type = other DNA
ctcacctttgcggagctgtg

SEQ ID NO: 5731 - DNA, 20 bp, synthetic construct
  misc_feature 1..20: note = Description of Artificial Sequence: Synthetic oligonucleotide
  source 1..20: mol_type = other DNA
tcacctttgcggagctgtgc

SEQ ID NO: 5732 - DNA, 20 bp, synthetic construct
  misc_feature 1..20: note = Description of Artificial Sequence: Synthetic oligonucleotide
  source 1..20: mol_type = other DNA
cacctttgcggagctgtgca

SEQ ID NO: 5733 - DNA, 20 bp, synthetic construct
  misc_feature 1..20: note = Description of Artificial Sequence: Synthetic oligonucleotide
  source 1..20: mol_type = other DNA
acctttgcggagctgtgcac

SEQ ID NO: 5734 - DNA, 20 bp, synthetic construct
  misc_feature 1..20: note = Description of Artificial Sequence: Synthetic oligonucleotide
  source 1..20: mol_type = other DNA
cctttgcggagctgtgcaca

SEQ ID NO: 5735 - DNA, 20 bp, synthetic construct
  misc_feature 1..20: note = Description of Artificial Sequence: Synthetic oligonucleotide
  source 1..20: mol_type = other DNA
ctttgcggagctgtgcacac

SEQ ID NO: 5736 - DNA, 20 bp, synthetic construct
  misc_feature 1..20: note = Description of Artificial Sequence: Synthetic oligonucleotide
  source 1..20: mol_type = other DNA
tttgcggagctgtgcacact

SEQ ID NO: 5737 - DNA, 20 bp, synthetic construct
  misc_feature 1..20: note = Description of Artificial Sequence: Synthetic oligonucleotide
  source 1..20: mol_type = other DNA
ttgcggagctgtgcacactt

SEQ ID NO: 5738 - DNA, 20 bp, synthetic construct
  misc_feature 1..20: note = Description of Artificial Sequence: Synthetic oligonucleotide
  source 1..20: mol_type = other DNA
tgcggagctgtgcacacttg

SEQ ID NO: 5739 - DNA, 20 bp, synthetic construct
  misc_feature 1..20: note = Description of Artificial Sequence: Synthetic oligonucleotide
  source 1..20: mol_type = other DNA
gcggagctgtgcacacttgt

SEQ ID NO: 5740 - DNA, 20 bp, synthetic construct
  misc_feature 1..20: note = Description of Artificial Sequence: Synthetic oligonucleotide
  source 1..20: mol_type = other DNA
cggagctgtgcacacttgtc

SEQ ID NO: 5741 - DNA, 20 bp, synthetic construct
  misc_feature 1..20: note = Description of Artificial Sequence: Synthetic oligonucleotide
  source 1..20: mol_type = other DNA
ggagctgtgcacacttgtcc

SEQ ID NO: 5742 - DNA, 20 bp, synthetic construct
  misc_feature 1..20: note = Description of Artificial Sequence: Synthetic oligonucleotide
  source 1..20: mol_type = other DNA
gagctgtgcacacttgtcca

SEQ ID NO: 5743 - DNA, 20 bp, synthetic construct
  misc_feature 1..20: note = Description of Artificial Sequence: Synthetic oligonucleotide
  source 1..20: mol_type = other DNA
agctgtgcacacttgtccaa

SEQ ID NO: 5744 - DNA, 20 bp, synthetic construct
  misc_feature 1..20: note = Description of Artificial Sequence: Synthetic oligonucleotide
  source 1..20: mol_type = other DNA
gctgtgcacacttgtccaag

SEQ ID NO: 5745 - DNA, 20 bp, synthetic construct
  misc_feature 1..20: note = Description of Artificial Sequence: Synthetic oligonucleotide
  source 1..20: mol_type = other DNA
ctgtgcacacttgtccaagc

SEQ ID NO: 5746 - DNA, 20 bp, synthetic construct
  misc_feature 1..20: note = Description of Artificial Sequence: Synthetic oligonucleotide
  source 1..20: mol_type = other DNA
tgtgcacacttgtccaagca

SEQ ID NO: 5747 - DNA, 20 bp, synthetic construct
  misc_feature 1..20: note = Description of Artificial Sequence: Synthetic oligonucleotide
  source 1..20: mol_type = other DNA
gtgcacacttgtccaagcag

SEQ ID NO: 5748 - DNA, 20 bp, synthetic construct
  misc_feature 1..20: note = Description of Artificial Sequence: Synthetic oligonucleotide
  source 1..20: mol_type = other DNA
tgcacacttgtccaagcagt

SEQ ID NO: 5749 - DNA, 20 bp, synthetic construct
  misc_feature 1..20: note = Description of Artificial Sequence: Synthetic oligonucleotide
  source 1..20: mol_type = other DNA
gcacacttgtccaagcagtt

SEQ ID NO: 5750 - DNA, 20 bp, synthetic construct
  misc_feature 1..20: note = Description of Artificial Sequence: Synthetic oligonucleotide
  source 1..20: mol_type = other DNA
cacacttgtccaagcagttg

SEQ ID NO: 5751 - DNA, 20 bp, synthetic construct
  misc_feature 1..20: note = Description of Artificial Sequence: Synthetic oligonucleotide
  source 1..20: mol_type = other DNA
acacttgtccaagcagttgt

SEQ ID NO: 5752 - DNA, 20 bp, synthetic construct
  misc_feature 1..20: note = Description of Artificial Sequence: Synthetic oligonucleotide
  source 1..20: mol_type = other DNA
cacttgtccaagcagttgtc

SEQ ID NO: 5753 - DNA, 20 bp, synthetic construct
  misc_feature 1..20: note = Description of Artificial Sequence: Synthetic oligonucleotide
  source 1..20: mol_type = other DNA
acttgtccaagcagttgtca

SEQ ID NO: 5754 - DNA, 20 bp, synthetic construct
  misc_feature 1..20: note = Description of Artificial Sequence: Synthetic oligonucleotide
  source 1..20: mol_type = other DNA
cttgtccaagcagttgtcat

SEQ ID NO: 5755 - DNA, 20 bp, synthetic construct
  misc_feature 1..20: note = Description of Artificial Sequence: Synthetic oligonucleotide
  source 1..20: mol_type = other DNA
ttgtccaagcagttgtcatt

SEQ ID NO: 5756 - DNA, 20 bp, synthetic construct
  misc_feature 1..20: note = Description of Artificial Sequence: Synthetic oligonucleotide
  source 1..20: mol_type = other DNA
tgtccaagcagttgtcattg

SEQ ID NO: 5757 - DNA, 20 bp, synthetic construct
  misc_feature 1..20: note = Description of Artificial Sequence: Synthetic oligonucleotide
  source 1..20: mol_type = other DNA
gtccaagcagttgtcattgt

SEQ ID NO: 5758 - DNA, 20 bp, synthetic construct
  misc_feature 1..20: note = Description of Artificial Sequence: Synthetic oligonucleotide
  source 1..20: mol_type = other DNA
tccaagcagttgtcattgtc

SEQ ID NO: 5759 - DNA, 20 bp, synthetic construct
  misc_feature 1..20: note = Description of Artificial Sequence: Synthetic oligonucleotide
  source 1..20: mol_type = other DNA
ccaagcagttgtcattgtcc

SEQ ID NO: 5760 - DNA, 20 bp, synthetic construct
  misc_feature 1..20: note = Description of Artificial Sequence: Synthetic oligonucleotide
  source 1..20: mol_type = other DNA
caagcagttgtcattgtcct

SEQ ID NO: 5761 - DNA, 20 bp, synthetic construct
  misc_feature 1..20: note = Description of Artificial Sequence: Synthetic oligonucleotide
  source 1..20: mol_type = other DNA
aagcagttgtcattgtcctt

SEQ ID NO: 5762 - DNA, 20 bp, synthetic construct
  misc_feature 1..20: note = Description of Artificial Sequence: Synthetic oligonucleotide
  source 1..20: mol_type = other DNA
agcagttgtcattgtccttg

SEQ ID NO: 5763 - DNA, 20 bp, synthetic construct
  misc_feature 1..20: note = Description of Artificial Sequence: Synthetic oligonucleotide
  source 1..20: mol_type = other DNA
gcagttgtcattgtccttgt

SEQ ID NO: 5764 - DNA, 20 bp, synthetic construct
  misc_feature 1..20: note = Description of Artificial Sequence: Synthetic oligonucleotide
  source 1..20: mol_type = other DNA
cagttgtcattgtccttgtc

SEQ ID NO: 5765 - DNA, 20 bp, synthetic construct
  misc_feature 1..20: note = Description of Artificial Sequence: Synthetic oligonucleotide
  source 1..20: mol_type = other DNA
agttgtcattgtccttgtcc

SEQ ID NO: 5766 - DNA, 20 bp, synthetic construct
  misc_feature 1..20: note = Description of Artificial Sequence: Synthetic oligonucleotide
  source 1..20: mol_type = other DNA
gttgtcattgtccttgtcct

SEQ ID NO: 5767 - DNA, 20 bp, synthetic construct
  misc_feature 1..20: note = Description of Artificial Sequence: Synthetic oligonucleotide
  source 1..20: mol_type = other DNA
ttgtcattgtccttgtcctt

SEQ ID NO: 5768 - DNA, 20 bp, synthetic construct
  misc_feature 1..20: note = Description of Artificial Sequence: Synthetic oligonucleotide
  source 1..20: mol_type = other DNA
tgtcattgtccttgtccttg

SEQ ID NO: 5769 - DNA, 20 bp, synthetic construct
  misc_feature 1..20: note = Description of Artificial Sequence: Synthetic oligonucleotide
  source 1..20: mol_type = other DNA
gtcattgtccttgtccttgg

SEQ ID NO: 5770 - DNA, 20 bp, synthetic construct
  misc_feature 1..20: note = Description of Artificial Sequence: Synthetic oligonucleotide
  source 1..20: mol_type = other DNA
tcattgtccttgtccttggt

SEQ ID NO: 5771 - DNA, 20 bp, synthetic construct
  misc_feature 1..20: note = Description of Artificial Sequence: Synthetic oligonucleotide
  source 1..20: mol_type = other DNA
cattgtccttgtccttggtg

SEQ ID NO: 5772 - DNA, 20 bp, synthetic construct
  misc_feature 1..20: note = Description of Artificial Sequence: Synthetic oligonucleotide
  source 1..20: mol_type = other DNA
attgtccttgtccttggtgc

SEQ ID NO: 5773 - DNA, 20 bp, synthetic construct
  misc_feature 1..20: note = Description of Artificial Sequence: Synthetic oligonucleotide
  source 1..20: mol_type = other DNA
ttgtccttgtccttggtgct

SEQ ID NO: 5774 - DNA, 20 bp, synthetic construct
  misc_feature 1..20: note = Description of Artificial Sequence: Synthetic oligonucleotide
  source 1..20: mol_type = other DNA
tgtccttgtccttggtgctg

SEQ ID NO: 5775 - DNA, 20 bp, synthetic construct
  misc_feature 1..20: note = Description of Artificial Sequence: Synthetic oligonucleotide
  source 1..20: mol_type = other DNA
gtccttgtccttggtgctga

SEQ ID NO: 5776 - DNA, 20 bp, synthetic construct
  misc_feature 1..20: note = Description of Artificial Sequence: Synthetic oligonucleotide
  source 1..20: mol_type = other DNA
tccttgtccttggtgctgaa

SEQ ID NO: 5777 - DNA, 20 bp, synthetic construct
  misc_feature 1..20: note = Description of Artificial Sequence: Synthetic oligonucleotide
  source 1..20: mol_type = other DNA
ccttgtccttggtgctgaag

SEQ ID NO: 5778 - DNA, 20 bp, synthetic construct
  misc_feature 1..20: note = Description of Artificial Sequence: Synthetic oligonucleotide
  source 1..20: mol_type = other DNA
cttgtccttggtgctgaagg

SEQ ID NO: 5779 - DNA, 20 bp, synthetic construct
  misc_feature 1..20: note = Description of Artificial Sequence: Synthetic oligonucleotide
  source 1..20: mol_type = other DNA
ttgtccttggtgctgaaggc

SEQ ID NO: 5780 - DNA, 20 bp, synthetic construct
  misc_feature 1..20: note = Description of Artificial Sequence: Synthetic oligonucleotide
  source 1..20: mol_type = other DNA
tgtccttggtgctgaaggct

SEQ ID NO: 5781 - DNA, 20 bp, synthetic construct
  misc_feature 1..20: note = Description of Artificial Sequence: Synthetic oligonucleotide
  source 1..20: mol_type = other DNA
gtccttggtgctgaaggctg

SEQ ID NO: 5782 - DNA, 20 bp, synthetic construct
  misc_feature 1..20: note = Description of Artificial Sequence: Synthetic oligonucleotide
  source 1..20: mol_type = other DNA
tccttggtgctgaaggctgt

SEQ ID NO: 5783 - DNA, 20 bp, synthetic construct
  misc_feature 1..20: note = Description of Artificial Sequence: Synthetic oligonucleotide
  source 1..20: mol_type = other DNA
ccttggtgctgaaggctgtg

SEQ ID NO: 5784 - DNA, 20 bp, synthetic construct
  misc_feature 1..20: note = Description of Artificial Sequence: Synthetic oligonucleotide
  source 1..20: mol_type = other DNA
cttggtgctgaaggctgtgt

SEQ ID NO: 5785 - DNA, 20 bp, synthetic construct
  misc_feature 1..20: note = Description of Artificial Sequence: Synthetic oligonucleotide
  source 1..20: mol_type = other DNA
ttggtgctgaaggctgtgtt

SEQ ID NO: 5786 - DNA, 20 bp, synthetic construct
  misc_feature 1..20: note = Description of Artificial Sequence: Synthetic oligonucleotide
  source 1..20: mol_type = other DNA
tggtgctgaaggctgtgttg

SEQ ID NO: 5787 - DNA, 20 bp, synthetic construct
  misc_feature 1..20: note = Description of Artificial Sequence: Synthetic oligonucleotide
  source 1..20: mol_type = other DNA
ggtgctgaaggctgtgttgt

SEQ ID NO: 5788 - DNA, 20 bp, synthetic construct
  misc_feature 1..20: note = Description of Artificial Sequence: Synthetic oligonucleotide
  source 1..20: mol_type = other DNA
gtgctgaaggctgtgttgtt

SEQ ID NO: 5789 - DNA, 20 bp, synthetic construct
  misc_feature 1..20: note = Description of Artificial Sequence: Synthetic oligonucleotide
  source 1..20: mol_type = other DNA
tgctgaaggctgtgttgtta

SEQ ID NO: 5790 - DNA, 20 bp, synthetic construct
  misc_feature 1..20: note = Description of Artificial Sequence: Synthetic oligonucleotide
  source 1..20: mol_type = other DNA
gctgaaggctgtgttgttat

SEQ ID NO: 5791 - DNA, 20 bp, synthetic construct
  misc_feature 1..20: note = Description of Artificial Sequence: Synthetic oligonucleotide
  source 1..20: mol_type = other DNA
ctgaaggctgtgttgttatg

SEQ ID NO: 5792 - DNA, 20 bp, synthetic construct
  misc_feature 1..20: note = Description of Artificial Sequence: Synthetic oligonucleotide
  source 1..20: mol_type = other DNA
tgaaggctgtgttgttatga

SEQ ID NO: 5793 - DNA, 20 bp, synthetic construct
  misc_feature 1..20: note = Description of Artificial Sequence: Synthetic oligonucleotide
  source 1..20: mol_type = other DNA
gaaggctgtgttgttatgat

SEQ ID NO: 5794 - DNA, 20 bp, synthetic construct
  misc_feature 1..20: note = Description of Artificial Sequence: Synthetic oligonucleotide
  source 1..20: mol_type = other DNA
aaggctgtgttgttatgata

SEQ ID NO: 5795 - DNA, 20 bp, synthetic construct
  misc_feature 1..20: note = Description of Artificial Sequence: Synthetic oligonucleotide
  source 1..20: mol_type = other DNA
aggctgtgttgttatgatac

SEQ ID NO: 5796 - DNA, 20 bp, synthetic construct
  misc_feature 1..20: note = Description of Artificial Sequence: Synthetic oligonucleotide
  source 1..20: mol_type = other DNA
ggctgtgttgttatgatact

SEQ ID NO: 5797 - DNA, 20 bp, synthetic construct
  misc_feature 1..20: note = Description of Artificial Sequence: Synthetic oligonucleotide
  source 1..20: mol_type = other DNA
gctgtgttgttatgatactg

SEQ ID NO: 5798 - DNA, 20 bp, synthetic construct
  misc_feature 1..20: note = Description of Artificial Sequence: Synthetic oligonucleotide
  source 1..20: mol_type = other DNA
ctgtgttgttatgatactgg

SEQ ID NO: 5799 - DNA, 20 bp, synthetic construct
  misc_feature 1..20: note = Description of Artificial Sequence: Synthetic oligonucleotide
  source 1..20: mol_type = other DNA
tgtgttgttatgatactgga

SEQ ID NO: 5800 - DNA, 20 bp, synthetic construct
  misc_feature 1..20: note = Description of Artificial Sequence: Synthetic oligonucleotide
  source 1..20: mol_type = other DNA
gtgttgttatgatactggag

SEQ ID NO: 5801 - DNA, 20 bp, synthetic construct
  misc_feature 1..20: note = Description of Artificial Sequence: Synthetic oligonucleotide
  source 1..20: mol_type = other DNA
tgttgttatgatactggagg

SEQ ID NO: 5802 - DNA, 20 bp, synthetic construct
  misc_feature 1..20: note = Description of Artificial Sequence: Synthetic oligonucleotide
  source 1..20: mol_type = other DNA
gttgttatgatactggaggg

SEQ ID NO: 5803 - DNA, 20 bp, synthetic construct
  misc_feature 1..20: note = Description of Artificial Sequence: Synthetic oligonucleotide
  source 1..20: mol_type = other DNA
ttgttatgatactggagggc

SEQ ID NO: 5804 - DNA, 20 bp, synthetic construct
  misc_feature 1..20: note = Description of Artificial Sequence: Synthetic oligonucleotide
  source 1..20: mol_type = other DNA
tgttatgatactggagggcg

SEQ ID NO: 5805 - DNA, 20 bp, synthetic construct
  misc_feature 1..20: note = Description of Artificial Sequence: Synthetic oligonucleotide
  source 1..20: mol_type = other DNA
gttatgatactggagggcgt

SEQ ID NO: 5806 - DNA, 20 bp, synthetic construct
  misc_feature 1..20: note = Description of Artificial Sequence: Synthetic oligonucleotide
  source 1..20: mol_type = other DNA
ttatgatactggagggcgtc

SEQ ID NO: 5807 - DNA, 20 bp, synthetic construct
  misc_feature 1..20: note = Description of Artificial Sequence: Synthetic oligonucleotide
  source 1..20: mol_type = other DNA
tatgatactggagggcgtcg

SEQ ID NO: 5808 - DNA, 20 bp, synthetic construct
  misc_feature 1..20: note = Description of Artificial Sequence: Synthetic oligonucleotide
  source 1..20: mol_type = other DNA
atgatactggagggcgtcgt

SEQ ID NO: 5809 - DNA, 20 bp, synthetic construct
  misc_feature 1..20: note = Description of Artificial Sequence: Synthetic oligonucleotide
  source 1..20: mol_type = other DNA
tgatactggagggcgtcgtt

SEQ ID NO: 5810 - DNA, 20 bp, synthetic construct
  misc_feature 1..20: note = Description of Artificial Sequence: Synthetic oligonucleotide
  source 1..20: mol_type = other DNA
gatactggagggcgtcgttc

SEQ ID NO: 5811 - DNA, 20 bp, synthetic construct
  misc_feature 1..20: note = Description of Artificial Sequence: Synthetic oligonucleotide
  source 1..20: mol_type = other DNA
atactggagggcgtcgttcc

SEQ ID NO: 5812 - DNA, 20 bp, synthetic construct
  misc_feature 1..20: note = Description of Artificial Sequence: Synthetic oligonucleotide
  source 1..20: mol_type = other DNA
tactggagggcgtcgttccc

SEQ ID NO: 5813 - DNA, 20 bp, synthetic construct
  misc_feature 1..20: note = Description of Artificial Sequence: Synthetic oligonucleotide
  source 1..20: mol_type = other DNA
actggagggcgtcgttcccc

SEQ ID NO: 5814 - DNA, 20 bp, synthetic construct
  misc_feature 1..20: note = Description of Artificial Sequence: Synthetic oligonucleotide
  source 1..20: mol_type = other DNA
ctggagggcgtcgttcccca

SEQ ID NO: 5815 - DNA, 20 bp, synthetic construct
  misc_feature 1..20: note = Description of Artificial Sequence: Synthetic oligonucleotide
  source 1..20: mol_type = other DNA
tggagggcgtcgttccccac

SEQ ID NO: 5816 - DNA, 20 bp, synthetic construct
  misc_feature 1..20: note = Description of Artificial Sequence: Synthetic oligonucleotide
  source 1..20: mol_type = other DNA
ggagggcgtcgttccccaca

SEQ ID NO: 5817 - DNA, 20 bp, synthetic construct
  misc_feature 1..20: note = Description of Artificial Sequence: Synthetic oligonucleotide
  source 1..20: mol_type = other DNA
gagggcgtcgttccccacat

SEQ ID NO: 5818 - DNA, 20 bp, synthetic construct
  misc_feature 1..20: note = Description of Artificial Sequence: Synthetic oligonucleotide
  source 1..20: mol_type = other DNA
agggcgtcgttccccacatt

SEQ ID NO: 5819 - DNA, 20 bp, synthetic construct
  misc_feature 1..20: note = Description of Artificial Sequence: Synthetic oligonucleotide
  source 1..20: mol_type = other DNA
gggcgtcgttccccacattg

SEQ ID NO: 5820 - DNA, 20 bp, synthetic construct
  misc_feature 1..20: note = Description of Artificial Sequence: Synthetic oligonucleotide
  source 1..20: mol_type = other DNA
ggcgtcgttccccacattgc

SEQ ID NO: 5821 - DNA, 20 bp, synthetic construct
  misc_feature 1..20: note = Description of Artificial Sequence: Synthetic oligonucleotide
  source 1..20: mol_type = other DNA
gcgtcgttccccacattgcc

SEQ ID NO: 5822 - DNA, 20 bp, synthetic construct
  misc_feature 1..20: note = Description of Artificial Sequence: Synthetic oligonucleotide
  source 1..20: mol_type = other DNA
cgtcgttccccacattgcca

SEQ ID NO: 5823 - DNA, 20 bp, synthetic construct
  misc_feature 1..20: note = Description of Artificial Sequence: Synthetic oligonucleotide
  source 1..20: mol_type = other DNA
gtcgttccccacattgccag

SEQ ID NO: 5824 - DNA, 20 bp, synthetic construct
  misc_feature 1..20: note = Description of Artificial Sequence: Synthetic oligonucleotide
  source 1..20: mol_type = other DNA
tcgttccccacattgccagt

SEQ ID NO: 5825 - DNA, 20 bp, synthetic construct
  misc_feature 1..20: note = Description of Artificial Sequence: Synthetic oligonucleotide
  source 1..20: mol_type = other DNA
cgttccccacattgccagtg

SEQ ID NO: 5826 - DNA, 20 bp, synthetic construct
  misc_feature 1..20: note = Description of Artificial Sequence: Synthetic oligonucleotide
  source 1..20: mol_type = other DNA
gttccccacattgccagtgt

SEQ ID NO: 5827 - DNA, 20 bp, synthetic construct
  misc_feature 1..20: note = Description of Artificial Sequence: Synthetic oligonucleotide
  source 1..20: mol_type = other DNA
ttccccacattgccagtgta

SEQ ID NO: 5828 - DNA, 20 bp, synthetic construct
  misc_feature 1..20: note = Description of Artificial Sequence: Synthetic oligonucleotide
  source 1..20: mol_type = other DNA
tccccacattgccagtgtag

SEQ ID NO: 5829 - DNA, 20 bp, synthetic construct
  misc_feature 1..20: note = Description of Artificial Sequence: Synthetic oligonucleotide
  source 1..20: mol_type = other DNA
ccccacattgccagtgtagt

SEQ ID NO: 5830 - DNA, 20 bp, synthetic construct
  misc_feature 1..20: note = Description of Artificial Sequence: Synthetic oligonucleotide
  source 1..20: mol_type = other DNA
cccacattgccagtgtagtt

SEQ ID NO: 5831 - DNA, 20 bp, synthetic construct
  misc_feature 1..20: note = Description of Artificial Sequence: Synthetic oligonucleotide
  source 1..20: mol_type = other DNA
ccacattgccagtgtagttc

SEQ ID NO: 5832 - DNA, 20 bp, synthetic construct
  misc_feature 1..20: note = Description of Artificial Sequence: Synthetic oligonucleotide
  source 1..20: mol_type = other DNA
cacattgccagtgtagttcc

SEQ ID NO: 5833 - DNA, 20 bp, synthetic construct
  misc_feature 1..20: note = Description of Artificial Sequence: Synthetic oligonucleotide
  source 1..20: mol_type = other DNA
acattgccagtgtagttccc

SEQ ID NO: 5834 - DNA, 20 bp, synthetic construct
  misc_feature 1..20: note = Description of Artificial Sequence: Synthetic oligonucleotide
  source 1..20: mol_type = other DNA
cattgccagtgtagttcccc

SEQ ID NO: 5835 - DNA, 20 bp, synthetic construct
  misc_feature 1..20: note = Description of Artificial Sequence: Synthetic oligonucleotide
  source 1..20: mol_type = other DNA
attgccagtgtagttcccca

SEQ ID NO: 5836 - DNA, 20 bp, synthetic construct
  misc_feature 1..20: note = Description of Artificial Sequence: Synthetic oligonucleotide
  source 1..20: mol_type = other DNA
ttgccagtgtagttccccag

SEQ ID NO: 5837 - DNA, 20 bp, synthetic construct
  misc_feature 1..20: note = Description of Artificial Sequence: Synthetic oligonucleotide
  source 1..20: mol_type = other DNA
tgccagtgtagttccccagg

SEQ ID NO: 5838 - DNA, 20 bp, synthetic construct
  misc_feature 1..20: note = Description of Artificial Sequence: Synthetic oligonucleotide
  source 1..20: mol_type = other DNA
gccagtgtagttccccagga

SEQ ID NO: 5839 - DNA, 20 bp, synthetic construct
  misc_feature 1..20: note = Description of Artificial Sequence: Synthetic oligonucleotide
  source 1..20: mol_type = other DNA
ccagtgtagttccccaggaa

SEQ ID NO: 5840 - DNA, 20 bp, synthetic construct
  misc_feature 1..20: note = Description of Artificial Sequence: Synthetic oligonucleotide
  source 1..20: mol_type = other DNA
cagtgtagttccccaggaag

SEQ ID NO: 5841 - DNA, 20 bp, synthetic construct
  misc_feature 1..20: note = Description of Artificial Sequence: Synthetic oligonucleotide
  source 1..20: mol_type = other DNA
agtgtagttccccaggaaga

SEQ ID NO: 5842 - DNA, 20 bp, synthetic construct
  misc_feature 1..20: note = Description of Artificial Sequence: Synthetic oligonucleotide
  source 1..20: mol_type = other DNA
gtgtagttccccaggaagag

SEQ ID NO: 5843 - DNA, 20 bp, synthetic construct
  misc_feature 1..20: note = Description of Artificial Sequence: Synthetic oligonucleotide
  source 1..20: mol_type = other DNA
tgtagttccccaggaagagg

SEQ ID NO: 5844 - DNA, 20 bp, synthetic construct
  misc_feature 1..20: note = Description of Artificial Sequence: Synthetic oligonucleotide
  source 1..20: mol_type = other DNA
gtagttccccaggaagaggc

SEQ ID NO: 5845 - DNA, 20 bp, synthetic construct
  misc_feature 1..20: note = Description of Artificial Sequence: Synthetic oligonucleotide
  source 1..20: mol_type = other DNA
tagttccccaggaagaggcg

SEQ ID NO: 5846 - DNA, 20 bp, synthetic construct
  misc_feature 1..20: note = Description of Artificial Sequence: Synthetic oligonucleotide
  source 1..20: mol_type = other DNA
agttccccaggaagaggcga

SEQ ID NO: 5847 - DNA, 20 bp, synthetic construct
  misc_feature 1..20: note = Description of Artificial Sequence: Synthetic oligonucleotide
  source 1..20: mol_type = other DNA
gttccccaggaagaggcgat

SEQ ID NO: 5848 - DNA, 20 bp, synthetic construct
  misc_feature 1..20: note = Description of Artificial Sequence: Synthetic oligonucleotide
  source 1..20: mol_type = other DNA
ttccccaggaagaggcgata

SEQ ID NO: 5849 - DNA, 20 bp, synthetic construct
  misc_feature 1..20: note = Description of Artificial Sequence: Synthetic oligonucleotide
  source 1..20: mol_type = other DNA
tccccaggaagaggcgatag

SEQ ID NO: 5850 - DNA, 20 bp, synthetic construct
  misc_feature 1..20: note = Description of Artificial Sequence: Synthetic oligonucleotide
  source 1..20: mol_type = other DNA
ccccaggaagaggcgatagc

SEQ ID NO: 5851 - DNA, 20 bp, synthetic construct
  misc_feature 1..20: note = Description of Artificial Sequence: Synthetic oligonucleotide
  source 1..20: mol_type = other DNA
cccaggaagaggcgatagct

SEQ ID NO: 5852 - DNA, 20 bp, synthetic construct
  misc_feature 1..20: note = Description of Artificial Sequence: Synthetic oligonucleotide
  source 1..20: mol_type = other DNA
ccaggaagaggcgatagctg

SEQ ID NO: 5853 - DNA, 20 bp, synthetic construct
  misc_feature 1..20: note = Description of Artificial Sequence: Synthetic oligonucleotide
  source 1..20: mol_type = other DNA
caggaagaggcgatagctgt

SEQ ID NO: 5854 - DNA, 20 bp, synthetic construct
  misc_feature 1..20: note = Description of Artificial Sequence: Synthetic oligonucleotide
  source 1..20: mol_type = other DNA
aggaagaggcgatagctgtt

SEQ ID NO: 5855 - DNA, 20 bp, synthetic construct
  misc_feature 1..20: note = Description of Artificial Sequence: Synthetic oligonucleotide
  source 1..20: mol_type = other DNA
ggaagaggcgatagctgttg

SEQ ID NO: 5856 - DNA, 20 bp, synthetic construct
  misc_feature 1..20: note = Description of Artificial Sequence: Synthetic oligonucleotide
  source 1..20: mol_type = other DNA
gaagaggcgatagctgttga

SEQ ID NO: 5857 - DNA, 20 bp, synthetic construct
  misc_feature 1..20: note = Description of Artificial Sequence: Synthetic oligonucleotide
  source 1..20: mol_type = other DNA
aagaggcgatagctgttgag

SEQ ID NO: 5858 - DNA, 20 bp, synthetic construct
  misc_feature 1..20: note = Description of Artificial Sequence: Synthetic oligonucleotide
  source 1..20: mol_type = other DNA
agaggcgatagctgttgagt

SEQ ID NO: 5859 - DNA, 20 bp, synthetic construct
  misc_feature 1..20: note = Description of Artificial Sequence: Synthetic oligonucleotide
  source 1..20: mol_type = other DNA
gaggcgatagctgttgagtt

SEQ ID NO: 5860 - DNA, 20 bp, synthetic construct
  misc_feature 1..20: note = Description of Artificial Sequence: Synthetic oligonucleotide
  source 1..20: mol_type = other DNA
aggcgatagctgttgagttc

SEQ ID NO: 5861 - DNA, 20 bp, synthetic construct
  misc_feature 1..20: note = Description of Artificial Sequence: Synthetic oligonucleotide
  source 1..20: mol_type = other DNA
ggcgatagctgttgagttca

SEQ ID NO: 5862 - DNA, 20 bp, synthetic construct
  misc_feature 1..20: note = Description of Artificial Sequence: Synthetic oligonucleotide
  source 1..20: mol_type = other DNA
gcgatagctgttgagttcat

SEQ ID NO: 5863 - DNA, 20 bp, synthetic construct
  misc_feature 1..20: note = Description of Artificial Sequence: Synthetic oligonucleotide
  source 1..20: mol_type = other DNA
cgatagctgttgagttcatt

SEQ ID NO: 5864 - DNA, 20 bp, synthetic construct
  misc_feature 1..20: note = Description of Artificial Sequence: Synthetic oligonucleotide
  source 1..20: mol_type = other DNA
gatagctgttgagttcattg

SEQ ID NO: 5865 - DNA, 20 bp, synthetic construct
  misc_feature 1..20: note = Description of Artificial Sequence: Synthetic oligonucleotide
  source 1..20: mol_type = other DNA
atagctgttgagttcattgc

SEQ ID NO: 5866 - DNA, 20 bp, synthetic construct
  misc_feature 1..20: note = Description of Artificial Sequence: Synthetic oligonucleotide
  source 1..20: mol_type = other DNA
tagctgttgagttcattgcc

SEQ ID NO: 5867 - DNA, 20 bp, synthetic construct
  misc_feature 1..20: note = Description of Artificial Sequence: Synthetic oligonucleotide
  source 1..20: mol_type = other DNA
agctgttgagttcattgccc

SEQ ID NO: 5868 - DNA, 20 bp, synthetic construct
  misc_feature 1..20: note = Description of Artificial Sequence: Synthetic oligonucleotide
  source 1..20: mol_type = other DNA
gctgttgagttcattgccca

SEQ ID NO: 5869 - DNA, 20 bp, synthetic construct
  misc_feature 1..20: note = Description of Artificial Sequence: Synthetic oligonucleotide
  source 1..20: mol_type = other DNA
ctgttgagttcattgcccaa

SEQ ID NO: 5870 - DNA, 20 bp, synthetic construct
  misc_feature 1..20: note = Description of Artificial Sequence: Synthetic oligonucleotide
  source 1..20: mol_type = other DNA
tgttgagttcattgcccaaa

SEQ ID NO: 5871 - DNA, 20 bp, synthetic construct
  misc_feature 1..20: note = Description of Artificial Sequence: Synthetic oligonucleotide
  source 1..20: mol_type = other DNA
gttgagttcattgcccaaaa

SEQ ID NO: 5872 - DNA, 20 bp, synthetic construct
  misc_feature 1..20: note = Description of Artificial Sequence: Synthetic oligonucleotide
  source 1..20: mol_type = other DNA
ttgagttcattgcccaaaac

SEQ ID NO: 5873 - DNA, 20 bp, synthetic construct
  misc_feature 1..20: note = Description of Artificial Sequence: Synthetic oligonucleotide
  source 1..20: mol_type = other DNA
tgagttcattgcccaaaaca

SEQ ID NO: 5874 - DNA, 20 bp, synthetic construct
  misc_feature 1..20: note = Description of Artificial Sequence: Synthetic oligonucleotide
  source 1..20: mol_type = other DNA
gagttcattgcccaaaacaa

SEQ ID NO: 5875 - DNA, 20 bp, synthetic construct
  misc_feature 1..20: note = Description of Artificial Sequence: Synthetic oligonucleotide
  source 1..20: mol_type = other DNA
agttcattgcccaaaacaaa

SEQ ID NO: 5876 - DNA, 20 bp, synthetic construct
  misc_feature 1..20: note = Description of Artificial Sequence: Synthetic oligonucleotide
  source 1..20: mol_type = other DNA
gttcattgcccaaaacaaag

SEQ ID NO: 5877 - DNA, 20 bp, synthetic construct
  misc_feature 1..20: note = Description of Artificial Sequence: Synthetic oligonucleotide
  source 1..20: mol_type = other DNA
ttcattgcccaaaacaaagt

SEQ ID NO: 5878 - DNA, 20 bp, synthetic construct
  misc_feature 1..20: note = Description of Artificial Sequence: Synthetic oligonucleotide
  source 1..20: mol_type = other DNA
tcattgcccaaaacaaagtg

SEQ ID NO: 5879 - DNA, 20 bp, synthetic construct
  misc_feature 1..20: note = Description of Artificial Sequence: Synthetic oligonucleotide
  source 1..20: mol_type = other DNA
cattgcccaaaacaaagtgg

SEQ ID NO: 5880 - DNA, 20 bp, synthetic construct
  misc_feature 1..20: note = Description of Artificial Sequence: Synthetic oligonucleotide
  source 1..20: mol_type = other DNA
attgcccaaaacaaagtggc

SEQ ID NO: 5881 - DNA, 20 bp, synthetic construct
  misc_feature 1..20: note = Description of Artificial Sequence: Synthetic oligonucleotide
  source 1..20: mol_type = other DNA
ttgcccaaaacaaagtggct

SEQ ID NO: 5882 - DNA, 20 bp, synthetic construct
  misc_feature 1..20: note = Description of Artificial Sequence: Synthetic oligonucleotide
  source 1..20: mol_type = other DNA
tgcccaaaacaaagtggcta

SEQ ID NO: 5883 - DNA, 20 bp, synthetic construct
  misc_feature 1..20: note = Description of Artificial Sequence: Synthetic oligonucleotide
  source 1..20: mol_type = other DNA
gcccaaaacaaagtggctat

SEQ ID NO: 5884 - DNA, 20 bp, synthetic construct
  misc_feature 1..20: note = Description of Artificial Sequence: Synthetic oligonucleotide
  source 1..20: mol_type = other DNA
cccaaaacaaagtggctata

SEQ ID NO: 5885 - DNA, 20 bp, synthetic construct
  misc_feature 1..20: note = Description of Artificial Sequence: Synthetic oligonucleotide
  source 1..20: mol_type = other DNA
ccaaaacaaagtggctatac

SEQ ID NO: 5886 - DNA, 20 bp, synthetic construct
  misc_feature 1..20: note = Description of Artificial Sequence: Synthetic oligonucleotide
  source 1..20: mol_type = other DNA
caaaacaaagtggctatact

SEQ ID NO: 5887 - DNA, 20 bp, synthetic construct
  misc_feature 1..20: note = Description of Artificial Sequence: Synthetic oligonucleotide
  source 1..20: mol_type = other DNA
aaaacaaagtggctatactc

SEQ ID NO: 5888 - DNA, 20 bp, synthetic construct
  misc_feature 1..20: note = Description of Artificial Sequence: Synthetic oligonucleotide
  source 1..20: mol_type = other DNA
aaacaaagtggctatactca

SEQ ID NO: 5889 - DNA, 20 bp, synthetic construct
  misc_feature 1..20: note = Description of Artificial Sequence: Synthetic oligonucleotide
  source 1..20: mol_type = other DNA
aacaaagtggctatactcag

SEQ ID NO: 5890 - DNA, 20 bp, synthetic construct
  misc_feature 1..20: note = Description of Artificial Sequence: Synthetic oligonucleotide
  source 1..20: mol_type = other DNA
acaaagtggctatactcagc

SEQ ID NO: 5891 - DNA, 20 bp, synthetic construct
  misc_feature 1..20: note = Description of Artificial Sequence: Synthetic oligonucleotide
  source 1..20: mol_type = other DNA
caaagtggctatactcagcg

SEQ ID NO: 5892 - DNA, 20 bp, synthetic construct
  misc_feature 1..20: note = Description of Artificial Sequence: Synthetic oligonucleotide
  source 1..20: mol_type = other DNA
aaagtggctatactcagcgt

SEQ ID NO: 5893 - DNA, 20 bp, synthetic construct
  misc_feature 1..20: note = Description of Artificial Sequence: Synthetic oligonucleotide
  source 1..20: mol_type = other DNA
aagtggctatactcagcgta

SEQ ID NO: 5894 - DNA, 20 bp, synthetic construct
  misc_feature 1..20: note = Description of Artificial Sequence: Synthetic oligonucleotide
  source 1..20: mol_type = other DNA
agtggctatactcagcgtag

SEQ ID NO: 5895 - DNA, 20 bp, synthetic construct
  misc_feature 1..20: note = Description of Artificial Sequence: Synthetic oligonucleotide
  source 1..20: mol_type = other DNA
gtggctatactcagcgtagc

SEQ ID NO: 5896 - DNA, 20 bp, synthetic construct
  misc_feature 1..20: note = Description of Artificial Sequence: Synthetic oligonucleotide
  source 1..20: mol_type = other DNA
tggctatactcagcgtagcg

SEQ ID NO: 5897 - DNA, 20 bp, synthetic construct
  misc_feature 1..20: note = Description of Artificial Sequence: Synthetic oligonucleotide
  source 1..20: mol_type = other DNA
ggctatactcagcgtagcgc

SEQ ID NO: 5898 - DNA, 20 bp, synthetic construct
  misc_feature 1..20: note = Description of Artificial Sequence: Synthetic oligonucleotide
  source 1..20: mol_type = other DNA
gctatactcagcgtagcgca

SEQ ID NO: 5899 - DNA, 20 bp, synthetic construct
  misc_feature 1..20: note = Description of Artificial Sequence: Synthetic oligonucleotide
  source 1..20: mol_type = other DNA
ctatactcagcgtagcgcag

SEQ ID NO: 5900 - DNA, 20 bp, synthetic construct
  misc_feature 1..20: note = Description of Artificial Sequence: Synthetic oligonucleotide
  source 1..20: mol_type = other DNA
tatactcagcgtagcgcagg

SEQ ID NO: 5901 - DNA, 20 bp, synthetic construct
  misc_feature 1..20: note = Description of Artificial Sequence: Synthetic oligonucleotide
  source 1..20: mol_type = other DNA
atactcagcgtagcgcaggt

SEQ ID NO: 5902 - DNA, 20 bp, synthetic construct
  misc_feature 1..20: note = Description of Artificial Sequence: Synthetic oligonucleotide
  source 1..20: mol_type = other DNA
tactcagcgtagcgcaggtt

SEQ ID NO: 5903 - DNA, 20 bp, synthetic construct
  misc_feature 1..20: note = Description of Artificial Sequence: Synthetic oligonucleotide
  source 1..20: mol_type = other DNA
actcagcgtagcgcaggttg

SEQ ID NO: 5904 - DNA, 20 bp, synthetic construct
  misc_feature 1..20: note = Description of Artificial Sequence: Synthetic oligonucleotide
  source 1..20: mol_type = other DNA
ctcagcgtagcgcaggttgc

SEQ ID NO: 5905 - DNA, 20 bp, synthetic construct
  misc_feature 1..20: note = Description of Artificial Sequence: Synthetic oligonucleotide
  source 1..20: mol_type = other DNA
tcagcgtagcgcaggttgcc

SEQ ID NO: 5906 - DNA, 20 bp, synthetic construct
  misc_feature 1..20: note = Description of Artificial Sequence: Synthetic oligonucleotide
  source 1..20: mol_type = other DNA
cagcgtagcgcaggttgccc

SEQ ID NO: 5907 - DNA, 20 bp, synthetic construct
  misc_feature 1..20: note = Description of Artificial Sequence: Synthetic oligonucleotide
  source 1..20: mol_type = other DNA
agcgtagcgcaggttgccct

SEQ ID NO: 5908 - DNA, 20 bp, synthetic construct
  misc_feature 1..20: note = Description of Artificial Sequence: Synthetic oligonucleotide
  source 1..20: mol_type = other DNA
gcgtagcgcaggttgccctc

SEQ ID NO: 5909 - DNA, 20 bp, synthetic construct
  misc_feature 1..20: note = Description of Artificial Sequence: Synthetic oligonucleotide
  source 1..20: mol_type = other DNA
cgtagcgcaggttgccctcc

SEQ ID NO: 5910 - DNA, 20 bp, synthetic construct
  misc_feature 1..20: note = Description of Artificial Sequence: Synthetic oligonucleotide
  source 1..20: mol_type = other DNA
gtagcgcaggttgccctccc

SEQ ID NO: 5911 - DNA, 20 bp, synthetic construct
  misc_feature 1..20: note = Description of Artificial Sequence: Synthetic oligonucleotide
  source 1..20: mol_type = other DNA
tagcgcaggttgccctccca

SEQ ID NO: 5912 - DNA, 20 bp, synthetic construct
  misc_feature 1..20: note = Description of Artificial Sequence: Synthetic oligonucleotide
  source 1..20: mol_type = other DNA
agcgcaggttgccctcccag

SEQ ID NO: 5913 - DNA, 20 bp, synthetic construct
  misc_feature 1..20: note = Description of Artificial Sequence: Synthetic oligonucleotide
  source 1..20: mol_type = other DNA
gcgcaggttgccctcccagt

SEQ ID NO: 5914 - DNA, 20 bp, synthetic construct
  misc_feature 1..20: note = Description of Artificial Sequence: Synthetic oligonucleotide
  source 1..20: mol_type = other DNA
cgcaggttgccctcccagtc

SEQ ID NO: 5915 - DNA, 20 bp, synthetic construct
  misc_feature 1..20: note = Description of Artificial Sequence: Synthetic oligonucleotide
  source 1..20: mol_type = other DNA
gcaggttgccctcccagtcc

SEQ ID NO: 5916 - DNA, 20 bp, synthetic construct
  misc_feature 1..20: note = Description of Artificial Sequence: Synthetic oligonucleotide
  source 1..20: mol_type = other DNA
caggttgccctcccagtcct

SEQ ID NO: 5917 - DNA, 20 bp, synthetic construct
  misc_feature 1..20: note = Description of Artificial Sequence: Synthetic oligonucleotide
  source 1..20: mol_type = other DNA
aggttgccctcccagtcctg

SEQ ID NO: 5918 - DNA, 20 bp, synthetic construct
  misc_feature 1..20: note = Description of Artificial Sequence: Synthetic oligonucleotide
  source 1..20: mol_type = other DNA
ggttgccctcccagtcctgt

SEQ ID NO: 5919 - DNA, 20 bp, synthetic construct
  misc_feature 1..20: note = Description of Artificial Sequence: Synthetic oligonucleotide
  source 1..20: mol_type = other DNA
gttgccctcccagtcctgtc

SEQ ID NO: 5920 - DNA, 20 bp, synthetic construct
  misc_feature 1..20: note = Description of Artificial Sequence: Synthetic oligonucleotide
  source 1..20: mol_type = other DNA
ttgccctcccagtcctgtca

SEQ ID NO: 5921 - DNA, 20 bp, synthetic construct
  misc_feature 1..20: note = Description of Artificial Sequence: Synthetic oligonucleotide
  source 1..20: mol_type = other DNA
tgccctcccagtcctgtcag

SEQ ID NO: 5922 - DNA, 20 bp, synthetic construct
  misc_feature 1..20: note = Description of Artificial Sequence: Synthetic oligonucleotide
  source 1..20: mol_type = other DNA
gccctcccagtcctgtcagg

SEQ ID NO: 5923 - DNA, 20 bp, synthetic construct
  misc_feature 1..20: note = Description of Artificial Sequence: Synthetic oligonucleotide
  source 1..20: mol_type = other DNA
ccctcccagtcctgtcagga

SEQ ID NO: 5924 - DNA, 20 bp, synthetic construct
  misc_feature 1..20: note = Description of Artificial Sequence: Synthetic oligonucleotide
  source 1..20: mol_type = other DNA
cctcccagtcctgtcaggag

SEQ ID NO: 5925 - DNA, 20 bp, synthetic construct
  misc_feature 1..20: note = Description of Artificial Sequence: Synthetic oligonucleotide
  source 1..20: mol_type = other DNA
ctcccagtcctgtcaggagg

SEQ ID NO: 5926 - DNA, 20 bp, synthetic construct
  misc_feature 1..20: note = Description of Artificial Sequence: Synthetic oligonucleotide
  source 1..20: mol_type = other DNA
tcccagtcctgtcaggagga

SEQ ID NO: 5927 - DNA, 20 bp, synthetic construct
  misc_feature 1..20: note = Description of Artificial Sequence: Synthetic oligonucleotide
  source 1..20: mol_type = other DNA
cccagtcctgtcaggaggag

SEQ ID NO: 5928 - DNA, 20 bp, synthetic construct
  misc_feature 1..20: note = Description of Artificial Sequence: Synthetic oligonucleotide
  source 1..20: mol_type = other DNA
ccagtcctgtcaggaggagc

SEQ ID NO: 5929 - DNA, 20 bp, synthetic construct
  misc_feature 1..20: note = Description of Artificial Sequence: Synthetic oligonucleotide
  source 1..20: mol_type = other DNA
cagtcctgtcaggaggagca

SEQ ID NO: 5930 - DNA, 20 bp, synthetic construct
  misc_feature 1..20: note = Description of Artificial Sequence: Synthetic oligonucleotide
  source 1..20: mol_type = other DNA
agtcctgtcaggaggagcag

SEQ ID NO: 5931 - DNA, 20 bp, synthetic construct
  misc_feature 1..20: note = Description of Artificial Sequence: Synthetic oligonucleotide
  source 1..20: mol_type = other DNA
gtcctgtcaggaggagcaga

SEQ ID NO: 5932 - DNA, 20 bp, synthetic construct
  misc_feature 1..20: note = Description of Artificial Sequence: Synthetic oligonucleotide
  source 1..20: mol_type = other DNA
tcctgtcaggaggagcagag

SEQ ID NO: 5933 - DNA, 20 bp, synthetic construct
  misc_feature 1..20: note = Description of Artificial Sequence: Synthetic oligonucleotide
  source 1..20: mol_type = other DNA
cctgtcaggaggagcagagc

SEQ ID NO: 5934 - DNA, 20 bp, synthetic construct
  misc_feature 1..20: note = Description of Artificial Sequence: Synthetic oligonucleotide
  source 1..20: mol_type = other DNA
ctgtcaggaggagcagagcc

SEQ ID NO: 5935 - DNA, 20 bp, synthetic construct
  misc_feature 1..20: note = Description of Artificial Sequence: Synthetic oligonucleotide
  source 1..20: mol_type = other DNA
tgtcaggaggagcagagcct

SEQ ID NO: 5936 - DNA, 20 bp, synthetic construct
  misc_feature 1..20: note = Description of Artificial Sequence: Synthetic oligonucleotide
  source 1..20: mol_type = other DNA
gtcaggaggagcagagcctt

SEQ ID NO: 5937 - DNA, 20 bp, synthetic construct
  misc_feature 1..20: note = Description of Artificial Sequence: Synthetic oligonucleotide
  source 1..20: mol_type = other DNA
tcaggaggagcagagcctta

SEQ ID NO: 5938 - DNA, 20 bp, synthetic construct
  misc_feature 1..20: note = Description of Artificial Sequence: Synthetic oligonucleotide
  source 1..20: mol_type = other DNA
caggaggagcagagccttaa

SEQ ID NO: 5939 - DNA, 20 bp, synthetic construct
  misc_feature 1..20: note = Description of Artificial Sequence: Synthetic oligonucleotide
  source 1..20: mol_type = other DNA
aggaggagcagagccttaaa

SEQ ID NO: 5940 - DNA, 20 bp, synthetic construct
  misc_feature 1..20: note = Description of Artificial Sequence: Synthetic oligonucleotide
  source 1..20: mol_type = other DNA
ggaggagcagagccttaaag

SEQ ID NO: 5941 - DNA, 20 bp, synthetic construct
  misc_feature 1..20: note = Description of Artificial Sequence: Synthetic oligonucleotide
  source 1..20: mol_type = other DNA
gaggagcagagccttaaaga

SEQ ID NO: 5942 - DNA, 20 bp, synthetic construct
  misc_feature 1..20: note = Description of Artificial Sequence: Synthetic oligonucleotide
  source 1..20: mol_type = other DNA
aggagcagagccttaaagaa

SEQ ID NO: 5943 - DNA, 20 bp, synthetic construct
  misc_feature 1..20: note = Description of Artificial Sequence: Synthetic oligonucleotide
  source 1..20: mol_type = other DNA
ggagcagagccttaaagaaa

SEQ ID NO: 5944 - DNA, 20 bp, synthetic construct
  misc_feature 1..20: note = Description of Artificial Sequence: Synthetic oligonucleotide
  source 1..20: mol_type = other DNA
gagcagagccttaaagaaag

SEQ ID NO: 5945 - DNA, 20 bp, synthetic construct
  misc_feature 1..20: note = Description of Artificial Sequence: Synthetic oligonucleotide
  source 1..20: mol_type = other DNA
agcagagccttaaagaaagt

SEQ ID NO: 5946 - DNA, 20 bp, synthetic construct
  misc_feature 1..20: note = Description of Artificial Sequence: Synthetic oligonucleotide
  source 1..20: mol_type = other DNA
gcagagccttaaagaaagtg

SEQ ID NO: 5947 - DNA, 20 bp, synthetic construct
  misc_feature 1..20: note = Description of Artificial Sequence: Synthetic oligonucleotide
  source 1..20: mol_type = other DNA
cagagccttaaagaaagtgc

SEQ ID NO: 5948 - DNA, 20 bp, synthetic construct
  misc_feature 1..20: note = Description of Artificial Sequence: Synthetic oligonucleotide
  source 1..20: mol_type = other DNA
agagccttaaagaaagtgca

SEQ ID NO: 5949 - DNA, 20 bp, synthetic construct
  misc_feature 1..20: note = Description of Artificial Sequence: Synthetic oligonucleotide
  source 1..20: mol_type = other DNA
gagccttaaagaaagtgcag

SEQ ID NO: 5950 - DNA, 20 bp, synthetic construct
  misc_feature 1..20: note = Description of Artificial Sequence: Synthetic oligonucleotide
  source 1..20: mol_type = other DNA
agccttaaagaaagtgcagc

SEQ ID NO: 5951 - DNA, 20 bp, synthetic construct
  misc_feature 1..20: note = Description of Artificial Sequence: Synthetic oligonucleotide
  source 1..20: mol_type = other DNA
gccttaaagaaagtgcagca

SEQ ID NO: 5952 - DNA, 20 bp, synthetic construct
  misc_feature 1..20: note = Description of Artificial Sequence: Synthetic oligonucleotide
  source 1..20: mol_type = other DNA
ccttaaagaaagtgcagcag

SEQ ID NO: 5953 - DNA, 20 bp, synthetic construct
  misc_feature 1..20: note = Description of Artificial Sequence: Synthetic oligonucleotide
  source 1..20: mol_type = other DNA
cttaaagaaagtgcagcagg

SEQ ID NO: 5954 - DNA, 20 bp, synthetic construct
  misc_feature 1..20: note = Description of Artificial Sequence: Synthetic oligonucleotide
  source 1..20: mol_type = other DNA
ttaaagaaagtgcagcaggc

SEQ ID NO: 5955 - DNA, 20 bp, synthetic construct
  misc_feature 1..20: note = Description of Artificial Sequence: Synthetic oligonucleotide
  source 1..20: mol_type = other DNA
taaagaaagtgcagcaggct

SEQ ID NO: 5956 - DNA, 20 bp, synthetic construct
  misc_feature 1..20: note = Description of Artificial Sequence: Synthetic oligonucleotide
  source 1..20: mol_type = other DNA
aaagaaagtgcagcaggctc

SEQ ID NO: 5957 - DNA, 20 bp, synthetic construct
  misc_feature 1..20: note = Description of Artificial Sequence: Synthetic oligonucleotide
  source 1..20: mol_type = other DNA
aagaaagtgcagcaggctcc

SEQ ID NO: 5958 - DNA, 20 bp, synthetic construct
  misc_feature 1..20: note = Description of Artificial Sequence: Synthetic oligonucleotide
  source 1..20: mol_type = other DNA
agaaagtgcagcaggctcca

SEQ ID NO: 5959 - DNA, 20 bp, synthetic construct
  misc_feature 1..20: note = Description of Artificial Sequence: Synthetic oligonucleotide
  source 1..20: mol_type = other DNA
gaaagtgcagcaggctccat

SEQ ID NO: 5960 - DNA, 20 bp, synthetic construct
  misc_feature 1..20: note = Description of Artificial Sequence: Synthetic oligonucleotide
  source 1..20: mol_type = other DNA
aaagtgcagcaggctccatt

SEQ ID NO: 5961 - DNA, 20 bp, synthetic construct
  misc_feature 1..20: note = Description of Artificial Sequence: Synthetic oligonucleotide
  source 1..20: mol_type = other DNA
aagtgcagcaggctccattt

SEQ ID NO: 5962 - DNA, 20 bp, synthetic construct
  misc_feature 1..20: note = Description of Artificial Sequence: Synthetic oligonucleotide
  source 1..20: mol_type = other DNA
agtgcagcaggctccatttc

SEQ ID NO: 5963 - DNA, 20 bp, synthetic construct
  misc_feature 1..20: note = Description of Artificial Sequence: Synthetic oligonucleotide
  source 1..20: mol_type = other DNA
gtgcagcaggctccatttca

SEQ ID NO: 5964 - DNA, 20 bp, synthetic construct
  misc_feature 1..20: note = Description of Artificial Sequence: Synthetic oligonucleotide
  source 1..20: mol_type = other DNA
tgcagcaggctccatttcat

SEQ ID NO: 5965 - DNA, 20 bp, synthetic construct
  misc_feature 1..20: note = Description of Artificial Sequence: Synthetic oligonucleotide
  source 1..20: mol_type = other DNA
gcagcaggctccatttcatg

SEQ ID NO: 5966 - DNA, 20 bp, synthetic construct
  misc_feature 1..20: note = Description of Artificial Sequence: Synthetic oligonucleotide
  source 1..20: mol_type = other DNA
cagcaggctccatttcatgc

SEQ ID NO: 5967 - DNA, 20 bp, synthetic construct
  misc_feature 1..20: note = Description of Artificial Sequence: Synthetic oligonucleotide
  source 1..20: mol_type = other DNA
agcaggctccatttcatgct

SEQ ID NO: 5968 - DNA, 20 bp, synthetic construct
  misc_feature 1..20: note = Description of Artificial Sequence: Synthetic oligonucleotide
  source 1..20: mol_type = other DNA
gcaggctccatttcatgctg

SEQ ID NO: 5969 - DNA, 20 bp, synthetic construct
  misc_feature 1..20: note = Description of Artificial Sequence: Synthetic oligonucleotide
  source 1..20: mol_type = other DNA
caggctccatttcatgctgt

SEQ ID NO: 5970 - DNA, 20 bp, synthetic construct
  misc_feature 1..20: note = Description of Artificial Sequence: Synthetic oligonucleotide
  source 1..20: mol_type = other DNA
aggctccatttcatgctgtc

SEQ ID NO: 5971 - DNA, 20 bp, synthetic construct
  misc_feature 1..20: note = Description of Artificial Sequence: Synthetic oligonucleotide
  source 1..20: mol_type = other DNA
ggctccatttcatgctgtct

SEQ ID NO: 5972 - DNA, 20 bp, synthetic construct
  misc_feature 1..20: note = Description of Artificial Sequence: Synthetic oligonucleotide
  source 1..20: mol_type = other DNA
gctccatttcatgctgtctc

SEQ ID NO: 5973 - DNA, 20 bp, synthetic construct
  misc_feature 1..20: note = Description of Artificial Sequence: Synthetic oligonucleotide
  source 1..20: mol_type = other DNA
ctccatttcatgctgtctct

SEQ ID NO: 5974 - DNA, 20 bp, synthetic construct
  misc_feature 1..20: note = Description of Artificial Sequence: Synthetic oligonucleotide
  source 1..20: mol_type = other DNA
tccatttcatgctgtctcta

SEQ ID NO: 5975 - DNA, 20 bp, synthetic construct
  misc_feature 1..20: note = Description of Artificial Sequence: Synthetic oligonucleotide
  source 1..20: mol_type = other DNA
ccatttcatgctgtctctat

SEQ ID NO: 5976 - DNA, 20 bp, synthetic construct
  misc_feature 1..20: note = Description of Artificial Sequence: Synthetic oligonucleotide
  source 1..20: mol_type = other DNA
catttcatgctgtctctata

SEQ ID NO: 5977 - DNA, 20 bp, synthetic construct
  misc_feature 1..20: note = Description of Artificial Sequence: Synthetic oligonucleotide
  source 1..20: mol_type = other DNA
atttcatgctgtctctatac

SEQ ID NO: 5978 - DNA, 20 bp, synthetic construct
  misc_feature 1..20: note = Description of Artificial Sequence: Synthetic oligonucleotide
  source 1..20: mol_type = other DNA
tttcatgctgtctctatacc

SEQ ID NO: 5979 - DNA, 20 bp, synthetic construct
  misc_feature 1..20: note = Description of Artificial Sequence: Synthetic oligonucleotide
  source 1..20: mol_type = other DNA
ttcatgctgtctctataccc

SEQ ID NO: 5980 - DNA, 20 bp, synthetic construct
  misc_feature 1..20: note = Description of Artificial Sequence: Synthetic oligonucleotide
  source 1..20: mol_type = other DNA
tcatgctgtctctatacccc

SEQ ID NO: 5981 - DNA, 20 bp, synthetic construct
  misc_feature 1..20: note = Description of Artificial Sequence: Synthetic oligonucleotide
  source 1..20: mol_type = other DNA
catgctgtctctatacccct

SEQ ID NO: 5982 - DNA, 20 bp, synthetic construct
  misc_feature 1..20: note = Description of Artificial Sequence: Synthetic oligonucleotide
  source 1..20: mol_type = other DNA
atgctgtctctatacccctt

SEQ ID NO: 5983 - DNA, 20 bp, synthetic construct
  misc_feature 1..20: note = Description of Artificial Sequence: Synthetic oligonucleotide
  source 1..20: mol_type = other DNA
tgctgtctctataccccttc

SEQ ID NO: 5984 - DNA, 20 bp, synthetic construct
  misc_feature 1..20: note = Description of Artificial Sequence: Synthetic oligonucleotide
  source 1..20: mol_type = other DNA
gctgtctctataccccttct

SEQ ID NO: 5985 - DNA, 20 bp, synthetic construct
  misc_feature 1..20: note = Description of Artificial Sequence: Synthetic oligonucleotide
  source 1..20: mol_type = other DNA
ctgtctctataccccttctc

SEQ ID NO: 5986 - DNA, 20 bp, synthetic construct
  misc_feature 1..20: note = Description of Artificial Sequence: Synthetic oligonucleotide
  source 1..20: mol_type = other DNA
tgtctctataccccttctct

SEQ ID NO: 5987 - DNA, 20 bp, synthetic construct
  misc_feature 1..20: note = Description of Artificial Sequence: Synthetic oligonucleotide
  source 1..20: mol_type = other DNA
gtctctataccccttctctc

SEQ ID NO: 5988 - DNA, 20 bp, synthetic construct
  misc_feature 1..20: note = Description of Artificial Sequence: Synthetic oligonucleotide
  source 1..20: mol_type = other DNA
tctctataccccttctctcc

SEQ ID NO: 5989 - DNA, 20 bp, synthetic construct
  misc_feature 1..20: note = Description of Artificial Sequence: Synthetic oligonucleotide
  source 1..20: mol_type = other DNA
ctctataccccttctctcct

SEQ ID NO: 5990 - DNA, 20 bp, synthetic construct
  misc_feature 1..20: note = Description of Artificial Sequence: Synthetic oligonucleotide
  source 1..20: mol_type = other DNA
tctataccccttctctcctg

SEQ ID NO: 5991 - DNA, 20 bp, synthetic construct
  misc_feature 1..20: note = Description of Artificial Sequence: Synthetic oligonucleotide
  source 1..20: mol_type = other DNA
ctataccccttctctcctga

SEQ ID NO: 5992 - DNA, 20 bp, synthetic construct
  misc_feature 1..20: note = Description of Artificial Sequence: Synthetic oligonucleotide
  source 1..20: mol_type = other DNA
tataccccttctctcctgac

SEQ ID NO: 5993 - DNA, 20 bp, synthetic construct
  misc_feature 1..20: note = Description of Artificial Sequence: Synthetic oligonucleotide
  source 1..20: mol_type = other DNA
ataccccttctctcctgaca

SEQ ID NO: 5994 - DNA, 20 bp, synthetic construct
  misc_feature 1..20: note = Description of Artificial Sequence: Synthetic oligonucleotide
  source 1..20: mol_type = other DNA
taccccttctctcctgacag

SEQ ID NO: 5995 - DNA, 20 bp, synthetic construct
  misc_feature 1..20: note = Description of Artificial Sequence: Synthetic oligonucleotide
  source 1..20: mol_type = other DNA
accccttctctcctgacagt

SEQ ID NO: 5996 - DNA, 20 bp, synthetic construct
  misc_feature 1..20: note = Description of Artificial Sequence: Synthetic oligonucleotide
  source 1..20: mol_type = other DNA
ccccttctctcctgacagtc

SEQ ID NO: 5997 - DNA, 20 bp, synthetic construct
  misc_feature 1..20: note = Description of Artificial Sequence: Synthetic oligonucleotide
  source 1..20: mol_type = other DNA
cccttctctcctgacagtcc

SEQ ID NO: 5998 - DNA, 20 bp, synthetic construct
  misc_feature 1..20: note = Description of Artificial Sequence: Synthetic oligonucleotide
  source 1..20: mol_type = other DNA
ccttctctcctgacagtccc

SEQ ID NO: 5999 - DNA, 20 bp, synthetic construct
  misc_feature 1..20: note = Description of Artificial Sequence: Synthetic oligonucleotide
  source 1..20: mol_type = other DNA
cttctctcctgacagtccca

SEQ ID NO: 6000 - DNA, 20 bp, synthetic construct
  misc_feature 1..20: note = Description of Artificial Sequence: Synthetic oligonucleotide
  source 1..20: mol_type = other DNA
ttctctcctgacagtcccat

SEQ ID NO: 6001 - DNA, 20 bp, synthetic construct
  misc_feature 1..20: note = Description of Artificial Sequence: Synthetic oligonucleotide
  source 1..20: mol_type = other DNA
tctctcctgacagtcccata

SEQ ID NO: 6002 - DNA, 20 bp, synthetic construct
  misc_feature 1..20: note = Description of Artificial Sequence: Synthetic oligonucleotide
  source 1..20: mol_type = other DNA
ctctcctgacagtcccatag

SEQ ID NO: 6003 - DNA, 20 bp, synthetic construct
  misc_feature 1..20: note = Description of Artificial Sequence: Synthetic oligonucleotide
  source 1..20: mol_type = other DNA
tctcctgacagtcccatagc

SEQ ID NO: 6004 - DNA, 20 bp, synthetic construct
  misc_feature 1..20: note = Description of Artificial Sequence: Synthetic oligonucleotide
  source 1..20: mol_type = other DNA
ctcctgacagtcccatagcc

SEQ ID NO: 6005 - DNA, 20 bp, synthetic construct
  misc_feature 1..20: note = Description of Artificial Sequence: Synthetic oligonucleotide
  source 1..20: mol_type = other DNA
tcctgacagtcccatagcca

SEQ ID NO: 6006 - DNA, 20 bp, synthetic construct
  misc_feature 1..20: note = Description of Artificial Sequence: Synthetic oligonucleotide
  source 1..20: mol_type = other DNA
cctgacagtcccatagccaa

SEQ ID NO: 6007 - DNA, 20 bp, synthetic construct
  misc_feature 1..20: note = Description of Artificial Sequence: Synthetic oligonucleotide
  source 1..20: mol_type = other DNA
ctgacagtcccatagccaaa

SEQ ID NO: 6008 - DNA, 20 bp, synthetic construct
  misc_feature 1..20: note = Description of Artificial Sequence: Synthetic oligonucleotide
  source 1..20: mol_type = other DNA
tgacagtcccatagccaaac

SEQ ID NO: 6009 - DNA, 20 bp, synthetic construct
  misc_feature 1..20: note = Description of Artificial Sequence: Synthetic oligonucleotide
  source 1..20: mol_type = other DNA
gacagtcccatagccaaaca

SEQ ID NO: 6010 - DNA, 20 bp, synthetic construct
  misc_feature 1..20: note = Description of Artificial Sequence: Synthetic oligonucleotide
  source 1..20: mol_type = other DNA
acagtcccatagccaaacat

SEQ ID NO: 6011 - DNA, 20 bp, synthetic construct
  misc_feature 1..20: note = Description of Artificial Sequence: Synthetic oligonucleotide
  source 1..20: mol_type = other DNA
cagtcccatagccaaacatc

SEQ ID NO: 6012 - DNA, 20 bp, synthetic construct
  misc_feature 1..20: note = Description of Artificial Sequence: Synthetic oligonucleotide
  source 1..20: mol_type = other DNA
agtcccatagccaaacatct

SEQ ID NO: 6013 - DNA, 20 bp, synthetic construct
  misc_feature 1..20: note = Description of Artificial Sequence: Synthetic oligonucleotide
  source 1..20: mol_type = other DNA
gtcccatagccaaacatctt

SEQ ID NO: 6014 - DNA, 20 bp, synthetic construct
  misc_feature 1..20: note = Description of Artificial Sequence: Synthetic oligonucleotide
  source 1..20: mol_type = other DNA
tcccatagccaaacatcttt

SEQ ID NO: 6015 - DNA, 20 bp, synthetic construct
  misc_feature 1..20: note = Description of Artificial Sequence: Synthetic oligonucleotide
  source 1..20: mol_type = other DNA
cccatagccaaacatctttt

SEQ ID NO: 6016 - DNA, 20 bp, synthetic construct
  misc_feature 1..20: note = Description of Artificial Sequence: Synthetic oligonucleotide
  source 1..20: mol_type = other DNA
ccatagccaaacatcttttt

SEQ ID NO: 6017 - DNA, 20 bp, synthetic construct
  misc_feature 1..20: note = Description of Artificial Sequence: Synthetic oligonucleotide
  source 1..20: mol_type = other DNA
catagccaaacatcttttta

SEQ ID NO: 6018 - DNA, 20 bp, synthetic construct
  misc_feature 1..20: note = Description of Artificial Sequence: Synthetic oligonucleotide
  source 1..20: mol_type = other DNA
atagccaaacatctttttat

SEQ ID NO: 6019 - DNA, 20 bp, synthetic construct
  misc_feature 1..20: note = Description of Artificial Sequence: Synthetic oligonucleotide
  source 1..20: mol_type = other DNA
tagccaaacatctttttata

SEQ ID NO: 6020 - DNA, 20 bp, synthetic construct
  misc_feature 1..20: note = Description of Artificial Sequence: Synthetic oligonucleotide
  source 1..20: mol_type = other DNA
agccaaacatctttttatag

SEQ ID NO: 6021 - DNA, 20 bp, synthetic construct
  misc_feature 1..20: note = Description of Artificial Sequence: Synthetic oligonucleotide
  source 1..20: mol_type = other DNA
gccaaacatctttttatagg

SEQ ID NO: 6022 - DNA, 20 bp, synthetic construct
  misc_feature 1..20: note = Description of Artificial Sequence: Synthetic oligonucleotide
  source 1..20: mol_type = other DNA
ccaaacatctttttataggt

SEQ ID NO: 6023 - DNA, 20 bp, synthetic construct
  misc_feature 1..20: note = Description of Artificial Sequence: Synthetic oligonucleotide
  source 1..20: mol_type = other DNA
caaacatctttttataggtg

SEQ ID NO: 6024 - DNA, 20 bp, synthetic construct
  misc_feature 1..20: note = Description of Artificial Sequence: Synthetic oligonucleotide
  source 1..20: mol_type = other DNA
aaacatctttttataggtgt

SEQ ID NO: 6025 - DNA, 20 bp, synthetic construct
  misc_feature 1..20: note = Description of Artificial Sequence: Synthetic oligonucleotide
  source 1..20: mol_type = other DNA
aacatctttttataggtgtg

SEQ ID NO: 6026 - DNA, 20 bp, synthetic construct
  misc_feature 1..20: note = Description of Artificial Sequence: Synthetic oligonucleotide
  source 1..20: mol_type = other DNA
acatctttttataggtgtga

SEQ ID NO: 6027 - DNA, 20 bp, synthetic construct
  misc_feature 1..20: note = Description of Artificial Sequence: Synthetic oligonucleotide
  source 1..20: mol_type = other DNA
catctttttataggtgtgaa

SEQ ID NO: 6028 - DNA, 20 bp, synthetic construct
  misc_feature 1..20: note = Description of Artificial Sequence: Synthetic oligonucleotide
  source 1..20: mol_type = other DNA
atctttttataggtgtgaat

SEQ ID NO: 6029 - DNA, 20 bp, synthetic construct
  misc_feature 1..20: note = Description of Artificial Sequence: Synthetic oligonucleotide
  source 1..20: mol_type = other DNA
tctttttataggtgtgaatc

SEQ ID NO: 6030 - DNA, 20 bp, synthetic construct
  misc_feature 1..20: note = Description of Artificial Sequence: Synthetic oligonucleotide
  source 1..20: mol_type = other DNA
ctttttataggtgtgaatct

SEQ ID NO: 6031 - DNA, 20 bp, synthetic construct
  misc_feature 1..20: note = Description of Artificial Sequence: Synthetic oligonucleotide
  source 1..20: mol_type = other DNA
tttttataggtgtgaatcta

SEQ ID NO: 6032 - DNA, 20 bp, synthetic construct
  misc_feature 1..20: note = Description of Artificial Sequence: Synthetic oligonucleotide
  source 1..20: mol_type = other DNA
ttttataggtgtgaatctaa

SEQ ID NO: 6033 - DNA, 20 bp, synthetic construct
  misc_feature 1..20: note = Description of Artificial Sequence: Synthetic oligonucleotide
  source 1..20: mol_type = other DNA
tttataggtgtgaatctaat

SEQ ID NO: 6034 - DNA, 20 bp, synthetic construct
  misc_feature 1..20: note = Description of Artificial Sequence: Synthetic oligonucleotide
  source 1..20: mol_type = other DNA
ttataggtgtgaatctaata

SEQ ID NO: 6035 - DNA, 20 bp, synthetic construct
  misc_feature 1..20: note = Description of Artificial Sequence: Synthetic oligonucleotide
  source 1..20: mol_type = other DNA
tataggtgtgaatctaataa

SEQ ID NO: 6036 - DNA, 20 bp, synthetic construct
  misc_feature 1..20: note = Description of Artificial Sequence: Synthetic oligonucleotide
  source 1..20: mol_type = other DNA
ataggtgtgaatctaataag

SEQ ID NO: 6037 - DNA, 20 bp, synthetic construct
  misc_feature 1..20: note = Description of Artificial Sequence: Synthetic oligonucleotide
  source 1..20: mol_type = other DNA
taggtgtgaatctaataaga

SEQ ID NO: 6038 - DNA, 20 bp, synthetic construct
  misc_feature 1..20: note = Description of Artificial Sequence: Synthetic oligonucleotide
  source 1..20: mol_type = other DNA
aggtgtgaatctaataagac

SEQ ID NO: 6039 - DNA, 20 bp, synthetic construct
  misc_feature 1..20: note = Description of Artificial Sequence: Synthetic oligonucleotide
  source 1..20: mol_type = other DNA
ggtgtgaatctaataagact

SEQ ID NO: 6040 - DNA, 20 bp, synthetic construct
  misc_feature 1..20: note = Description of Artificial Sequence: Synthetic oligonucleotide
  source 1..20: mol_type = other DNA
gtgtgaatctaataagactt

SEQ ID NO: 6041 - DNA, 20 bp, synthetic construct
  misc_feature 1..20: note = Description of Artificial Sequence: Synthetic oligonucleotide
  source 1..20: mol_type = other DNA
tgtgaatctaataagacttt

SEQ ID NO: 6042 - DNA, 20 bp, synthetic construct
  misc_feature 1..20: note = Description of Artificial Sequence: Synthetic oligonucleotide
  source 1..20: mol_type = other DNA
gtgaatctaataagacttta

SEQ ID NO: 6043 - DNA, 20 bp, synthetic construct
  misc_feature 1..20: note = Description of Artificial Sequence: Synthetic oligonucleotide
  source 1..20: mol_type = other DNA
tgaatctaataagactttat

SEQ ID NO: 6044 - DNA, 20 bp, synthetic construct
  misc_feature 1..20: note = Description of Artificial Sequence: Synthetic oligonucleotide
  source 1..20: mol_type = other DNA
gaatctaataagactttatt

SEQ ID NO: 6045 - DNA, 20 bp, synthetic construct
  misc_feature 1..20: note = Description of Artificial Sequence: Synthetic oligonucleotide
  source 1..20: mol_type = other DNA
aatctaataagactttatta

SEQ ID NO: 6046 - DNA, 20 bp, synthetic construct
  misc_feature 1..20: note = Description of Artificial Sequence: Synthetic oligonucleotide
  source 1..20: mol_type = other DNA
atctaataagactttattac

SEQ ID NO: 6047 - DNA, 20 bp, synthetic construct
  misc_feature 1..20: note = Description of Artificial Sequence: Synthetic oligonucleotide
  source 1..20: mol_type = other DNA
tctaataagactttattact

SEQ ID NO: 6048 - DNA, 20 bp, synthetic construct
  misc_feature 1..20: note = Description of Artificial Sequence: Synthetic oligonucleotide
  source 1..20: mol_type = other DNA
ctaataagactttattactt

SEQ ID NO: 6049 - DNA, 20 bp, synthetic construct
  misc_feature 1..20: note = Description of Artificial Sequence: Synthetic oligonucleotide
  source 1..20: mol_type = other DNA
taataagactttattacttg

SEQ ID NO: 6050 - DNA, 20 bp, synthetic construct
  misc_feature 1..20: note = Description of Artificial Sequence: Synthetic oligonucleotide
  source 1..20: mol_type = other DNA
aataagactttattacttgt

SEQ ID NO: 6051 - DNA, 20 bp, synthetic construct
  misc_feature 1..20: note = Description of Artificial Sequence: Synthetic oligonucleotide
  source 1..20: mol_type = other DNA
ataagactttattacttgtt

SEQ ID NO: 6052 - DNA, 20 bp, synthetic construct
  misc_feature 1..20: note = Description of Artificial Sequence: Synthetic oligonucleotide
  source 1..20: mol_type = other DNA
taagactttattacttgttt

SEQ ID NO: 6053 - DNA, 20 bp, synthetic construct
  misc_feature 1..20: note = Description of Artificial Sequence: Synthetic oligonucleotide
  source 1..20: mol_type = other DNA
aagactttattacttgttta

SEQ ID NO: 6054 - DNA, 20 bp, synthetic construct
  misc_feature 1..20: note = Description of Artificial Sequence: Synthetic oligonucleotide
  source 1..20: mol_type = other DNA
agactttattacttgtttac

SEQ ID NO: 6055 - DNA, 20 bp, synthetic construct
  misc_feature 1..20: note = Description of Artificial Sequence: Synthetic oligonucleotide
  source 1..20: mol_type = other DNA
gactttattacttgtttacc

SEQ ID NO: 6056 - DNA, 20 bp, synthetic construct
  misc_feature 1..20: note = Description of Artificial Sequence: Synthetic oligonucleotide
  source 1..20: mol_type = other DNA
actttattacttgtttacct

SEQ ID NO: 6057 - DNA, 20 bp, synthetic construct
  misc_feature 1..20: note = Description of Artificial Sequence: Synthetic oligonucleotide
  source 1..20: mol_type = other DNA
ctttattacttgtttacctc

SEQ ID NO: 6058 - DNA, 20 bp, synthetic construct
  misc_feature 1..20: note = Description of Artificial Sequence: Synthetic oligonucleotide
  source 1..20: mol_type = other DNA
tttattacttgtttacctcc

SEQ ID NO: 6059 - DNA, 20 bp, synthetic construct
  misc_feature 1..20: note = Description of Artificial Sequence: Synthetic oligonucleotide
  source 1..20: mol_type = other DNA
ttattacttgtttacctcca

SEQ ID NO: 6060 - DNA, 20 bp, synthetic construct
  misc_feature 1..20: note = Description of Artificial Sequence: Synthetic oligonucleotide
  source 1..20: mol_type = other DNA
tattacttgtttacctccag

SEQ ID NO: 6061 - DNA, 20 bp, synthetic construct
  misc_feature 1..20: note = Description of Artificial Sequence: Synthetic oligonucleotide
  source 1..20: mol_type = other DNA
attacttgtttacctccagt

SEQ ID NO: 6062 - DNA, 20 bp, synthetic construct
  misc_feature 1..20: note = Description of Artificial Sequence: Synthetic oligonucleotide
  source 1..20: mol_type = other DNA
ttacttgtttacctccagtt

SEQ ID NO: 6063 - DNA, 20 bp, synthetic construct
  misc_feature 1..20: note = Description of Artificial Sequence: Synthetic oligonucleotide
  source 1..20: mol_type = other DNA
tacttgtttacctccagttt

SEQ ID NO: 6064 - DNA, 20 bp, synthetic construct
  misc_feature 1..20: note = Description of Artificial Sequence: Synthetic oligonucleotide
  source 1..20: mol_type = other DNA
acttgtttacctccagttta

SEQ ID NO: 6065 - DNA, 20 bp, synthetic construct
  misc_feature 1..20: note = Description of Artificial Sequence: Synthetic oligonucleotide
  source 1..20: mol_type = other DNA
cttgtttacctccagtttac

SEQ ID NO: 6066 - DNA, 20 bp, synthetic construct
  misc_feature 1..20: note = Description of Artificial Sequence: Synthetic oligonucleotide
  source 1..20: mol_type = other DNA
ttgtttacctccagtttact

SEQ ID NO: 6067 - DNA, 20 bp, synthetic construct
  misc_feature 1..20: note = Description of Artificial Sequence: Synthetic oligonucleotide
  source 1..20: mol_type = other DNA
tgtttacctccagtttactg

SEQ ID NO: 6068 - DNA, 20 bp, synthetic construct
  misc_feature 1..20: note = Description of Artificial Sequence: Synthetic oligonucleotide
  source 1..20: mol_type = other DNA
gtttacctccagtttactgt

SEQ ID NO: 6069 - DNA, 20 bp, synthetic construct
  misc_feature 1..20: note = Description of Artificial Sequence: Synthetic oligonucleotide
  source 1..20: mol_type = other DNA
tttacctccagtttactgtg

SEQ ID NO: 6070 - DNA, 20 bp, synthetic construct
  misc_feature 1..20: note = Description of Artificial Sequence: Synthetic oligonucleotide
  source 1..20: mol_type = other DNA
ttacctccagtttactgtgt

SEQ ID NO: 6071 - DNA, 20 bp, synthetic construct
  misc_feature 1..20: note = Description of Artificial Sequence: Synthetic oligonucleotide
  source 1..20: mol_type = other DNA
tacctccagtttactgtgtt

SEQ ID NO: 6072 - DNA, 20 bp, synthetic construct
  misc_feature 1..20: note = Description of Artificial Sequence: Synthetic oligonucleotide
  source 1..20: mol_type = other DNA
acctccagtttactgtgtta

SEQ ID NO: 6073 - DNA, 20 bp, synthetic construct
  misc_feature 1..20: note = Description of Artificial Sequence: Synthetic oligonucleotide
  source 1..20: mol_type = other DNA
cctccagtttactgtgttaa

SEQ ID NO: 6074 - DNA, 20 bp, synthetic construct
  misc_feature 1..20: note = Description of Artificial Sequence: Synthetic oligonucleotide
  source 1..20: mol_type = other DNA
ctccagtttactgtgttaac

SEQ ID NO: 6075 - DNA, 20 bp, synthetic construct
  misc_feature 1..20: note = Description of Artificial Sequence: Synthetic oligonucleotide
  source 1..20: mol_type = other DNA
tccagtttactgtgttaacc

SEQ ID NO: 6076 - DNA, 20 bp, synthetic construct
  misc_feature 1..20: note = Description of Artificial Sequence: Synthetic oligonucleotide
  source 1..20: mol_type = other DNA
ccagtttactgtgttaacct

SEQ ID NO: 6077 - DNA, 20 bp, synthetic construct
  misc_feature 1..20: note = Description of Artificial Sequence: Synthetic oligonucleotide
  source 1..20: mol_type = other DNA
cagtttactgtgttaacctg

SEQ ID NO: 6078 - DNA, 20 bp, synthetic construct
  misc_feature 1..20: note = Description of Artificial Sequence: Synthetic oligonucleotide
  source 1..20: mol_type = other DNA
agtttactgtgttaacctgg

SEQ ID NO: 6079 - DNA, 20 bp, synthetic construct
  misc_feature 1..20: note = Description of Artificial Sequence: Synthetic oligonucleotide
  source 1..20: mol_type = other DNA
gtttactgtgttaacctggg

SEQ ID NO: 6080 - DNA, 20 bp, synthetic construct
  misc_feature 1..20: note = Description of Artificial Sequence: Synthetic oligonucleotide
  source 1..20: mol_type = other DNA
tttactgtgttaacctggga

SEQ ID NO: 6081 - DNA, 20 bp, synthetic construct
  misc_feature 1..20: note = Description of Artificial Sequence: Synthetic oligonucleotide
  source 1..20: mol_type = other DNA
ttactgtgttaacctgggaa

SEQ ID NO: 6082 - DNA, 20 bp, synthetic construct
  misc_feature 1..20: note = Description of Artificial Sequence: Synthetic oligonucleotide
  source 1..20: mol_type = other DNA
tactgtgttaacctgggaat

SEQ ID NO: 6083 - DNA, 20 bp, synthetic construct
  misc_feature 1..20: note = Description of Artificial Sequence: Synthetic oligonucleotide
  source 1..20: mol_type = other DNA
actgtgttaacctgggaatc

SEQ ID NO: 6084 - DNA, 20 bp, synthetic construct
  misc_feature 1..20: note = Description of Artificial Sequence: Synthetic oligonucleotide
  source 1..20: mol_type = other DNA
ctgtgttaacctgggaatca

SEQ ID NO: 6085 - DNA, 20 bp, synthetic construct
  misc_feature 1..20: note = Description of Artificial Sequence: Synthetic oligonucleotide
  source 1..20: mol_type = other DNA
tgtgttaacctgggaatcag

SEQ ID NO: 6086 - DNA, 20 bp, synthetic construct
  misc_feature 1..20: note = Description of Artificial Sequence: Synthetic oligonucleotide
  source 1..20: mol_type = other DNA
gtgttaacctgggaatcaga

SEQ ID NO: 6087 - DNA, 20 bp, synthetic construct
  misc_feature 1..20: note = Description of Artificial Sequence: Synthetic oligonucleotide
  source 1..20: mol_type = other DNA
tgttaacctgggaatcagaa

SEQ ID NO: 6088 - DNA, 20 bp, synthetic construct
  misc_feature 1..20: note = Description of Artificial Sequence: Synthetic oligonucleotide
  source 1..20: mol_type = other DNA
gttaacctgggaatcagaaa

SEQ ID NO: 6089 - DNA, 20 bp, synthetic construct
  misc_feature 1..20: note = Description of Artificial Sequence: Synthetic oligonucleotide
  source 1..20: mol_type = other DNA
ttaacctgggaatcagaaaa

SEQ ID NO: 6090 - DNA, 20 bp, synthetic construct
  misc_feature 1..20: note = Description of Artificial Sequence: Synthetic oligonucleotide
  source 1..20: mol_type = other DNA
taacctgggaatcagaaaac

SEQ ID NO: 6091 - DNA, 20 bp, synthetic construct
  misc_feature 1..20: note = Description of Artificial Sequence: Synthetic oligonucleotide
  source 1..20: mol_type = other DNA
aacctgggaatcagaaaaca

SEQ ID NO: 6092 - DNA, 20 bp, synthetic construct
  misc_feature 1..20: note = Description of Artificial Sequence: Synthetic oligonucleotide
  source 1..20: mol_type = other DNA
acctgggaatcagaaaacaa

SEQ ID NO: 6093 - DNA, 20 bp, synthetic construct
  misc_feature 1..20: note = Description of Artificial Sequence: Synthetic oligonucleotide
  source 1..20: mol_type = other DNA
cctgggaatcagaaaacaag

SEQ ID NO: 6094 - DNA, 20 bp, synthetic construct
  misc_feature 1..20: note = Description of Artificial Sequence: Synthetic oligonucleotide
  source 1..20: mol_type = other DNA
ctgggaatcagaaaacaagg

SEQ ID NO: 6095 - DNA, 20 bp, synthetic construct
  misc_feature 1..20: note = Description of Artificial Sequence: Synthetic oligonucleotide
  source 1..20: mol_type = other DNA
tgggaatcagaaaacaaggc

SEQ ID NO: 6096 - DNA, 20 bp, synthetic construct
  misc_feature 1..20: note = Description of Artificial Sequence: Synthetic oligonucleotide
  source 1..20: mol_type = other DNA
gggaatcagaaaacaaggct

SEQ ID NO: 6097 - DNA, 20 bp, synthetic construct
  misc_feature 1..20: note = Description of Artificial Sequence: Synthetic oligonucleotide
  source 1..20: mol_type = other DNA
ggaatcagaaaacaaggctc

SEQ ID NO: 6098 - DNA, 20 bp, synthetic construct
  misc_feature 1..20: note = Description of Artificial Sequence: Synthetic oligonucleotide
  source 1..20: mol_type = other DNA
gaatcagaaaacaaggctcg

SEQ ID NO: 6099 - DNA, 20 bp, synthetic construct
  misc_feature 1..20: note = Description of Artificial Sequence: Synthetic oligonucleotide
  source 1..20: mol_type = other DNA
aatcagaaaacaaggctcga

SEQ ID NO: 6100 - DNA, 20 bp, synthetic construct
  misc_feature 1..20: note = Description of Artificial Sequence: Synthetic oligonucleotide
  source 1..20: mol_type = other DNA
atcagaaaacaaggctcgaa

SEQ ID NO: 6101 - DNA, 20 bp, synthetic construct
  misc_feature 1..20: note = Description of Artificial Sequence: Synthetic oligonucleotide
  source 1..20: mol_type = other DNA
tcagaaaacaaggctcgaac

SEQ ID NO: 6102 - DNA, 20 bp, synthetic construct
  misc_feature 1..20: note = Description of Artificial Sequence: Synthetic oligonucleotide
  source 1..20: mol_type = other DNA
cagaaaacaaggctcgaact

SEQ ID NO: 6103 - DNA, 20 bp, synthetic construct
  misc_feature 1..20: note = Description of Artificial Sequence: Synthetic oligonucleotide
  source 1..20: mol_type = other DNA
agaaaacaaggctcgaactt

SEQ ID NO: 6104 - DNA, 20 bp, synthetic construct
  misc_feature 1..20: note = Description of Artificial Sequence: Synthetic oligonucleotide
  source 1..20: mol_type = other DNA
gaaaacaaggctcgaacttc

SEQ ID NO: 6105 - DNA, 20 bp, synthetic construct
  misc_feature 1..20: note = Description of Artificial Sequence: Synthetic oligonucleotide
  source 1..20: mol_type = other DNA
aaaacaaggctcgaacttct

SEQ ID NO: 6106 - DNA, 20 bp, synthetic construct
  misc_feature 1..20: note = Description of Artificial Sequence: Synthetic oligonucleotide
  source 1..20: mol_type = other DNA
aaacaaggctcgaacttctt

SEQ ID NO: 6107 - DNA, 20 bp, synthetic construct
  misc_feature 1..20: note = Description of Artificial Sequence: Synthetic oligonucleotide
  source 1..20: mol_type = other DNA
aacaaggctcgaacttcttt

SEQ ID NO: 6108 - DNA, 20 bp, synthetic construct
  misc_feature 1..20: note = Description of Artificial Sequence: Synthetic oligonucleotide
  source 1..20: mol_type = other DNA
acaaggctcgaacttctttc

SEQ ID NO: 6109 - DNA, 20 bp, synthetic construct
  misc_feature 1..20: note = Description of Artificial Sequence: Synthetic oligonucleotide
  source 1..20: mol_type = other DNA
caaggctcgaacttctttcc

SEQ ID NO: 6110 - DNA, 20 bp, synthetic construct
  misc_feature 1..20: note = Description of Artificial Sequence: Synthetic oligonucleotide
  source 1..20: mol_type = other DNA
aaggctcgaacttctttcct

SEQ ID NO: 6111 - DNA, 20 bp, synthetic construct
  misc_feature 1..20: note = Description of Artificial Sequence: Synthetic oligonucleotide
  source 1..20: mol_type = other DNA
aggctcgaacttctttcctg

SEQ ID NO: 6112 - DNA, 20 bp, synthetic construct
  misc_feature 1..20: note = Description of Artificial Sequence: Synthetic oligonucleotide
  source 1..20: mol_type = other DNA
ggctcgaacttctttcctga

SEQ ID NO: 6113 - DNA, 20 bp, synthetic construct
  misc_feature 1..20: note = Description of Artificial Sequence: Synthetic oligonucleotide
  source 1..20: mol_type = other DNA
gctcgaacttctttcctgat

SEQ ID NO: 6114 - DNA, 20 bp, synthetic construct
  misc_feature 1..20: note = Description of Artificial Sequence: Synthetic oligonucleotide
  source 1..20: mol_type = other DNA
ctcgaacttctttcctgatt

SEQ ID NO: 6115 - DNA, 20 bp, synthetic construct
  misc_feature 1..20: note = Description of Artificial Sequence: Synthetic oligonucleotide
  source 1..20: mol_type = other DNA
tcgaacttctttcctgattc

SEQ ID NO: 6116 - DNA, 20 bp, synthetic construct
  misc_feature 1..20: note = Description of Artificial Sequence: Synthetic oligonucleotide
  source 1..20: mol_type = other DNA
cgaacttctttcctgattca

SEQ ID NO: 6117 - DNA, 20 bp, synthetic construct
  misc_feature 1..20: note = Description of Artificial Sequence: Synthetic oligonucleotide
  source 1..20: mol_type = other DNA
gaacttctttcctgattcac

SEQ ID NO: 6118 - DNA, 20 bp, synthetic construct
  misc_feature 1..20: note = Description of Artificial Sequence: Synthetic oligonucleotide
  source 1..20: mol_type = other DNA
aacttctttcctgattcacc

SEQ ID NO: 6119 - DNA, 20 bp, synthetic construct
  misc_feature 1..20: note = Description of Artificial Sequence: Synthetic oligonucleotide
  source 1..20: mol_type = other DNA
acttctttcctgattcacca

SEQ ID NO: 6120 - DNA, 20 bp, synthetic construct
  misc_feature 1..20: note = Description of Artificial Sequence: Synthetic oligonucleotide
  source 1..20: mol_type = other DNA
cttctttcctgattcaccat

SEQ ID NO: 6121 - DNA, 20 bp, synthetic construct
  misc_feature 1..20: note = Description of Artificial Sequence: Synthetic oligonucleotide
  source 1..20: mol_type = other DNA
ttctttcctgattcaccata

SEQ ID NO: 6122 - DNA, 20 bp, synthetic construct
  misc_feature 1..20: note = Description of Artificial Sequence: Synthetic oligonucleotide
  source 1..20: mol_type = other DNA
tctttcctgattcaccatat

SEQ ID NO: 6123 - DNA, 20 bp, synthetic construct
  misc_feature 1..20: note = Description of Artificial Sequence: Synthetic oligonucleotide
  source 1..20: mol_type = other DNA
ctttcctgattcaccatatg

SEQ ID NO: 6124 - DNA, 20 bp, synthetic construct
  misc_feature 1..20: note = Description of Artificial Sequence: Synthetic oligonucleotide
  source 1..20: mol_type = other DNA
tttcctgattcaccatatgg

SEQ ID NO: 6125 - DNA, 20 bp, synthetic construct
  misc_feature 1..20: note = Description of Artificial Sequence: Synthetic oligonucleotide
  source 1..20: mol_type = other DNA
ttcctgattcaccatatggc

SEQ ID NO: 6126 - DNA, 20 bp, synthetic construct
  misc_feature 1..20: note = Description of Artificial Sequence: Synthetic oligonucleotide
  source 1..20: mol_type = other DNA
tcctgattcaccatatggcc

SEQ ID NO: 6127 - DNA, 20 bp, synthetic construct
  misc_feature 1..20: note = Description of Artificial Sequence: Synthetic oligonucleotide
  source 1..20: mol_type = other DNA
cctgattcaccatatggcct

SEQ ID NO: 6128 - DNA, 20 bp, synthetic construct
  misc_feature 1..20: note = Description of Artificial Sequence: Synthetic oligonucleotide
  source 1..20: mol_type = other DNA
ctgattcaccatatggcctt

SEQ ID NO: 6129 - DNA, 20 bp, synthetic construct
  misc_feature 1..20: note = Description of Artificial Sequence: Synthetic oligonucleotide
  source 1..20: mol_type = other DNA
tgattcaccatatggccttg

SEQ ID NO: 6130 - DNA, 20 bp, synthetic construct
  misc_feature 1..20: note = Description of Artificial Sequence: Synthetic oligonucleotide
  source 1..20: mol_type = other DNA
gattcaccatatggccttga

SEQ ID NO: 6131 - DNA, 20 bp, synthetic construct
  misc_feature 1..20: note = Description of Artificial Sequence: Synthetic oligonucleotide
  source 1..20: mol_type = other DNA
attcaccatatggccttgat

SEQ ID NO: 6132 - DNA, 20 bp, synthetic construct
  misc_feature 1..20: note = Description of Artificial Sequence: Synthetic oligonucleotide
  source 1..20: mol_type = other DNA
ttcaccatatggccttgatt

SEQ ID NO: 6133 - DNA, 20 bp, synthetic construct
  misc_feature 1..20: note = Description of Artificial Sequence: Synthetic oligonucleotide
  source 1..20: mol_type = other DNA
tcaccatatggccttgatta

SEQ ID NO: 6134 - DNA, 20 bp, synthetic construct
  misc_feature 1..20: note = Description of Artificial Sequence: Synthetic oligonucleotide
  source 1..20: mol_type = other DNA
caccatatggccttgattag

SEQ ID NO: 6135 - DNA, 20 bp, synthetic construct
  misc_feature 1..20: note = Description of Artificial Sequence: Synthetic oligonucleotide
  source 1..20: mol_type = other DNA
accatatggccttgattagt

SEQ ID NO: 6136 - DNA, 20 bp, synthetic construct
  misc_feature 1..20: note = Description of Artificial Sequence: Synthetic oligonucleotide
  source 1..20: mol_type = other DNA
ccatatggccttgattagtc

SEQ ID NO: 6137 - DNA, 20 bp, synthetic construct
  misc_feature 1..20: note = Description of Artificial Sequence: Synthetic oligonucleotide
  source 1..20: mol_type = other DNA
catatggccttgattagtct

SEQ ID NO: 6138 - DNA, 20 bp, synthetic construct
  misc_feature 1..20: note = Description of Artificial Sequence: Synthetic oligonucleotide
  source 1..20: mol_type = other DNA
atatggccttgattagtctc

SEQ ID NO: 6139 - DNA, 20 bp, synthetic construct
  misc_feature 1..20: note = Description of Artificial Sequence: Synthetic oligonucleotide
  source 1..20: mol_type = other DNA
tatggccttgattagtctct

SEQ ID NO: 6140 - DNA, 20 bp, synthetic construct
  misc_feature 1..20: note = Description of Artificial Sequence: Synthetic oligonucleotide
  source 1..20: mol_type = other DNA
atggccttgattagtctctc

SEQ ID NO: 6141 - DNA, 20 bp, synthetic construct
  misc_feature 1..20: note = Description of Artificial Sequence: Synthetic oligonucleotide
  source 1..20: mol_type = other DNA
tggccttgattagtctctct

SEQ ID NO: 6142 - DNA, 20 bp, synthetic construct
  misc_feature 1..20: note = Description of Artificial Sequence: Synthetic oligonucleotide
  source 1..20: mol_type = other DNA
ggccttgattagtctctctt

SEQ ID NO: 6143 - DNA, 20 bp, synthetic construct
  misc_feature 1..20: note = Description of Artificial Sequence: Synthetic oligonucleotide
  source 1..20: mol_type = other DNA
gccttgattagtctctcttt

SEQ ID NO: 6144 - DNA, 20 bp, synthetic construct
  misc_feature 1..20: note = Description of Artificial Sequence: Synthetic oligonucleotide
  source 1..20: mol_type = other DNA
ccttgattagtctctctttc

SEQ ID NO: 6145 - DNA, 20 bp, synthetic construct
  misc_feature 1..20: note = Description of Artificial Sequence: Synthetic oligonucleotide
  source 1..20: mol_type = other DNA
cttgattagtctctctttct

SEQ ID NO: 6146 - DNA, 20 bp, synthetic construct
  misc_feature 1..20: note = Description of Artificial Sequence: Synthetic oligonucleotide
  source 1..20: mol_type = other DNA
ttgattagtctctctttcta

SEQ ID NO: 6147 - DNA, 20 bp, synthetic construct
  misc_feature 1..20: note = Description of Artificial Sequence: Synthetic oligonucleotide
  source 1..20: mol_type = other DNA
tgattagtctctctttctat

SEQ ID NO: 6148 - DNA, 20 bp, synthetic construct
  misc_feature 1..20: note = Description of Artificial Sequence: Synthetic oligonucleotide
  source 1..20: mol_type = other DNA
gattagtctctctttctata

SEQ ID NO: 6149 - DNA, 20 bp, synthetic construct
  misc_feature 1..20: note = Description of Artificial Sequence: Synthetic oligonucleotide
  source 1..20: mol_type = other DNA
attagtctctctttctatat

SEQ ID NO: 6150 - DNA, 20 bp, synthetic construct
  misc_feature 1..20: note = Description of Artificial Sequence: Synthetic oligonucleotide
  source 1..20: mol_type = other DNA
ttagtctctctttctatatt

SEQ ID NO: 6151 - DNA, 20 bp, synthetic construct
  misc_feature 1..20: note = Description of Artificial Sequence: Synthetic oligonucleotide
  source 1..20: mol_type = other DNA
tagtctctctttctatattc

SEQ ID NO: 6152 - DNA, 20 bp, synthetic construct
  misc_feature 1..20: note = Description of Artificial Sequence: Synthetic oligonucleotide
  source 1..20: mol_type = other DNA
agtctctctttctatattcc

SEQ ID NO: 6153 - DNA, 20 bp, synthetic construct
  misc_feature 1..20: note = Description of Artificial Sequence: Synthetic oligonucleotide
  source 1..20: mol_type = other DNA
gtctctctttctatattcct

SEQ ID NO: 6154 - DNA, 20 bp, synthetic construct
  misc_feature 1..20: note = Description of Artificial Sequence: Synthetic oligonucleotide
  source 1..20: mol_type = other DNA
tctctctttctatattcctc

SEQ ID NO: 6155 - DNA, 20 bp, synthetic construct
  misc_feature 1..20: note = Description of Artificial Sequence: Synthetic oligonucleotide
  source 1..20: mol_type = other DNA
ctctctttctatattcctca

SEQ ID NO: 6156 - DNA, 20 bp, synthetic construct
  misc_feature 1..20: note = Description of Artificial Sequence: Synthetic oligonucleotide
  source 1..20: mol_type = other DNA
tctctttctatattcctcac

SEQ ID NO: 6157 - DNA, 20 bp, synthetic construct
  misc_feature 1..20: note = Description of Artificial Sequence: Synthetic oligonucleotide
  source 1..20: mol_type = other DNA
ctctttctatattcctcact

SEQ ID NO: 6158 - DNA, 20 bp, synthetic construct
  misc_feature 1..20: note = Description of Artificial Sequence: Synthetic oligonucleotide
  source 1..20: mol_type = other DNA
tctttctatattcctcactt

SEQ ID NO: 6159 - DNA, 20 bp, synthetic construct
  misc_feature 1..20: note = Description of Artificial Sequence: Synthetic oligonucleotide
  source 1..20: mol_type = other DNA
ctttctatattcctcacttt

SEQ ID NO: 6160 - DNA, 20 bp, synthetic construct
  misc_feature 1..20: note = Description of Artificial Sequence: Synthetic oligonucleotide
  source 1..20: mol_type = other DNA
tttctatattcctcactttc

SEQ ID NO: 6161 - DNA, 20 bp, synthetic construct
  misc_feature 1..20: note = Description of Artificial Sequence: Synthetic oligonucleotide
  source 1..20: mol_type = other DNA
ttctatattcctcactttcc

SEQ ID NO: 6162 - DNA, 20 bp, synthetic construct
  misc_feature 1..20: note = Description of Artificial Sequence: Synthetic oligonucleotide
  source 1..20: mol_type = other DNA
tctatattcctcactttcct

SEQ ID NO: 6163 - DNA, 20 bp, synthetic construct
  misc_feature 1..20: note = Description of Artificial Sequence: Synthetic oligonucleotide
  source 1..20: mol_type = other DNA
ctatattcctcactttcctg

SEQ ID NO: 6164 - DNA, 20 bp, synthetic construct
  misc_feature 1..20: note = Description of Artificial Sequence: Synthetic oligonucleotide
  source 1..20: mol_type = other DNA
tatattcctcactttcctgc

SEQ ID NO: 6165 - DNA, 20 bp, synthetic construct
  misc_feature 1..20: note = Description of Artificial Sequence: Synthetic oligonucleotide
  source 1..20: mol_type = other DNA
atattcctcactttcctgct

SEQ ID NO: 6166 - DNA, 20 bp, synthetic construct
  misc_feature 1..20: note = Description of Artificial Sequence: Synthetic oligonucleotide
  source 1..20: mol_type = other DNA
tattcctcactttcctgctt

SEQ ID NO: 6167 - DNA, 20 bp, synthetic construct
  misc_feature 1..20: note = Description of Artificial Sequence: Synthetic oligonucleotide
  source 1..20: mol_type = other DNA
attcctcactttcctgctta

SEQ ID NO: 6168 - DNA, 20 bp, synthetic construct
  misc_feature 1..20: note = Description of Artificial Sequence: Synthetic oligonucleotide
  source 1..20: mol_type = other DNA
ttcctcactttcctgcttat

SEQ ID NO: 6169 - DNA, 20 bp, synthetic construct
  misc_feature 1..20: note = Description of Artificial Sequence: Synthetic oligonucleotide
  source 1..20: mol_type = other DNA
tcctcactttcctgcttata

SEQ ID NO: 6170 - DNA, 20 bp, synthetic construct
  misc_feature 1..20: note = Description of Artificial Sequence: Synthetic oligonucleotide
  source 1..20: mol_type = other DNA
cctcactttcctgcttataa

SEQ ID NO: 6171 - DNA, 20 bp, synthetic construct
  misc_feature 1..20: note = Description of Artificial Sequence: Synthetic oligonucleotide
  source 1..20: mol_type = other DNA
ctcactttcctgcttataag

SEQ ID NO: 6172 - DNA, 20 bp, synthetic construct
  misc_feature 1..20: note = Description of Artificial Sequence: Synthetic oligonucleotide
  source 1..20: mol_type = other DNA
tcactttcctgcttataagg

SEQ ID NO: 6173 - DNA, 20 bp, synthetic construct
  misc_feature 1..20: note = Description of Artificial Sequence: Synthetic oligonucleotide
  source 1..20: mol_type = other DNA
cactttcctgcttataaggt

SEQ ID NO: 6174 - DNA, 20 bp, synthetic construct
  misc_feature 1..20: note = Description of Artificial Sequence: Synthetic oligonucleotide
  source 1..20: mol_type = other DNA
actttcctgcttataaggtg

SEQ ID NO: 6175 - DNA, 20 bp, synthetic construct
  misc_feature 1..20: note = Description of Artificial Sequence: Synthetic oligonucleotide
  source 1..20: mol_type = other DNA
ctttcctgcttataaggtgc

SEQ ID NO: 6176 - DNA, 20 bp, synthetic construct
  misc_feature 1..20: note = Description of Artificial Sequence: Synthetic oligonucleotide
  source 1..20: mol_type = other DNA
tttcctgcttataaggtgca

SEQ ID NO: 6177 - DNA, 20 bp, synthetic construct
  misc_feature 1..20: note = Description of Artificial Sequence: Synthetic oligonucleotide
  source 1..20: mol_type = other DNA
ttcctgcttataaggtgcag

SEQ ID NO: 6178 - DNA, 20 bp, synthetic construct
  misc_feature 1..20: note = Description of Artificial Sequence: Synthetic oligonucleotide
  source 1..20: mol_type = other DNA
tcctgcttataaggtgcagc

SEQ ID NO: 6179 - DNA, 20 bp, synthetic construct
  misc_feature 1..20: note = Description of Artificial Sequence: Synthetic oligonucleotide
  source 1..20: mol_type = other DNA
cctgcttataaggtgcagct

SEQ ID NO: 6180 - DNA, 20 bp, synthetic construct
  misc_feature 1..20: note = Description of Artificial Sequence: Synthetic oligonucleotide
  source 1..20: mol_type = other DNA
ctgcttataaggtgcagcta

SEQ ID NO: 6181 - DNA, 20 bp, synthetic construct
  misc_feature 1..20: note = Description of Artificial Sequence: Synthetic oligonucleotide
  source 1..20: mol_type = other DNA
tgcttataaggtgcagctat

SEQ ID NO: 6182 - DNA, 20 bp, synthetic construct
  misc_feature 1..20: note = Description of Artificial Sequence: Synthetic oligonucleotide
  source 1..20: mol_type = other DNA
gcttataaggtgcagctatg

SEQ ID NO: 6183 - DNA, 20 bp, synthetic construct
  misc_feature 1..20: note = Description of Artificial Sequence: Synthetic oligonucleotide
  source 1..20: mol_type = other DNA
cttataaggtgcagctatgt

SEQ ID NO: 6184 - DNA, 20 bp, synthetic construct
  misc_feature 1..20: note = Description of Artificial Sequence: Synthetic oligonucleotide
  source 1..20: mol_type = other DNA
ttataaggtgcagctatgtt

SEQ ID NO: 6185 - DNA, 20 bp, synthetic construct
  misc_feature 1..20: note = Description of Artificial Sequence: Synthetic oligonucleotide
  source 1..20: mol_type = other DNA
tataaggtgcagctatgttt

SEQ ID NO: 6186 - DNA, 20 bp, synthetic construct
  misc_feature 1..20: note = Description of Artificial Sequence: Synthetic oligonucleotide
  source 1..20: mol_type = other DNA
ataaggtgcagctatgtttt

SEQ ID NO: 6187 - DNA, 20 bp, synthetic construct
  misc_feature 1..20: note = Description of Artificial Sequence: Synthetic oligonucleotide
  source 1..20: mol_type = other DNA
taaggtgcagctatgttttt

SEQ ID NO: 6188 - DNA, 20 bp, synthetic construct
  misc_feature 1..20: note = Description of Artificial Sequence: Synthetic oligonucleotide
  source 1..20: mol_type = other DNA
aaggtgcagctatgtttttg

SEQ ID NO: 6189 - DNA, 20 bp, synthetic construct
  misc_feature 1..20: note = Description of Artificial Sequence: Synthetic oligonucleotide
  source 1..20: mol_type = other DNA
aggtgcagctatgtttttgc

SEQ ID NO: 6190 - DNA, 20 bp, synthetic construct
  misc_feature 1..20: note = Description of Artificial Sequence: Synthetic oligonucleotide
  source 1..20: mol_type = other DNA
ggtgcagctatgtttttgct

SEQ ID NO: 6191 - DNA, 20 bp, synthetic construct
  misc_feature 1..20: note = Description of Artificial Sequence: Synthetic oligonucleotide
  source 1..20: mol_type = other DNA
gtgcagctatgtttttgctg

SEQ ID NO: 6192 - DNA, 20 bp, synthetic construct
  misc_feature 1..20: note = Description of Artificial Sequence: Synthetic oligonucleotide
  source 1..20: mol_type = other DNA
tgcagctatgtttttgctga

SEQ ID NO: 6193 - DNA, 20 bp, synthetic construct
  misc_feature 1..20: note = Description of Artificial Sequence: Synthetic oligonucleotide
  source 1..20: mol_type = other DNA
gcagctatgtttttgctgaa

SEQ ID NO: 6194 - DNA, 20 bp, synthetic construct
  misc_feature 1..20: note = Description of Artificial Sequence: Synthetic oligonucleotide
  source 1..20: mol_type = other DNA
cagctatgtttttgctgaat

SEQ ID NO: 6195 - DNA, 20 bp, synthetic construct
  misc_feature 1..20: note = Description of Artificial Sequence: Synthetic oligonucleotide
  source 1..20: mol_type = other DNA
agctatgtttttgctgaatc

SEQ ID NO: 6196 - DNA, 20 bp, synthetic construct
  misc_feature 1..20: note = Description of Artificial Sequence: Synthetic oligonucleotide
  source 1..20: mol_type = other DNA
gctatgtttttgctgaatcc

SEQ ID NO: 6197 - DNA, 20 bp, synthetic construct
  misc_feature 1..20: note = Description of Artificial Sequence: Synthetic oligonucleotide
  source 1..20: mol_type = other DNA
ctatgtttttgctgaatccc

SEQ ID NO: 6198 - DNA, 20 bp, synthetic construct
  misc_feature 1..20: note = Description of Artificial Sequence: Synthetic oligonucleotide
  source 1..20: mol_type = other DNA
tatgtttttgctgaatccca

SEQ ID NO: 6199 - DNA, 20 bp, synthetic construct
  misc_feature 1..20: note = Description of Artificial Sequence: Synthetic oligonucleotide
  source 1..20: mol_type = other DNA
atgtttttgctgaatcccac

SEQ ID NO: 6200 - DNA, 20 bp, synthetic construct
  misc_feature 1..20: note = Description of Artificial Sequence: Synthetic oligonucleotide
  source 1..20: mol_type = other DNA
tgtttttgctgaatcccaca

SEQ ID NO: 6201 - DNA, 20 bp, synthetic construct
  misc_feature 1..20: note = Description of Artificial Sequence: Synthetic oligonucleotide
  source 1..20: mol_type = other DNA
gtttttgctgaatcccacac

SEQ ID NO: 6202 - DNA, 20 bp, synthetic construct
  misc_feature 1..20: note = Description of Artificial Sequence: Synthetic oligonucleotide
  source 1..20: mol_type = other DNA
tttttgctgaatcccacaca

SEQ ID NO: 6203 - DNA, 20 bp, synthetic construct
  misc_feature 1..20: note = Description of Artificial Sequence: Synthetic oligonucleotide
  source 1..20: mol_type = other DNA
ttttgctgaatcccacacag

SEQ ID NO: 6204 - DNA, 20 bp, synthetic construct
  misc_feature 1..20: note = Description of Artificial Sequence: Synthetic oligonucleotide
  source 1..20: mol_type = other DNA
tttgctgaatcccacacaga

SEQ ID NO: 6205 - DNA, 20 bp, synthetic construct
  misc_feature 1..20: note = Description of Artificial Sequence: Synthetic oligonucleotide
  source 1..20: mol_type = other DNA
ttgctgaatcccacacagag

SEQ ID NO: 6206 - DNA, 20 bp, synthetic construct
  misc_feature 1..20: note = Description of Artificial Sequence: Synthetic oligonucleotide
  source 1..20: mol_type = other DNA
tgctgaatcccacacagagc

SEQ ID NO: 6207 - DNA, 20 bp, synthetic construct
  misc_feature 1..20: note = Description of Artificial Sequence: Synthetic oligonucleotide
  source 1..20: mol_type = other DNA
gctgaatcccacacagagct

SEQ ID NO: 6208 - DNA, 20 bp, synthetic construct
  misc_feature 1..20: note = Description of Artificial Sequence: Synthetic oligonucleotide
  source 1..20: mol_type = other DNA
ctgaatcccacacagagctg

SEQ ID NO: 6209 - DNA, 20 bp, synthetic construct
  misc_feature 1..20: note = Description of Artificial Sequence: Synthetic oligonucleotide
  source 1..20: mol_type = other DNA
tgaatcccacacagagctgc

SEQ ID NO: 6210 - DNA, 20 bp, synthetic construct
  misc_feature 1..20: note = Description of Artificial Sequence: Synthetic oligonucleotide
  source 1..20: mol_type = other DNA
gaatcccacacagagctgct

SEQ ID NO: 6211 - DNA, 20 bp, synthetic construct
  misc_feature 1..20: note = Description of Artificial Sequence: Synthetic oligonucleotide
  source 1..20: mol_type = other DNA
aatcccacacagagctgctg

SEQ ID NO: 6212 - DNA, 20 bp, synthetic construct
  misc_feature 1..20: note = Description of Artificial Sequence: Synthetic oligonucleotide
  source 1..20: mol_type = other DNA
atcccacacagagctgctgt

SEQ ID NO: 6213 - DNA, 20 bp, synthetic construct
  misc_feature 1..20: note = Description of Artificial Sequence: Synthetic oligonucleotide
  source 1..20: mol_type = other DNA
tcccacacagagctgctgta

SEQ ID NO: 6214 - DNA, 20 bp, synthetic construct
  misc_feature 1..20: note = Description of Artificial Sequence: Synthetic oligonucleotide
  source 1..20: mol_type = other DNA
cccacacagagctgctgtaa

SEQ ID NO: 6215 - DNA, 20 bp, synthetic construct
  misc_feature 1..20: note = Description of Artificial Sequence: Synthetic oligonucleotide
  source 1..20: mol_type = other DNA
ccacacagagctgctgtaag

SEQ ID NO: 6216 - DNA, 20 bp, synthetic construct
  misc_feature 1..20: note = Description of Artificial Sequence: Synthetic oligonucleotide
  source 1..20: mol_type = other DNA
cacacagagctgctgtaaga

SEQ ID NO: 6217 - DNA, 20 bp, synthetic construct
  misc_feature 1..20: note = Description of Artificial Sequence: Synthetic oligonucleotide
  source 1..20: mol_type = other DNA
acacagagctgctgtaagag

SEQ ID NO: 6218 - DNA, 20 bp, synthetic construct
  misc_feature 1..20: note = Description of Artificial Sequence: Synthetic oligonucleotide
  source 1..20: mol_type = other DNA
cacagagctgctgtaagaga

SEQ ID NO: 6219 - DNA, 20 bp, synthetic construct
  misc_feature 1..20: note = Description of Artificial Sequence: Synthetic oligonucleotide
  source 1..20: mol_type = other DNA
acagagctgctgtaagagaa

SEQ ID NO: 6220 - DNA, 20 bp, synthetic construct
  misc_feature 1..20: note = Description of Artificial Sequence: Synthetic oligonucleotide
  source 1..20: mol_type = other DNA
cagagctgctgtaagagaaa

SEQ ID NO: 6221 - DNA, 20 bp, synthetic construct
  misc_feature 1..20: note = Description of Artificial Sequence: Synthetic oligonucleotide
  source 1..20: mol_type = other DNA
agagctgctgtaagagaaac

SEQ ID NO: 6222 - DNA, 20 bp, synthetic construct
  misc_feature 1..20: note = Description of Artificial Sequence: Synthetic oligonucleotide
  source 1..20: mol_type = other DNA
gagctgctgtaagagaaaca

SEQ ID NO: 6223 - DNA, 20 bp, synthetic construct
  misc_feature 1..20: note = Description of Artificial Sequence: Synthetic oligonucleotide
  source 1..20: mol_type = other DNA
agctgctgtaagagaaacat

SEQ ID NO: 6224 - DNA, 20 bp, synthetic construct
  misc_feature 1..20: note = Description of Artificial Sequence: Synthetic oligonucleotide
  source 1..20: mol_type = other DNA
gctgctgtaagagaaacatg

SEQ ID NO: 6225 - DNA, 20 bp, synthetic construct
  misc_feature 1..20: note = Description of Artificial Sequence: Synthetic oligonucleotide
  source 1..20: mol_type = other DNA
ctgctgtaagagaaacatga

SEQ ID NO: 6226 - DNA, 20 bp, synthetic construct
  misc_feature 1..20: note = Description of Artificial Sequence: Synthetic oligonucleotide
  source 1..20: mol_type = other DNA
tgctgtaagagaaacatgag

SEQ ID NO: 6227 - DNA, 20 bp, synthetic construct
  misc_feature 1..20: note = Description of Artificial Sequence: Synthetic oligonucleotide
  source 1..20: mol_type = other DNA
gctgtaagagaaacatgagg

SEQ ID NO: 6228 - DNA, 20 bp, synthetic construct
  misc_feature 1..20: note = Description of Artificial Sequence: Synthetic oligonucleotide
  source 1..20: mol_type = other DNA
ctgtaagagaaacatgagga

SEQ ID NO: 6229 - DNA, 20 bp, synthetic construct
  misc_feature 1..20: note = Description of Artificial Sequence: Synthetic oligonucleotide
  source 1..20: mol_type = other DNA
tgtaagagaaacatgaggat

SEQ ID NO: 6230 - DNA, 20 bp, synthetic construct
  misc_feature 1..20: note = Description of Artificial Sequence: Synthetic oligonucleotide
  source 1..20: mol_type = other DNA
gtaagagaaacatgaggata

SEQ ID NO: 6231 - DNA, 20 bp, synthetic construct
  misc_feature 1..20: note = Description of Artificial Sequence: Synthetic oligonucleotide
  source 1..20: mol_type = other DNA
taagagaaacatgaggatat

SEQ ID NO: 6232 - DNA, 20 bp, synthetic construct
  misc_feature 1..20: note = Description of Artificial Sequence: Synthetic oligonucleotide
  source 1..20: mol_type = other DNA
aagagaaacatgaggatata

SEQ ID NO: 6233 - DNA, 20 bp, synthetic construct
  misc_feature 1..20: note = Description of Artificial Sequence: Synthetic oligonucleotide
  source 1..20: mol_type = other DNA
agagaaacatgaggatatag

SEQ ID NO: 6234 - DNA, 20 bp, synthetic construct
  misc_feature 1..20: note = Description of Artificial Sequence: Synthetic oligonucleotide
  source 1..20: mol_type = other DNA
gagaaacatgaggatatagt

SEQ ID NO: 6235 - DNA, 20 bp, synthetic construct
  misc_feature 1..20: note = Description of Artificial Sequence: Synthetic oligonucleotide
  source 1..20: mol_type = other DNA
agaaacatgaggatatagtg

SEQ ID NO: 6236 - DNA, 20 bp, synthetic construct
  misc_feature 1..20: note = Description of Artificial Sequence: Synthetic oligonucleotide
  source 1..20: mol_type = other DNA
gaaacatgaggatatagtga

SEQ ID NO: 6237 - DNA, 20 bp, synthetic construct
  misc_feature 1..20: note = Description of Artificial Sequence: Synthetic oligonucleotide
  source 1..20: mol_type = other DNA
aaacatgaggatatagtgag

SEQ ID NO: 6238 - DNA, 20 bp, synthetic construct
  misc_feature 1..20: note = Description of Artificial Sequence: Synthetic oligonucleotide
  source 1..20: mol_type = other DNA
aacatgaggatatagtgagt

SEQ ID NO: 6239 - DNA, 20 bp, synthetic construct
  misc_feature 1..20: note = Description of Artificial Sequence: Synthetic oligonucleotide
  source 1..20: mol_type = other DNA
acatgaggatatagtgagtg

SEQ ID NO: 6240 - DNA, 20 bp, synthetic construct
  misc_feature 1..20: note = Description of Artificial Sequence: Synthetic oligonucleotide
  source 1..20: mol_type = other DNA
catgaggatatagtgagtgc

SEQ ID NO: 6241 - DNA, 20 bp, synthetic construct
  misc_feature 1..20: note = Description of Artificial Sequence: Synthetic oligonucleotide
  source 1..20: mol_type = other DNA
atgaggatatagtgagtgct

SEQ ID NO: 6242 - DNA, 20 bp, synthetic construct
  misc_feature 1..20: note = Description of Artificial Sequence: Synthetic oligonucleotide
  source 1..20: mol_type = other DNA
tgaggatatagtgagtgctt

SEQ ID NO: 6243 - DNA, 20 bp, synthetic construct
  misc_feature 1..20: note = Description of Artificial Sequence: Synthetic oligonucleotide
  source 1..20: mol_type = other DNA
gaggatatagtgagtgcttt

SEQ ID NO: 6244 - DNA, 20 bp, synthetic construct
  misc_feature 1..20: note = Description of Artificial Sequence: Synthetic oligonucleotide
  source 1..20: mol_type = other DNA
aggatatagtgagtgctttc

SEQ ID NO: 6245 - DNA, 20 bp, synthetic construct
  misc_feature 1..20: note = Description of Artificial Sequence: Synthetic oligonucleotide
  source 1..20: mol_type = other DNA
ggatatagtgagtgctttca

SEQ ID NO: 6246 - DNA, 20 bp, synthetic construct
  misc_feature 1..20: note = Description of Artificial Sequence: Synthetic oligonucleotide
  source 1..20: mol_type = other DNA
gatatagtgagtgctttcag

SEQ ID NO: 6247 - DNA, 20 bp, synthetic construct
  misc_feature 1..20: note = Description of Artificial Sequence: Synthetic oligonucleotide
  source 1..20: mol_type = other DNA
atatagtgagtgctttcaga

SEQ ID NO: 6248 - DNA, 20 bp, synthetic construct
  misc_feature 1..20: note = Description of Artificial Sequence: Synthetic oligonucleotide
  source 1..20: mol_type = other DNA
tatagtgagtgctttcagac

SEQ ID NO: 6249 - DNA, 20 bp, synthetic construct
  misc_feature 1..20: note = Description of Artificial Sequence: Synthetic oligonucleotide
  source 1..20: mol_type = other DNA
atagtgagtgctttcagacc

SEQ ID NO: 6250 - DNA, 20 bp, synthetic construct
  misc_feature 1..20: note = Description of Artificial Sequence: Synthetic oligonucleotide
  source 1..20: mol_type = other DNA
tagtgagtgctttcagacct

SEQ ID NO: 6251 - DNA, 20 bp, synthetic construct
  misc_feature 1..20: note = Description of Artificial Sequence: Synthetic oligonucleotide
  source 1..20: mol_type = other DNA
agtgagtgctttcagacctt

SEQ ID NO: 6252 - DNA, 20 bp, synthetic construct
  misc_feature 1..20: note = Description of Artificial Sequence: Synthetic oligonucleotide
  source 1..20: mol_type = other DNA
gtgagtgctttcagaccttc

SEQ ID NO: 6253 - DNA, 20 bp, synthetic construct
  misc_feature 1..20: note = Description of Artificial Sequence: Synthetic oligonucleotide
  source 1..20: mol_type = other DNA
tgagtgctttcagaccttca

SEQ ID NO: 6254 - DNA, 20 bp, synthetic construct
  misc_feature 1..20: note = Description of Artificial Sequence: Synthetic oligonucleotide
  source 1..20: mol_type = other DNA
gagtgctttcagaccttcag

SEQ ID NO: 6255 - DNA, 20 bp, synthetic construct
  misc_feature 1..20: note = Description of Artificial Sequence: Synthetic oligonucleotide
  source 1..20: mol_type = other DNA
agtgctttcagaccttcagc

SEQ ID NO: 6256 - DNA, 20 bp, synthetic construct
  misc_feature 1..20: note = Description of Artificial Sequence: Synthetic oligonucleotide
  source 1..20: mol_type = other DNA
gtgctttcagaccttcagca

SEQ ID NO: 6257 - DNA, 20 bp, synthetic construct
  misc_feature 1..20: note = Description of Artificial Sequence: Synthetic oligonucleotide
  source 1..20: mol_type = other DNA
tgctttcagaccttcagcaa

SEQ ID NO: 6258 - DNA, 20 bp, synthetic construct
  misc_feature 1..20: note = Description of Artificial Sequence: Synthetic oligonucleotide
  source 1..20: mol_type = other DNA
gctttcagaccttcagcaag

SEQ ID NO: 6259 - DNA, 20 bp, synthetic construct
  misc_feature 1..20: note = Description of Artificial Sequence: Synthetic oligonucleotide
  source 1..20: mol_type = other DNA
ctttcagaccttcagcaagg

SEQ ID NO: 6260 - DNA, 20 bp, synthetic construct
  misc_feature 1..20: note = Description of Artificial Sequence: Synthetic oligonucleotide
  source 1..20: mol_type = other DNA
tttcagaccttcagcaaggg

SEQ ID NO: 6261 - DNA, 20 bp, synthetic construct
  misc_feature 1..20: note = Description of Artificial Sequence: Synthetic oligonucleotide
  source 1..20: mol_type = other DNA
ttcagaccttcagcaagggt

SEQ ID NO: 6262 - DNA, 20 bp, synthetic construct
  misc_feature 1..20: note = Description of Artificial Sequence: Synthetic oligonucleotide
  source 1..20: mol_type = other DNA
tcagaccttcagcaagggtc

SEQ ID NO: 6263 - DNA, 20 bp, synthetic construct
  misc_feature 1..20: note = Description of Artificial Sequence: Synthetic oligonucleotide
  source 1..20: mol_type = other DNA
cagaccttcagcaagggtcc

SEQ ID NO: 6264 - DNA, 20 bp, synthetic construct
  misc_feature 1..20: note = Description of Artificial Sequence: Synthetic oligonucleotide
  source 1..20: mol_type = other DNA
agaccttcagcaagggtccc

SEQ ID NO: 6265 - DNA, 20 bp, synthetic construct
  misc_feature 1..20: note = Description of Artificial Sequence: Synthetic oligonucleotide
  source 1..20: mol_type = other DNA
gaccttcagcaagggtcccc

SEQ ID NO: 6266 - DNA, 20 bp, synthetic construct
  misc_feature 1..20: note = Description of Artificial Sequence: Synthetic oligonucleotide
  source 1..20: mol_type = other DNA
accttcagcaagggtcccca

SEQ ID NO: 6267 - DNA, 20 bp, synthetic construct
  misc_feature 1..20: note = Description of Artificial Sequence: Synthetic oligonucleotide
  source 1..20: mol_type = other DNA
ccttcagcaagggtccccaa

SEQ ID NO: 6268 - DNA, 20 bp, synthetic construct
  misc_feature 1..20: note = Description of Artificial Sequence: Synthetic oligonucleotide
  source 1..20: mol_type = other DNA
cttcagcaagggtccccaaa

SEQ ID NO: 6269 - DNA, 20 bp, synthetic construct
  misc_feature 1..20: note = Description of Artificial Sequence: Synthetic oligonucleotide
  source 1..20: mol_type = other DNA
ttcagcaagggtccccaaac

SEQ ID NO: 6270 - DNA, 20 bp, synthetic construct
  misc_feature 1..20: note = Description of Artificial Sequence: Synthetic oligonucleotide
  source 1..20: mol_type = other DNA
tcagcaagggtccccaaaca

SEQ ID NO: 6271 - DNA, 20 bp, synthetic construct
  misc_feature 1..20: note = Description of Artificial Sequence: Synthetic oligonucleotide
  source 1..20: mol_type = other DNA
cagcaagggtccccaaacag

SEQ ID NO: 6272 - DNA, 20 bp, synthetic construct
  misc_feature 1..20: note = Description of Artificial Sequence: Synthetic oligonucleotide
  source 1..20: mol_type = other DNA
agcaagggtccccaaacagt

SEQ ID NO: 6273 - DNA, 20 bp, synthetic construct
  misc_feature 1..20: note = Description of Artificial Sequence: Synthetic oligonucleotide
  source 1..20: mol_type = other DNA
gcaagggtccccaaacagta

SEQ ID NO: 6274 - DNA, 20 bp, synthetic construct
  misc_feature 1..20: note = Description of Artificial Sequence: Synthetic oligonucleotide
  source 1..20: mol_type = other DNA
caagggtccccaaacagtat

SEQ ID NO: 6275 - DNA, 20 bp, synthetic construct
  misc_feature 1..20: note = Description of Artificial Sequence: Synthetic oligonucleotide
  source 1..20: mol_type = other DNA
aagggtccccaaacagtatc

SEQ ID NO: 6276 - DNA, 20 bp, synthetic construct
  misc_feature 1..20: note = Description of Artificial Sequence: Synthetic oligonucleotide
  source 1..20: mol_type = other DNA
agggtccccaaacagtatca

SEQ ID NO: 6277 - DNA, 20 bp, synthetic construct
  misc_feature 1..20: note = Description of Artificial Sequence: Synthetic oligonucleotide
  source 1..20: mol_type = other DNA
gggtccccaaacagtatcag

SEQ ID NO: 6278 - DNA, 20 bp, synthetic construct
  misc_feature 1..20: note = Description of Artificial Sequence: Synthetic oligonucleotide
  source 1..20: mol_type = other DNA
ggtccccaaacagtatcagt

SEQ ID NO: 6279 - DNA, 20 bp, synthetic construct
  misc_feature 1..20: note = Description of Artificial Sequence: Synthetic oligonucleotide
  source 1..20: mol_type = other DNA
gtccccaaacagtatcagta

SEQ ID NO: 6280 - DNA, 20 bp, synthetic construct
  misc_feature 1..20: note = Description of Artificial Sequence: Synthetic oligonucleotide
  source 1..20: mol_type = other DNA
tccccaaacagtatcagtaa

SEQ ID NO: 6281 - DNA, 20 bp, synthetic construct
  misc_feature 1..20: note = Description of Artificial Sequence: Synthetic oligonucleotide
  source 1..20: mol_type = other DNA
ccccaaacagtatcagtaag

SEQ ID NO: 6282 - DNA, 20 bp, synthetic construct
  misc_feature 1..20: note = Description of Artificial Sequence: Synthetic oligonucleotide
  source 1..20: mol_type = other DNA
cccaaacagtatcagtaaga

SEQ ID NO: 6283 - DNA, 20 bp, synthetic construct
  misc_feature 1..20: note = Description of Artificial Sequence: Synthetic oligonucleotide
  source 1..20: mol_type = other DNA
ccaaacagtatcagtaagat

SEQ ID NO: 6284 - DNA, 20 bp, synthetic construct
  misc_feature 1..20: note = Description of Artificial Sequence: Synthetic oligonucleotide
  source 1..20: mol_type = other DNA
caaacagtatcagtaagatt

SEQ ID NO: 6285 - DNA, 20 bp, synthetic construct
  misc_feature 1..20: note = Description of Artificial Sequence: Synthetic oligonucleotide
  source 1..20: mol_type = other DNA
aaacagtatcagtaagattt

SEQ ID NO: 6286 - DNA, 20 bp, synthetic construct
  misc_feature 1..20: note = Description of Artificial Sequence: Synthetic oligonucleotide
  source 1..20: mol_type = other DNA
aacagtatcagtaagatttg

SEQ ID NO: 6287 - DNA, 20 bp, synthetic construct
  misc_feature 1..20: note = Description of Artificial Sequence: Synthetic oligonucleotide
  source 1..20: mol_type = other DNA
acagtatcagtaagatttgc

SEQ ID NO: 6288 - DNA, 20 bp, synthetic construct
  misc_feature 1..20: note = Description of Artificial Sequence: Synthetic oligonucleotide
  source 1..20: mol_type = other DNA
cagtatcagtaagatttgca

SEQ ID NO: 6289 - DNA, 20 bp, synthetic construct
  misc_feature 1..20: note = Description of Artificial Sequence: Synthetic oligonucleotide
  source 1..20: mol_type = other DNA
agtatcagtaagatttgcac

SEQ ID NO: 6290 - DNA, 20 bp, synthetic construct
  misc_feature 1..20: note = Description of Artificial Sequence: Synthetic oligonucleotide
  source 1..20: mol_type = other DNA
gtatcagtaagatttgcacc

SEQ ID NO: 6291 - DNA, 20 bp, synthetic construct
  misc_feature 1..20: note = Description of Artificial Sequence: Synthetic oligonucleotide
  source 1..20: mol_type = other DNA
tatcagtaagatttgcacct

SEQ ID NO: 6292 - DNA, 20 bp, synthetic construct
  misc_feature 1..20: note = Description of Artificial Sequence: Synthetic oligonucleotide
  source 1..20: mol_type = other DNA
atcagtaagatttgcaccta

SEQ ID NO: 6293 - DNA, 20 bp, synthetic construct
  misc_feature 1..20: note = Description of Artificial Sequence: Synthetic oligonucleotide
  source 1..20: mol_type = other DNA
tcagtaagatttgcacctaa

SEQ ID NO: 6294 - DNA, 20 bp, synthetic construct
  misc_feature 1..20: note = Description of Artificial Sequence: Synthetic oligonucleotide
  source 1..20: mol_type = other DNA
cagtaagatttgcacctaaa

SEQ ID NO: 6295 - DNA, 20 bp, synthetic construct
  misc_feature 1..20: note = Description of Artificial Sequence: Synthetic oligonucleotide
  source 1..20: mol_type = other DNA
agtaagatttgcacctaaag

SEQ ID NO: 6296 - DNA, 20 bp, synthetic construct
  misc_feature 1..20: note = Description of Artificial Sequence: Synthetic oligonucleotide
  source 1..20: mol_type = other DNA
gtaagatttgcacctaaagg

SEQ ID NO: 6297 - DNA, 20 bp, synthetic construct
  misc_feature 1..20: note = Description of Artificial Sequence: Synthetic oligonucleotide
  source 1..20: mol_type = other DNA
taagatttgcacctaaagga

SEQ ID NO: 6298 - DNA, 20 bp, synthetic construct
  misc_feature 1..20: note = Description of Artificial Sequence: Synthetic oligonucleotide
  source 1..20: mol_type = other DNA
aagatttgcacctaaaggac

SEQ ID NO: 6299 - DNA, 20 bp, synthetic construct
  misc_feature 1..20: note = Description of Artificial Sequence: Synthetic oligonucleotide
  source 1..20: mol_type = other DNA
agatttgcacctaaaggacc

SEQ ID NO: 6300 - DNA, 20 bp, synthetic construct
  misc_feature 1..20: note = Description of Artificial Sequence: Synthetic oligonucleotide
  source 1..20: mol_type = other DNA
gatttgcacctaaaggacct

SEQ ID NO: 6301 - DNA, 20 bp, synthetic construct
  misc_feature 1..20: note = Description of Artificial Sequence: Synthetic oligonucleotide
  source 1..20: mol_type = other DNA
atttgcacctaaaggacctc

SEQ ID NO: 6302 - DNA, 20 bp, synthetic construct
  misc_feature 1..20: note = Description of Artificial Sequence: Synthetic oligonucleotide
  source 1..20: mol_type = other DNA
tttgcacctaaaggacctca

SEQ ID NO: 6303 - DNA, 20 bp, synthetic construct
  misc_feature 1..20: note = Description of Artificial Sequence: Synthetic oligonucleotide
  source 1..20: mol_type = other DNA
ttgcacctaaaggacctcat

SEQ ID NO: 6304 - DNA, 20 bp, synthetic construct
  misc_feature 1..20: note = Description of Artificial Sequence: Synthetic oligonucleotide
  source 1..20: mol_type = other DNA
tgcacctaaaggacctcatg

SEQ ID NO: 6305 - DNA, 20 bp, synthetic construct
  misc_feature 1..20: note = Description of Artificial Sequence: Synthetic oligonucleotide
  source 1..20: mol_type = other DNA
gcacctaaaggacctcatgc

SEQ ID NO: 6306 - DNA, 20 bp, synthetic construct
  misc_feature 1..20: note = Description of Artificial Sequence: Synthetic oligonucleotide
  source 1..20: mol_type = other DNA
cacctaaaggacctcatgct

SEQ ID NO: 6307 - DNA, 20 bp, synthetic construct
  misc_feature 1..20: note = Description of Artificial Sequence: Synthetic oligonucleotide
  source 1..20: mol_type = other DNA
acctaaaggacctcatgctc

SEQ ID NO: 6308 - DNA, 20 bp, synthetic construct
  misc_feature 1..20: note = Description of Artificial Sequence: Synthetic oligonucleotide
  source 1..20: mol_type = other DNA
cctaaaggacctcatgctcg

SEQ ID NO: 6309 - DNA, 20 bp, synthetic construct
  misc_feature 1..20: note = Description of Artificial Sequence: Synthetic oligonucleotide
  source 1..20: mol_type = other DNA
ctaaaggacctcatgctcgg

SEQ ID NO: 6310 - DNA, 20 bp, synthetic construct
  misc_feature 1..20: note = Description of Artificial Sequence: Synthetic oligonucleotide
  source 1..20: mol_type = other DNA
taaaggacctcatgctcggc

SEQ ID NO: 6311 - DNA, 20 bp, synthetic construct
  misc_feature 1..20: note = Description of Artificial Sequence: Synthetic oligonucleotide
  source 1..20: mol_type = other DNA
aaaggacctcatgctcggcc

SEQ ID NO: 6312 - DNA, 20 bp, synthetic construct
  misc_feature 1..20: note = Description of Artificial Sequence: Synthetic oligonucleotide
  source 1..20: mol_type = other DNA
aaggacctcatgctcggcca

SEQ ID NO: 6313 - DNA, 20 bp, synthetic construct
  misc_feature 1..20: note = Description of Artificial Sequence: Synthetic oligonucleotide
  source 1..20: mol_type = other DNA
aggacctcatgctcggccag

SEQ ID NO: 6314 - DNA, 20 bp, synthetic construct
  misc_feature 1..20: note = Description of Artificial Sequence: Synthetic oligonucleotide
  source 1..20: mol_type = other DNA
ggacctcatgctcggccaga

SEQ ID NO: 6315 - DNA, 20 bp, synthetic construct
  misc_feature 1..20: note = Description of Artificial Sequence: Synthetic oligonucleotide
  source 1..20: mol_type = other DNA
gacctcatgctcggccagag

SEQ ID NO: 6316 - DNA, 20 bp, synthetic construct
  misc_feature 1..20: note = Description of Artificial Sequence: Synthetic oligonucleotide
  source 1..20: mol_type = other DNA
acctcatgctcggccagagc

SEQ ID NO: 6317 - DNA, 20 bp, synthetic construct
  misc_feature 1..20: note = Description of Artificial Sequence: Synthetic oligonucleotide
  source 1..20: mol_type = other DNA
cctcatgctcggccagagca

SEQ ID NO: 6318 - DNA, 20 bp, synthetic construct
  misc_feature 1..20: note = Description of Artificial Sequence: Synthetic oligonucleotide
  source 1..20: mol_type = other DNA
ctcatgctcggccagagcag

SEQ ID NO: 6319 - DNA, 20 bp, synthetic construct
  misc_feature 1..20: note = Description of Artificial Sequence: Synthetic oligonucleotide
  source 1..20: mol_type = other DNA
tcatgctcggccagagcaga

SEQ ID NO: 6320 - DNA, 20 bp, synthetic construct
  misc_feature 1..20: note = Description of Artificial Sequence: Synthetic oligonucleotide
  source 1..20: mol_type = other DNA
catgctcggccagagcagag

SEQ ID NO: 6321 - DNA, 20 bp, synthetic construct
  misc_feature 1..20: note = Description of Artificial Sequence: Synthetic oligonucleotide
  source 1..20: mol_type = other DNA
atgctcggccagagcagaga

SEQ ID NO: 6322 - DNA, 20 bp, synthetic construct
  misc_feature 1..20: note = Description of Artificial Sequence: Synthetic oligonucleotide
  source 1..20: mol_type = other DNA
tgctcggccagagcagagac

SEQ ID NO: 6323 - DNA, 20 bp, synthetic construct
  misc_feature 1..20: note = Description of Artificial Sequence: Synthetic oligonucleotide
  source 1..20: mol_type = other DNA
gctcggccagagcagagact

SEQ ID NO: 6324 - DNA, 20 bp, synthetic construct
  misc_feature 1..20: note = Description of Artificial Sequence: Synthetic oligonucleotide
  source 1..20: mol_type = other DNA
ctcggccagagcagagacta

SEQ ID NO: 6325 - DNA, 20 bp, synthetic construct
  misc_feature 1..20: note = Description of Artificial Sequence: Synthetic oligonucleotide
  source 1..20: mol_type = other DNA
tcggccagagcagagactag

SEQ ID NO: 6326 - DNA, 20 bp, synthetic construct
  misc_feature 1..20: note = Description of Artificial Sequence: Synthetic oligonucleotide
  source 1..20: mol_type = other DNA
cggccagagcagagactagt

SEQ ID NO: 6327 - DNA, 20 bp, synthetic construct
  misc_feature 1..20: note = Description of Artificial Sequence: Synthetic oligonucleotide
  source 1..20: mol_type = other DNA
ggccagagcagagactagtg

SEQ ID NO: 6328 - DNA, 20 bp, synthetic construct
  misc_feature 1..20: note = Description of Artificial Sequence: Synthetic oligonucleotide
  source 1..20: mol_type = other DNA
gccagagcagagactagtgt

SEQ ID NO: 6329 - DNA, 20 bp, synthetic construct
  misc_feature 1..20: note = Description of Artificial Sequence: Synthetic oligonucleotide
  source 1..20: mol_type = other DNA
ccagagcagagactagtgtt

SEQ ID NO: 6330 - DNA, 20 bp, synthetic construct
  misc_feature 1..20: note = Description of Artificial Sequence: Synthetic oligonucleotide
  source 1..20: mol_type = other DNA
cagagcagagactagtgttc

SEQ ID NO: 6331 - DNA, 20 bp, synthetic construct
  misc_feature 1..20: note = Description of Artificial Sequence: Synthetic oligonucleotide
  source 1..20: mol_type = other DNA
agagcagagactagtgttcg

SEQ ID NO: 6332 - DNA, 20 bp, synthetic construct
  misc_feature 1..20: note = Description of Artificial Sequence: Synthetic oligonucleotide
  source 1..20: mol_type = other DNA
gagcagagactagtgttcgg

SEQ ID NO: 6333 - DNA, 20 bp, synthetic construct
  misc_feature 1..20: note = Description of Artificial Sequence: Synthetic oligonucleotide
  source 1..20: mol_type = other DNA
agcagagactagtgttcggc

SEQ ID NO: 6334 - DNA, 20 bp, synthetic construct
  misc_feature 1..20: note = Description of Artificial Sequence: Synthetic oligonucleotide
  source 1..20: mol_type = other DNA
gcagagactagtgttcggca

SEQ ID NO: 6335 - DNA, 20 bp, synthetic construct
  misc_feature 1..20: note = Description of Artificial Sequence: Synthetic oligonucleotide
  source 1..20: mol_type = other DNA
cagagactagtgttcggcac

SEQ ID NO: 6336 - DNA, 20 bp, synthetic construct
  misc_feature 1..20: note = Description of Artificial Sequence: Synthetic oligonucleotide
  source 1..20: mol_type = other DNA
agagactagtgttcggcaca

SEQ ID NO: 6337 - DNA, 20 bp, synthetic construct
  misc_feature 1..20: note = Description of Artificial Sequence: Synthetic oligonucleotide
  source 1..20: mol_type = other DNA
gagactagtgttcggcacag

SEQ ID NO: 6338 - DNA, 20 bp, synthetic construct
  misc_feature 1..20: note = Description of Artificial Sequence: Synthetic oligonucleotide
  source 1..20: mol_type = other DNA
agactagtgttcggcacagc

SEQ ID NO: 6339 - DNA, 20 bp, synthetic construct
  misc_feature 1..20: note = Description of Artificial Sequence: Synthetic oligonucleotide
  source 1..20: mol_type = other DNA
gactagtgttcggcacagct

SEQ ID NO: 6340 - DNA, 20 bp, synthetic construct
  misc_feature 1..20: note = Description of Artificial Sequence: Synthetic oligonucleotide
  source 1..20: mol_type = other DNA
actagtgttcggcacagctg

SEQ ID NO: 6341 - DNA, 20 bp, synthetic construct
  misc_feature 1..20: note = Description of Artificial Sequence: Synthetic oligonucleotide
  source 1..20: mol_type = other DNA
ctagtgttcggcacagctga

SEQ ID NO: 6342 - DNA, 20 bp, synthetic construct
  misc_feature 1..20: note = Description of Artificial Sequence: Synthetic oligonucleotide
  source 1..20: mol_type = other DNA
tagtgttcggcacagctgac

SEQ ID NO: 6343 - DNA, 20 bp, synthetic construct
  misc_feature 1..20: note = Description of Artificial Sequence: Synthetic oligonucleotide
  source 1..20: mol_type = other DNA
agtgttcggcacagctgact

SEQ ID NO: 6344 - DNA, 20 bp, synthetic construct
  misc_feature 1..20: note = Description of Artificial Sequence: Synthetic oligonucleotide
  source 1..20: mol_type = other DNA
gtgttcggcacagctgactg

SEQ ID NO: 6345 - DNA, 20 bp, synthetic construct
  misc_feature 1..20: note = Description of Artificial Sequence: Synthetic oligonucleotide
  source 1..20: mol_type = other DNA
tgttcggcacagctgactgt

SEQ ID NO: 6346 - DNA, 20 bp, synthetic construct
  misc_feature 1..20: note = Description of Artificial Sequence: Synthetic oligonucleotide
  source 1..20: mol_type = other DNA
gttcggcacagctgactgtt

SEQ ID NO: 6347 - DNA, 20 bp, synthetic construct
  misc_feature 1..20: note = Description of Artificial Sequence: Synthetic oligonucleotide
  source 1..20: mol_type = other DNA
ttcggcacagctgactgttg

SEQ ID NO: 6348 - DNA, 20 bp, synthetic construct
  misc_feature 1..20: note = Description of Artificial Sequence: Synthetic oligonucleotide
  source 1..20: mol_type = other DNA
tcggcacagctgactgttga

SEQ ID NO: 6349 - DNA, 20 bp, synthetic construct
  misc_feature 1..20: note = Description of Artificial Sequence: Synthetic oligonucleotide
  source 1..20: mol_type = other DNA
cggcacagctgactgttgaa

SEQ ID NO: 6350 - DNA, 20 bp, synthetic construct
  misc_feature 1..20: note = Description of Artificial Sequence: Synthetic oligonucleotide
  source 1..20: mol_type = other DNA
ggcacagctgactgttgaat

SEQ ID NO: 6351 - DNA, 20 bp, synthetic construct
  misc_feature 1..20: note = Description of Artificial Sequence: Synthetic oligonucleotide
  source 1..20: mol_type = other DNA
gcacagctgactgttgaatt

SEQ ID NO: 6352 - DNA, 20 bp, synthetic construct
  misc_feature 1..20: note = Description of Artificial Sequence: Synthetic oligonucleotide
  source 1..20: mol_type = other DNA
cacagctgactgttgaattt

SEQ ID NO: 6353 - DNA, 20 bp, synthetic construct
  misc_feature 1..20: note = Description of Artificial Sequence: Synthetic oligonucleotide
  source 1..20: mol_type = other DNA
acagctgactgttgaatttg

SEQ ID NO: 6354 - DNA, 20 bp, synthetic construct
  misc_feature 1..20: note = Description of Artificial Sequence: Synthetic oligonucleotide
  source 1..20: mol_type = other DNA
cagctgactgttgaatttgc

SEQ ID NO: 6355 - DNA, 20 bp, synthetic construct
  misc_feature 1..20: note = Description of Artificial Sequence: Synthetic oligonucleotide
  source 1..20: mol_type = other DNA
agctgactgttgaatttgct

SEQ ID NO: 6356 - DNA, 20 bp, synthetic construct
  misc_feature 1..20: note = Description of Artificial Sequence: Synthetic oligonucleotide
  source 1..20: mol_type = other DNA
gctgactgttgaatttgctc

SEQ ID NO: 6357 - DNA, 20 bp, synthetic construct
  misc_feature 1..20: note = Description of Artificial Sequence: Synthetic oligonucleotide
  source 1..20: mol_type = other DNA
ctgactgttgaatttgctct

SEQ ID NO: 6358 - DNA, 20 bp, synthetic construct
  misc_feature 1..20: note = Description of Artificial Sequence: Synthetic oligonucleotide
  source 1..20: mol_type = other DNA
tgactgttgaatttgctcta

SEQ ID NO: 6359 - DNA, 20 bp, synthetic construct
  misc_feature 1..20: note = Description of Artificial Sequence: Synthetic oligonucleotide
  source 1..20: mol_type = other DNA
gactgttgaatttgctctac

SEQ ID NO: 6360 - DNA, 20 bp, synthetic construct
  misc_feature 1..20: note = Description of Artificial Sequence: Synthetic oligonucleotide
  source 1..20: mol_type = other DNA
actgttgaatttgctctact

SEQ ID NO: 6361 - DNA, 20 bp, synthetic construct
  misc_feature 1..20: note = Description of Artificial Sequence: Synthetic oligonucleotide
  source 1..20: mol_type = other DNA
ctgttgaatttgctctactc

SEQ ID NO: 6362 - DNA, 20 bp, synthetic construct
  misc_feature 1..20: note = Description of Artificial Sequence: Synthetic oligonucleotide
  source 1..20: mol_type = other DNA
tgttgaatttgctctactct

SEQ ID NO: 6363 - DNA, 20 bp, synthetic construct
  misc_feature 1..20: note = Description of Artificial Sequence: Synthetic oligonucleotide
  source 1..20: mol_type = other DNA
gttgaatttgctctactctg

SEQ ID NO: 6364 - DNA, 20 bp, synthetic construct
  misc_feature 1..20: note = Description of Artificial Sequence: Synthetic oligonucleotide
  source 1..20: mol_type = other DNA
ttgaatttgctctactctgg

SEQ ID NO: 6365 - DNA, 20 bp, synthetic construct
  misc_feature 1..20: note = Description of Artificial Sequence: Synthetic oligonucleotide
  source 1..20: mol_type = other DNA
tgaatttgctctactctggc

SEQ ID NO: 6366 - DNA, 20 bp, synthetic construct
  misc_feature 1..20: note = Description of Artificial Sequence: Synthetic oligonucleotide
  source 1..20: mol_type = other DNA
gaatttgctctactctggcc

SEQ ID NO: 6367 - DNA, 20 bp, synthetic construct
  misc_feature 1..20: note = Description of Artificial Sequence: Synthetic oligonucleotide
  source 1..20: mol_type = other DNA
aatttgctctactctggcct

SEQ ID NO: 6368 - DNA, 20 bp, synthetic construct
  misc_feature 1..20: note = Description of Artificial Sequence: Synthetic oligonucleotide
  source 1..20: mol_type = other DNA
atttgctctactctggcctg

SEQ ID NO: 6369 - DNA, 20 bp, synthetic construct
  misc_feature 1..20: note = Description of Artificial Sequence: Synthetic oligonucleotide
  source 1..20: mol_type = other DNA
tttgctctactctggcctgg

SEQ ID NO: 6370 - DNA, 20 bp, synthetic construct
  misc_feature 1..20: note = Description of Artificial Sequence: Synthetic oligonucleotide
  source 1..20: mol_type = other DNA
ttgctctactctggcctggg

SEQ ID NO: 6371 - DNA, 20 bp, synthetic construct
  misc_feature 1..20: note = Description of Artificial Sequence: Synthetic oligonucleotide
  source 1..20: mol_type = other DNA
tgctctactctggcctgggt

SEQ ID NO: 6372 - DNA, 20 bp, synthetic construct
  misc_feature 1..20: note = Description of Artificial Sequence: Synthetic oligonucleotide
  source 1..20: mol_type = other DNA
gctctactctggcctgggtc

SEQ ID NO: 6373 - DNA, 20 bp, synthetic construct
  misc_feature 1..20: note = Description of Artificial Sequence: Synthetic oligonucleotide
  source 1..20: mol_type = other DNA
ctctactctggcctgggtct

SEQ ID NO: 6374 - DNA, 20 bp, synthetic construct
  misc_feature 1..20: note = Description of Artificial Sequence: Synthetic oligonucleotide
  source 1..20: mol_type = other DNA
tctactctggcctgggtctg

SEQ ID NO: 6375 - DNA, 20 bp, synthetic construct
  misc_feature 1..20: note = Description of Artificial Sequence: Synthetic oligonucleotide
  source 1..20: mol_type = other DNA
ctactctggcctgggtctgg

SEQ ID NO: 6376 - DNA, 20 bp, synthetic construct
  misc_feature 1..20: note = Description of Artificial Sequence: Synthetic oligonucleotide
  source 1..20: mol_type = other DNA
tactctggcctgggtctggc

SEQ ID NO: 6377 - DNA, 20 bp, synthetic construct
  misc_feature 1..20: note = Description of Artificial Sequence: Synthetic oligonucleotide
  source 1..20: mol_type = other DNA
actctggcctgggtctggcc

SEQ ID NO: 6378 - DNA, 20 bp, synthetic construct
  misc_feature 1..20: note = Description of Artificial Sequence: Synthetic oligonucleotide
  source 1..20: mol_type = other DNA
ctctggcctgggtctggcct

SEQ ID NO: 6379 - DNA, 20 bp, synthetic construct
  misc_feature 1..20: note = Description of Artificial Sequence: Synthetic oligonucleotide
  source 1..20: mol_type = other DNA
tctggcctgggtctggcctc

SEQ ID NO: 6380 - DNA, 20 bp, synthetic construct
  misc_feature 1..20: note = Description of Artificial Sequence: Synthetic oligonucleotide
  source 1..20: mol_type = other DNA
ctggcctgggtctggcctct

SEQ ID NO: 6381 - DNA, 20 bp, synthetic construct
  misc_feature 1..20: note = Description of Artificial Sequence: Synthetic oligonucleotide
  source 1..20: mol_type = other DNA
tggcctgggtctggcctctt

SEQ ID NO: 6382 - DNA, 20 bp, synthetic construct
  misc_feature 1..20: note = Description of Artificial Sequence: Synthetic oligonucleotide
  source 1..20: mol_type = other DNA
ggcctgggtctggcctcttc

SEQ ID NO: 6383 - DNA, 20 bp, synthetic construct
  misc_feature 1..20: note = Description of Artificial Sequence: Synthetic oligonucleotide
  source 1..20: mol_type = other DNA
gcctgggtctggcctcttcc

SEQ ID NO: 6384 - DNA, 20 bp, synthetic construct
  misc_feature 1..20: note = Description of Artificial Sequence: Synthetic oligonucleotide
  source 1..20: mol_type = other DNA
cctgggtctggcctcttcct

SEQ ID NO: 6385 - DNA, 20 bp, synthetic construct
  misc_feature 1..20: note = Description of Artificial Sequence: Synthetic oligonucleotide
  source 1..20: mol_type = other DNA
ctgggtctggcctcttcctg

SEQ ID NO: 6386 - DNA, 20 bp, synthetic construct
  misc_feature 1..20: note = Description of Artificial Sequence: Synthetic oligonucleotide
  source 1..20: mol_type = other DNA
tgggtctggcctcttcctgt

SEQ ID NO: 6387 - DNA, 20 bp, synthetic construct
  misc_feature 1..20: note = Description of Artificial Sequence: Synthetic oligonucleotide
  source 1..20: mol_type = other DNA
gggtctggcctcttcctgtc

SEQ ID NO: 6388 - DNA, 20 bp, synthetic construct
  misc_feature 1..20: note = Description of Artificial Sequence: Synthetic oligonucleotide
  source 1..20: mol_type = other DNA
ggtctggcctcttcctgtcc

SEQ ID NO: 6389 - DNA, 20 bp, synthetic construct
  misc_feature 1..20: note = Description of Artificial Sequence: Synthetic oligonucleotide
  source 1..20: mol_type = other DNA
gtctggcctcttcctgtccc

SEQ ID NO: 6390 - DNA, 20 bp, synthetic construct
  misc_feature 1..20: note = Description of Artificial Sequence: Synthetic oligonucleotide
  source 1..20: mol_type = other DNA
tctggcctcttcctgtccca

SEQ ID NO: 6391 - DNA, 20 bp, synthetic construct
  misc_feature 1..20: note = Description of Artificial Sequence: Synthetic oligonucleotide
  source 1..20: mol_type = other DNA
ctggcctcttcctgtcccac

SEQ ID NO: 6392 - DNA, 20 bp, synthetic construct
  misc_feature 1..20: note = Description of Artificial Sequence: Synthetic oligonucleotide
  source 1..20: mol_type = other DNA
tggcctcttcctgtcccacc

SEQ ID NO: 6393 - DNA, 20 bp, synthetic construct
  misc_feature 1..20: note = Description of Artificial Sequence: Synthetic oligonucleotide
  source 1..20: mol_type = other DNA
ggcctcttcctgtcccacct

SEQ ID NO: 6394 - DNA, 20 bp, synthetic construct
  misc_feature 1..20: note = Description of Artificial Sequence: Synthetic oligonucleotide
  source 1..20: mol_type = other DNA
gcctcttcctgtcccacctg

SEQ ID NO: 6395 - DNA, 20 bp, synthetic construct
  misc_feature 1..20: note = Description of Artificial Sequence: Synthetic oligonucleotide
  source 1..20: mol_type = other DNA
cctcttcctgtcccacctgc

SEQ ID NO: 6396 - DNA, 20 bp, synthetic construct
  misc_feature 1..20: note = Description of Artificial Sequence: Synthetic oligonucleotide
  source 1..20: mol_type = other DNA
ctcttcctgtcccacctgca

SEQ ID NO: 6397 - DNA, 20 bp, synthetic construct
  misc_feature 1..20: note = Description of Artificial Sequence: Synthetic oligonucleotide
  source 1..20: mol_type = other DNA
tcttcctgtcccacctgcag

SEQ ID NO: 6398 - DNA, 20 bp, synthetic construct
  misc_feature 1..20: note = Description of Artificial Sequence: Synthetic oligonucleotide
  source 1..20: mol_type = other DNA
cttcctgtcccacctgcagc

SEQ ID NO: 6399 - DNA, 20 bp, synthetic construct
  misc_feature 1..20: note = Description of Artificial Sequence: Synthetic oligonucleotide
  source 1..20: mol_type = other DNA
ttcctgtcccacctgcagcc

SEQ ID NO: 6400 - DNA, 20 bp, synthetic construct
  misc_feature 1..20: note = Description of Artificial Sequence: Synthetic oligonucleotide
  source 1..20: mol_type = other DNA
tcctgtcccacctgcagccc

SEQ ID NO: 6401 - DNA, 20 bp, synthetic construct
  misc_feature 1..20: note = Description of Artificial Sequence: Synthetic oligonucleotide
  source 1..20: mol_type = other DNA
cctgtcccacctgcagcccc

SEQ ID NO: 6402 - DNA, 20 bp, synthetic construct
  misc_feature 1..20: note = Description of Artificial Sequence: Synthetic oligonucleotide
  source 1..20: mol_type = other DNA
ctgtcccacctgcagcccca

SEQ ID NO: 6403 - DNA, 20 bp, synthetic construct
  misc_feature 1..20: note = Description of Artificial Sequence: Synthetic oligonucleotide
  source 1..20: mol_type = other DNA
tgtcccacctgcagccccac

SEQ ID NO: 6404 - DNA, 20 bp, synthetic construct
  misc_feature 1..20: note = Description of Artificial Sequence: Synthetic oligonucleotide
  source 1..20: mol_type = other DNA
gtcccacctgcagccccact

SEQ ID NO: 6405 - DNA, 20 bp, synthetic construct
  misc_feature 1..20: note = Description of Artificial Sequence: Synthetic oligonucleotide
  source 1..20: mol_type = other DNA
tcccacctgcagccccactt

SEQ ID NO: 6406 - DNA, 20 bp, synthetic construct
  misc_feature 1..20: note = Description of Artificial Sequence: Synthetic oligonucleotide
  source 1..20: mol_type = other DNA
cccacctgcagccccacttt

SEQ ID NO: 6407 - DNA, 20 bp, synthetic construct
  misc_feature 1..20: note = Description of Artificial Sequence: Synthetic oligonucleotide
  source 1..20: mol_type = other DNA
ccacctgcagccccactttt

SEQ ID NO: 6408 - DNA, 20 bp, synthetic construct
  misc_feature 1..20: note = Description of Artificial Sequence: Synthetic oligonucleotide
  source 1..20: mol_type = other DNA
cacctgcagccccacttttg

SEQ ID NO: 6409 - DNA, 20 bp, synthetic construct
  misc_feature 1..20: note = Description of Artificial Sequence: Synthetic oligonucleotide
  source 1..20: mol_type = other DNA
acctgcagccccacttttgt

SEQ ID NO: 6410 - DNA, 20 bp, synthetic construct
  misc_feature 1..20: note = Description of Artificial Sequence: Synthetic oligonucleotide
  source 1..20: mol_type = other DNA
cctgcagccccacttttgtc

SEQ ID NO: 6411 - DNA, 20 bp, synthetic construct
  misc_feature 1..20: note = Description of Artificial Sequence: Synthetic oligonucleotide
  source 1..20: mol_type = other DNA
ctgcagccccacttttgtcg

SEQ ID NO: 6412 - DNA, 20 bp, synthetic construct
  misc_feature 1..20: note = Description of Artificial Sequence: Synthetic oligonucleotide
  source 1..20: mol_type = other DNA
tgcagccccacttttgtcgg

SEQ ID NO: 6413 - DNA, 20 bp, synthetic construct
  misc_feature 1..20: note = Description of Artificial Sequence: Synthetic oligonucleotide
  source 1..20: mol_type = other DNA
gcagccccacttttgtcggg

SEQ ID NO: 6414 - DNA, 20 bp, synthetic construct
  misc_feature 1..20: note = Description of Artificial Sequence: Synthetic oligonucleotide
  source 1..20: mol_type = other DNA
cagccccacttttgtcgggg

SEQ ID NO: 6415 - DNA, 20 bp, synthetic construct
  misc_feature 1..20: note = Description of Artificial Sequence: Synthetic oligonucleotide
  source 1..20: mol_type = other DNA
agccccacttttgtcggggg

SEQ ID NO: 6416 - DNA, 20 bp, synthetic construct
  misc_feature 1..20: note = Description of Artificial Sequence: Synthetic oligonucleotide
  source 1..20: mol_type = other DNA
gccccacttttgtcgggggg

SEQ ID NO: 6417 - DNA, 20 bp, synthetic construct
  misc_feature 1..20: note = Description of Artificial Sequence: Synthetic oligonucleotide
  source 1..20: mol_type = other DNA
ccccacttttgtcggggggt

SEQ ID NO: 6418 - DNA, 20 bp, synthetic construct
  misc_feature 1..20: note = Description of Artificial Sequence: Synthetic oligonucleotide
  source 1..20: mol_type = other DNA
cccacttttgtcggggggtt

SEQ ID NO: 6419 - DNA, 20 bp, synthetic construct
  misc_feature 1..20: note = Description of Artificial Sequence: Synthetic oligonucleotide
  source 1..20: mol_type = other DNA
ccacttttgtcggggggttg

SEQ ID NO: 6420 - DNA, 20 bp, synthetic construct
  misc_feature 1..20: note = Description of Artificial Sequence: Synthetic oligonucleotide
  source 1..20: mol_type = other DNA
cacttttgtcggggggttgg

SEQ ID NO: 6421 - DNA, 20 bp, synthetic construct
  misc_feature 1..20: note = Description of Artificial Sequence: Synthetic oligonucleotide
  source 1..20: mol_type = other DNA
acttttgtcggggggttggg

SEQ ID NO: 6422 - DNA, 20 bp, synthetic construct
  misc_feature 1..20: note = Description of Artificial Sequence: Synthetic oligonucleotide
  source 1..20: mol_type = other DNA
cttttgtcggggggttgggg

SEQ ID NO: 6423 - DNA, 20 bp, synthetic construct
  misc_feature 1..20: note = Description of Artificial Sequence: Synthetic oligonucleotide
  source 1..20: mol_type = other DNA
ttttgtcggggggttggggg

SEQ ID NO: 6424 - DNA, 20 bp, synthetic construct
  misc_feature 1..20: note = Description of Artificial Sequence: Synthetic oligonucleotide
  source 1..20: mol_type = other DNA
tttgtcggggggttgggggg

SEQ ID NO: 6425 - DNA, 20 bp, synthetic construct
  misc_feature 1..20: note = Description of Artificial Sequence: Synthetic oligonucleotide
  source 1..20: mol_type = other DNA
ttgtcggggggttggggggg

SEQ ID NO: 6426 - DNA, 20 bp, synthetic construct
  misc_feature 1..20: note = Description of Artificial Sequence: Synthetic oligonucleotide
  source 1..20: mol_type = other DNA
tgtcggggggttgggggggt

SEQ ID NO: 6427 - DNA, 20 bp, synthetic construct
  misc_feature 1..20: note = Description of Artificial Sequence: Synthetic oligonucleotide
  source 1..20: mol_type = other DNA
gtcggggggttgggggggtt

SEQ ID NO: 6428 - DNA, 20 bp, synthetic construct
  misc_feature 1..20: note = Description of Artificial Sequence: Synthetic oligonucleotide
  source 1..20: mol_type = other DNA
tcggggggttgggggggttg

SEQ ID NO: 6429 - DNA, 20 bp, synthetic construct
  misc_feature 1..20: note = Description of Artificial Sequence: Synthetic oligonucleotide
  source 1..20: mol_type = other DNA
cggggggttgggggggttgc

SEQ ID NO: 6430 - DNA, 20 bp, synthetic construct
  misc_feature 1..20: note = Description of Artificial Sequence: Synthetic oligonucleotide
  source 1..20: mol_type = other DNA
ggggggttgggggggttgca

SEQ ID NO: 6431 - DNA, 20 bp, synthetic construct
  misc_feature 1..20: note = Description of Artificial Sequence: Synthetic oligonucleotide
  source 1..20: mol_type = other DNA
gggggttgggggggttgcag

SEQ ID NO: 6432 - DNA, 20 bp, synthetic construct
  misc_feature 1..20: note = Description of Artificial Sequence: Synthetic oligonucleotide
  source 1..20: mol_type = other DNA
ggggttgggggggttgcaga

SEQ ID NO: 6433 - DNA, 20 bp, synthetic construct
  misc_feature 1..20: note = Description of Artificial Sequence: Synthetic oligonucleotide
  source 1..20: mol_type = other DNA
gggttgggggggttgcagaa

SEQ ID NO: 6434 - DNA, 20 bp, synthetic construct
  misc_feature 1..20: note = Description of Artificial Sequence: Synthetic oligonucleotide
  source 1..20: mol_type = other DNA
ggttgggggggttgcagaaa

SEQ ID NO: 6435 - DNA, 20 bp, synthetic construct
  misc_feature 1..20: note = Description of Artificial Sequence: Synthetic oligonucleotide
  source 1..20: mol_type = other DNA
gttgggggggttgcagaaag

SEQ ID NO: 6436 - DNA, 20 bp, synthetic construct
  misc_feature 1..20: note = Description of Artificial Sequence: Synthetic oligonucleotide
  source 1..20: mol_type = other DNA
ttgggggggttgcagaaagg

SEQ ID NO: 6437 - DNA, 20 bp, synthetic construct
  misc_feature 1..20: note = Description of Artificial Sequence: Synthetic oligonucleotide
  source 1..20: mol_type = other DNA
tgggggggttgcagaaagga

SEQ ID NO: 6438 - DNA, 20 bp, synthetic construct
  misc_feature 1..20: note = Description of Artificial Sequence: Synthetic oligonucleotide
  source 1..20: mol_type = other DNA
gggggggttgcagaaaggaa

SEQ ID NO: 6439 - DNA, 20 bp, synthetic construct
  misc_feature 1..20: note = Description of Artificial Sequence: Synthetic oligonucleotide
  source 1..20: mol_type = other DNA
ggggggttgcagaaaggaaa

SEQ ID NO: 6440 - DNA, 20 bp, synthetic construct
  misc_feature 1..20: note = Description of Artificial Sequence: Synthetic oligonucleotide
  source 1..20: mol_type = other DNA
gggggttgcagaaaggaaaa

SEQ ID NO: 6441 - DNA, 20 bp, synthetic construct
  misc_feature 1..20: note = Description of Artificial Sequence: Synthetic oligonucleotide
  source 1..20: mol_type = other DNA
ggggttgcagaaaggaaaaa

SEQ ID NO: 6442 - DNA, 20 bp, synthetic construct
  misc_feature 1..20: note = Description of Artificial Sequence: Synthetic oligonucleotide
  source 1..20: mol_type = other DNA
gggttgcagaaaggaaaaat

SEQ ID NO: 6443 - DNA, 20 bp, synthetic construct
  misc_feature 1..20: note = Description of Artificial Sequence: Synthetic oligonucleotide
  source 1..20: mol_type = other DNA
ggttgcagaaaggaaaaata

SEQ ID NO: 6444 - DNA, 20 bp, synthetic construct
  misc_feature 1..20: note = Description of Artificial Sequence: Synthetic oligonucleotide
  source 1..20: mol_type = other DNA
gttgcagaaaggaaaaatac

SEQ ID NO: 6445 - DNA, 20 bp, synthetic construct
  misc_feature 1..20: note = Description of Artificial Sequence: Synthetic oligonucleotide
  source 1..20: mol_type = other DNA
ttgcagaaaggaaaaatacc

SEQ ID NO: 6446 - DNA, 20 bp, synthetic construct
  misc_feature 1..20: note = Description of Artificial Sequence: Synthetic oligonucleotide
  source 1..20: mol_type = other DNA
tgcagaaaggaaaaatacct

SEQ ID NO: 6447 - DNA, 20 bp, synthetic construct
  misc_feature 1..20: note = Description of Artificial Sequence: Synthetic oligonucleotide
  source 1..20: mol_type = other DNA
gcagaaaggaaaaataccta

SEQ ID NO: 6448 - DNA, 20 bp, synthetic construct
  misc_feature 1..20: note = Description of Artificial Sequence: Synthetic oligonucleotide
  source 1..20: mol_type = other DNA
cagaaaggaaaaatacctat

SEQ ID NO: 6449 - DNA, 20 bp, synthetic construct
  misc_feature 1..20: note = Description of Artificial Sequence: Synthetic oligonucleotide
  source 1..20: mol_type = other DNA
agaaaggaaaaatacctatt

SEQ ID NO: 6450 - DNA, 20 bp, synthetic construct
  misc_feature 1..20: note = Description of Artificial Sequence: Synthetic oligonucleotide
  source 1..20: mol_type = other DNA
gaaaggaaaaatacctattt

SEQ ID NO: 6451 - DNA, 20 bp, synthetic construct
  misc_feature 1..20: note = Description of Artificial Sequence: Synthetic oligonucleotide
  source 1..20: mol_type = other DNA
aaaggaaaaatacctatttt

SEQ ID NO: 6452 - DNA, 20 bp, synthetic construct
  misc_feature 1..20: note = Description of Artificial Sequence: Synthetic oligonucleotide
  source 1..20: mol_type = other DNA
aaggaaaaatacctattttt

SEQ ID NO: 6453 - DNA, 20 bp, synthetic construct
  misc_feature 1..20: note = Description of Artificial Sequence: Synthetic oligonucleotide
  source 1..20: mol_type = other DNA
aggaaaaatacctatttttc

SEQ ID NO: 6454 - DNA, 20 bp, synthetic construct
  misc_feature 1..20: note = Description of Artificial Sequence: Synthetic oligonucleotide
  source 1..20: mol_type = other DNA
ggaaaaatacctatttttcc

SEQ ID NO: 6455 - DNA, 20 bp, synthetic construct
  misc_feature 1..20: note = Description of Artificial Sequence: Synthetic oligonucleotide
  source 1..20: mol_type = other DNA
gaaaaatacctatttttcct

SEQ ID NO: 6456 - DNA, 20 bp, synthetic construct
  misc_feature 1..20: note = Description of Artificial Sequence: Synthetic oligonucleotide
  source 1..20: mol_type = other DNA
aaaaatacctatttttcctc

SEQ ID NO: 6457 - DNA, 20 bp, synthetic construct
  misc_feature 1..20: note = Description of Artificial Sequence: Synthetic oligonucleotide
  source 1..20: mol_type = other DNA
aaaatacctatttttcctca

SEQ ID NO: 6458 - DNA, 20 bp, synthetic construct
  misc_feature 1..20: note = Description of Artificial Sequence: Synthetic oligonucleotide
  source 1..20: mol_type = other DNA
aaatacctatttttcctcaa

SEQ ID NO: 6459 - DNA, 20 bp, synthetic construct
  misc_feature 1..20: note = Description of Artificial Sequence: Synthetic oligonucleotide
  source 1..20: mol_type = other DNA
aatacctatttttcctcaac

SEQ ID NO: 6460 - DNA, 20 bp, synthetic construct
  misc_feature 1..20: note = Description of Artificial Sequence: Synthetic oligonucleotide
  source 1..20: mol_type = other DNA
atacctatttttcctcaact

SEQ ID NO: 6461 - DNA, 20 bp, synthetic construct
  misc_feature 1..20: note = Description of Artificial Sequence: Synthetic oligonucleotide
  source 1..20: mol_type = other DNA
tacctatttttcctcaactc

SEQ ID NO: 6462 - DNA, 20 bp, synthetic construct
  misc_feature 1..20: note = Description of Artificial Sequence: Synthetic oligonucleotide
  source 1..20: mol_type = other DNA
acctatttttcctcaactcc

SEQ ID NO: 6463 - DNA, 20 bp, synthetic construct
  misc_feature 1..20: note = Description of Artificial Sequence: Synthetic oligonucleotide
  source 1..20: mol_type = other DNA
cctatttttcctcaactcca

SEQ ID NO: 6464 - DNA, 20 bp, synthetic construct
  misc_feature 1..20: note = Description of Artificial Sequence: Synthetic oligonucleotide
  source 1..20: mol_type = other DNA
ctatttttcctcaactccat

SEQ ID NO: 6465 - DNA, 20 bp, synthetic construct
  misc_feature 1..20: note = Description of Artificial Sequence: Synthetic oligonucleotide
  source 1..20: mol_type = other DNA
tatttttcctcaactccatt

SEQ ID NO: 6466 - DNA, 20 bp, synthetic construct
  misc_feature 1..20: note = Description of Artificial Sequence: Synthetic oligonucleotide
  source 1..20: mol_type = other DNA
atttttcctcaactccatta

SEQ ID NO: 6467 - DNA, 20 bp, synthetic construct
  misc_feature 1..20: note = Description of Artificial Sequence: Synthetic oligonucleotide
  source 1..20: mol_type = other DNA
tttttcctcaactccattac

SEQ ID NO: 6468 - DNA, 20 bp, synthetic construct
  misc_feature 1..20: note = Description of Artificial Sequence: Synthetic oligonucleotide
  source 1..20: mol_type = other DNA
ttttcctcaactccattaca

SEQ ID NO: 6469 - DNA, 20 bp, synthetic construct
  misc_feature 1..20: note = Description of Artificial Sequence: Synthetic oligonucleotide
  source 1..20: mol_type = other DNA
tttcctcaactccattacaa

SEQ ID NO: 6470 - DNA, 20 bp, synthetic construct
  misc_feature 1..20: note = Description of Artificial Sequence: Synthetic oligonucleotide
  source 1..20: mol_type = other DNA
ttcctcaactccattacaac

SEQ ID NO: 6471 - DNA, 20 bp, synthetic construct
  misc_feature 1..20: note = Description of Artificial Sequence: Synthetic oligonucleotide
  source 1..20: mol_type = other DNA
tcctcaactccattacaact

SEQ ID NO: 6472 - DNA, 20 bp, synthetic construct
  misc_feature 1..20: note = Description of Artificial Sequence: Synthetic oligonucleotide
  source 1..20: mol_type = other DNA
cctcaactccattacaactt

SEQ ID NO: 6473 - DNA, 20 bp, synthetic construct
  misc_feature 1..20: note = Description of Artificial Sequence: Synthetic oligonucleotide
  source 1..20: mol_type = other DNA
ctcaactccattacaacttg

SEQ ID NO: 6474 - DNA, 20 bp, synthetic construct
  misc_feature 1..20: note = Description of Artificial Sequence: Synthetic oligonucleotide
  source 1..20: mol_type = other DNA
tcaactccattacaacttgc

SEQ ID NO: 6475 - DNA, 20 bp, synthetic construct
  misc_feature 1..20: note = Description of Artificial Sequence: Synthetic oligonucleotide
  source 1..20: mol_type = other DNA
caactccattacaacttgca

SEQ ID NO: 6476 - DNA, 20 bp, synthetic construct
  misc_feature 1..20: note = Description of Artificial Sequence: Synthetic oligonucleotide
  source 1..20: mol_type = other DNA
aactccattacaacttgcag

SEQ ID NO: 6477 - DNA, 20 bp, synthetic construct
  misc_feature 1..20: note = Description of Artificial Sequence: Synthetic oligonucleotide
  source 1..20: mol_type = other DNA
actccattacaacttgcagg

SEQ ID NO: 6478 - DNA, 20 bp, synthetic construct
  misc_feature 1..20: note = Description of Artificial Sequence: Synthetic oligonucleotide
  source 1..20: mol_type = other DNA
ctccattacaacttgcagga

SEQ ID NO: 6479 - DNA, 20 bp, synthetic construct
  misc_feature 1..20: note = Description of Artificial Sequence: Synthetic oligonucleotide
  source 1..20: mol_type = other DNA
tccattacaacttgcaggaa

SEQ ID NO: 6480 - DNA, 20 bp, synthetic construct
  misc_feature 1..20: note = Description of Artificial Sequence: Synthetic oligonucleotide
  source 1..20: mol_type = other DNA
ccattacaacttgcaggaaa

SEQ ID NO: 6481 - DNA, 20 bp, synthetic construct
  misc_feature 1..20: note = Description of Artificial Sequence: Synthetic oligonucleotide
  source 1..20: mol_type = other DNA
cattacaacttgcaggaaaa

SEQ ID NO: 6482 - DNA, 20 bp, synthetic construct
  misc_feature 1..20: note = Description of Artificial Sequence: Synthetic oligonucleotide
  source 1..20: mol_type = other DNA
attacaacttgcaggaaaac

SEQ ID NO: 6483 - DNA, 20 bp, synthetic construct
  misc_feature 1..20: note = Description of Artificial Sequence: Synthetic oligonucleotide
  source 1..20: mol_type = other DNA
ttacaacttgcaggaaaacc

SEQ ID NO: 6484 - DNA, 20 bp, synthetic construct
  misc_feature 1..20: note = Description of Artificial Sequence: Synthetic oligonucleotide
  source 1..20: mol_type = other DNA
tacaacttgcaggaaaacca

SEQ ID NO: 6485 - DNA, 20 bp, synthetic construct
  misc_feature 1..20: note = Description of Artificial Sequence: Synthetic oligonucleotide
  source 1..20: mol_type = other DNA
acaacttgcaggaaaaccat

SEQ ID NO: 6486 - DNA, 20 bp, synthetic construct
  misc_feature 1..20: note = Description of Artificial Sequence: Synthetic oligonucleotide
  source 1..20: mol_type = other DNA
caacttgcaggaaaaccatc

SEQ ID NO: 6487 - DNA, 20 bp, synthetic construct
  misc_feature 1..20: note = Description of Artificial Sequence: Synthetic oligonucleotide
  source 1..20: mol_type = other DNA
aacttgcaggaaaaccatca

SEQ ID NO: 6488 - DNA, 20 bp, synthetic construct
  misc_feature 1..20: note = Description of Artificial Sequence: Synthetic oligonucleotide
  source 1..20: mol_type = other DNA
acttgcaggaaaaccatcac

SEQ ID NO: 6489 - DNA, 20 bp, synthetic construct
  misc_feature 1..20: note = Description of Artificial Sequence: Synthetic oligonucleotide
  source 1..20: mol_type = other DNA
cttgcaggaaaaccatcaca

SEQ ID NO: 6490 - DNA, 20 bp, synthetic construct
  misc_feature 1..20: note = Description of Artificial Sequence: Synthetic oligonucleotide
  source 1..20: mol_type = other DNA
ttgcaggaaaaccatcacaa

SEQ ID NO: 6491 - DNA, 20 bp, synthetic construct
  misc_feature 1..20: note = Description of Artificial Sequence: Synthetic oligonucleotide
  source 1..20: mol_type = other DNA
tgcaggaaaaccatcacaat

SEQ ID NO: 6492 - DNA, 20 bp, synthetic construct
  misc_feature 1..20: note = Description of Artificial Sequence: Synthetic oligonucleotide
  source 1..20: mol_type = other DNA
gcaggaaaaccatcacaatg

SEQ ID NO: 6493 - DNA, 20 bp, synthetic construct
  misc_feature 1..20: note = Description of Artificial Sequence: Synthetic oligonucleotide
  source 1..20: mol_type = other DNA
caggaaaaccatcacaatga

SEQ ID NO: 6494 - DNA, 20 bp, synthetic construct
  misc_feature 1..20: note = Description of Artificial Sequence: Synthetic oligonucleotide
  source 1..20: mol_type = other DNA
aggaaaaccatcacaatgaa

SEQ ID NO: 6495 - DNA, 20 bp, synthetic construct
  misc_feature 1..20: note = Description of Artificial Sequence: Synthetic oligonucleotide
  source 1..20: mol_type = other DNA
ggaaaaccatcacaatgaat

SEQ ID NO: 6496 - DNA, 20 bp, synthetic construct
  misc_feature 1..20: note = Description of Artificial Sequence: Synthetic oligonucleotide
  source 1..20: mol_type = other DNA
gaaaaccatcacaatgaata

SEQ ID NO: 6497 - DNA, 20 bp, synthetic construct
  misc_feature 1..20: note = Description of Artificial Sequence: Synthetic oligonucleotide
  source 1..20: mol_type = other DNA
aaaaccatcacaatgaatat

SEQ ID NO: 6498 - DNA, 20 bp, synthetic construct
  misc_feature 1..20: note = Description of Artificial Sequence: Synthetic oligonucleotide
  source 1..20: mol_type = other DNA
aaaccatcacaatgaatata

SEQ ID NO: 6499 - DNA, 20 bp, synthetic construct
  misc_feature 1..20: note = Description of Artificial Sequence: Synthetic oligonucleotide
  source 1..20: mol_type = other DNA
aaccatcacaatgaatatac

SEQ ID NO: 6500 - DNA, 20 bp, synthetic construct
  misc_feature 1..20: note = Description of Artificial Sequence: Synthetic oligonucleotide
  source 1..20: mol_type = other DNA
accatcacaatgaatataca

SEQ ID NO: 6501 - DNA, 20 bp, synthetic construct
  misc_feature 1..20: note = Description of Artificial Sequence: Synthetic oligonucleotide
  source 1..20: mol_type = other DNA
ccatcacaatgaatatacag

SEQ ID NO: 6502 - DNA, 20 bp, synthetic construct
  misc_feature 1..20: note = Description of Artificial Sequence: Synthetic oligonucleotide
  source 1..20: mol_type = other DNA
catcacaatgaatatacaga

SEQ ID NO: 6503 - DNA, 20 bp, synthetic construct
  misc_feature 1..20: note = Description of Artificial Sequence: Synthetic oligonucleotide
  source 1..20: mol_type = other DNA
atcacaatgaatatacagat

SEQ ID NO: 6504 - DNA, 20 bp, synthetic construct
  misc_feature 1..20: note = Description of Artificial Sequence: Synthetic oligonucleotide
  source 1..20: mol_type = other DNA
tcacaatgaatatacagatt

SEQ ID NO: 6505 - DNA, 20 bp, synthetic construct
  misc_feature 1..20: note = Description of Artificial Sequence: Synthetic oligonucleotide
  source 1..20: mol_type = other DNA
cacaatgaatatacagattt

SEQ ID NO: 6506 - DNA, 20 bp, synthetic construct
  misc_feature 1..20: note = Description of Artificial Sequence: Synthetic oligonucleotide
  source 1..20: mol_type = other DNA
acaatgaatatacagatttg

SEQ ID NO: 6507 - DNA, 20 bp, synthetic construct
  misc_feature 1..20: note = Description of Artificial Sequence: Synthetic oligonucleotide
  source 1..20: mol_type = other DNA
caatgaatatacagatttgt

SEQ ID NO: 6508 - DNA, 20 bp, synthetic construct
  misc_feature 1..20: note = Description of Artificial Sequence: Synthetic oligonucleotide
  source 1..20: mol_type = other DNA
aatgaatatacagatttgtc

SEQ ID NO: 6509 - DNA, 20 bp, synthetic construct
  misc_feature 1..20: note = Description of Artificial Sequence: Synthetic oligonucleotide
  source 1..20: mol_type = other DNA
atgaatatacagatttgtct

SEQ ID NO: 6510 - DNA, 20 bp, synthetic construct
  misc_feature 1..20: note = Description of Artificial Sequence: Synthetic oligonucleotide
  source 1..20: mol_type = other DNA
tgaatatacagatttgtctt

SEQ ID NO: 6511 - DNA, 20 bp, synthetic construct
  misc_feature 1..20: note = Description of Artificial Sequence: Synthetic oligonucleotide
  source 1..20: mol_type = other DNA
gaatatacagatttgtcttg

SEQ ID NO: 6512 - DNA, 20 bp, synthetic construct
  misc_feature 1..20: note = Description of Artificial Sequence: Synthetic oligonucleotide
  source 1..20: mol_type = other DNA
aatatacagatttgtcttga

SEQ ID NO: 6513 - DNA, 20 bp, synthetic construct
  misc_feature 1..20: note = Description of Artificial Sequence: Synthetic oligonucleotide
  source 1..20: mol_type = other DNA
atatacagatttgtcttgaa

SEQ ID NO: 6514 - DNA, 20 bp, synthetic construct
  misc_feature 1..20: note = Description of Artificial Sequence: Synthetic oligonucleotide
  source 1..20: mol_type = other DNA
tatacagatttgtcttgaat

SEQ ID NO: 6515 - DNA, 20 bp, synthetic construct
  misc_feature 1..20: note = Description of Artificial Sequence: Synthetic oligonucleotide
  source 1..20: mol_type = other DNA
atacagatttgtcttgaatc

SEQ ID NO: 6516 - DNA, 20 bp, synthetic construct
  misc_feature 1..20: note = Description of Artificial Sequence: Synthetic oligonucleotide
  source 1..20: mol_type = other DNA
tacagatttgtcttgaatca

SEQ ID NO: 6517 - DNA, 20 bp, synthetic construct
  misc_feature 1..20: note = Description of Artificial Sequence: Synthetic oligonucleotide
  source 1..20: mol_type = other DNA
acagatttgtcttgaatcag

SEQ ID NO: 6518 - DNA, 20 bp, synthetic construct
  misc_feature 1..20: note = Description of Artificial Sequence: Synthetic oligonucleotide
  source 1..20: mol_type = other DNA
cagatttgtcttgaatcaga

SEQ ID NO: 6519 - DNA, 20 bp, synthetic construct
  misc_feature 1..20: note = Description of Artificial Sequence: Synthetic oligonucleotide
  source 1..20: mol_type = other DNA
agatttgtcttgaatcagaa

SEQ ID NO: 6520 - DNA, 20 bp, synthetic construct
  misc_feature 1..20: note = Description of Artificial Sequence: Synthetic oligonucleotide
  source 1..20: mol_type = other DNA
gatttgtcttgaatcagaat

SEQ ID NO: 6521 - DNA, 20 bp, synthetic construct
  misc_feature 1..20: note = Description of Artificial Sequence: Synthetic oligonucleotide
  source 1..20: mol_type = other DNA
atttgtcttgaatcagaata

SEQ ID NO: 6522 - DNA, 20 bp, synthetic construct
  misc_feature 1..20: note = Description of Artificial Sequence: Synthetic oligonucleotide
  source 1..20: mol_type = other DNA
tttgtcttgaatcagaatag

SEQ ID NO: 6523 - DNA, 20 bp, synthetic construct
  misc_feature 1..20: note = Description of Artificial Sequence: Synthetic oligonucleotide
  source 1..20: mol_type = other DNA
ttgtcttgaatcagaatagg

SEQ ID NO: 6524 - DNA, 20 bp, synthetic construct
  misc_feature 1..20: note = Description of Artificial Sequence: Synthetic oligonucleotide
  source 1..20: mol_type = other DNA
tgtcttgaatcagaatagga

SEQ ID NO: 6525 - DNA, 20 bp, synthetic construct
  misc_feature 1..20: note = Description of Artificial Sequence: Synthetic oligonucleotide
  source 1..20: mol_type = other DNA
gtcttgaatcagaataggaa

SEQ ID NO: 6526 - DNA, 20 bp, synthetic construct
  misc_feature 1..20: note = Description of Artificial Sequence: Synthetic oligonucleotide
  source 1..20: mol_type = other DNA
tcttgaatcagaataggaat

SEQ ID NO: 6527 - DNA, 20 bp, synthetic construct
  misc_feature 1..20: note = Description of Artificial Sequence: Synthetic oligonucleotide
  source 1..20: mol_type = other DNA
cttgaatcagaataggaatg

SEQ ID NO: 6528 - DNA, 20 bp, synthetic construct
  misc_feature 1..20: note = Description of Artificial Sequence: Synthetic oligonucleotide
  source 1..20: mol_type = other DNA
ttgaatcagaataggaatgg

SEQ ID NO: 6529 - DNA, 20 bp, synthetic construct
  misc_feature 1..20: note = Description of Artificial Sequence: Synthetic oligonucleotide
  source 1..20: mol_type = other DNA
tgaatcagaataggaatggc

SEQ ID NO: 6530 - DNA, 20 bp, synthetic construct
  misc_feature 1..20: note = Description of Artificial Sequence: Synthetic oligonucleotide
  source 1..20: mol_type = other DNA
gaatcagaataggaatggca

SEQ ID NO: 6531 - DNA, 20 bp, synthetic construct
  misc_feature 1..20: note = Description of Artificial Sequence: Synthetic oligonucleotide
  source 1..20: mol_type = other DNA
aatcagaataggaatggcac

SEQ ID NO: 6532 - DNA, 20 bp, synthetic construct
  misc_feature 1..20: note = Description of Artificial Sequence: Synthetic oligonucleotide
  source 1..20: mol_type = other DNA
atcagaataggaatggcacc

SEQ ID NO: 6533 - DNA, 20 bp, synthetic construct
  misc_feature 1..20: note = Description of Artificial Sequence: Synthetic oligonucleotide
  source 1..20: mol_type = other DNA
tcagaataggaatggcaccc

SEQ ID NO: 6534 - DNA, 20 bp, synthetic construct
  misc_feature 1..20: note = Description of Artificial Sequence: Synthetic oligonucleotide
  source 1..20: mol_type = other DNA
cagaataggaatggcacccc

SEQ ID NO: 6535 - DNA, 20 bp, synthetic construct
  misc_feature 1..20: note = Description of Artificial Sequence: Synthetic oligonucleotide
  source 1..20: mol_type = other DNA
agaataggaatggcaccccc

SEQ ID NO: 6536 - DNA, 20 bp, synthetic construct
  misc_feature 1..20: note = Description of Artificial Sequence: Synthetic oligonucleotide
  source 1..20: mol_type = other DNA
gaataggaatggcacccccg

SEQ ID NO: 6537 - DNA, 20 bp, synthetic construct
  misc_feature 1..20: note = Description of Artificial Sequence: Synthetic oligonucleotide
  source 1..20: mol_type = other DNA
aataggaatggcacccccgg

SEQ ID NO: 6538 - DNA, 20 bp, synthetic construct
  misc_feature 1..20: note = Description of Artificial Sequence: Synthetic oligonucleotide
  source 1..20: mol_type = other DNA
ataggaatggcacccccgga

SEQ ID NO: 6539 - DNA, 20 bp, synthetic construct
  misc_feature 1..20: note = Description of Artificial Sequence: Synthetic oligonucleotide
  source 1..20: mol_type = other DNA
taggaatggcacccccggag

SEQ ID NO: 6540 - DNA, 20 bp, synthetic construct
  misc_feature 1..20: note = Description of Artificial Sequence: Synthetic oligonucleotide
  source 1..20: mol_type = other DNA
aggaatggcacccccggagt

SEQ ID NO: 6541 - DNA, 20 bp, synthetic construct
  misc_feature 1..20: note = Description of Artificial Sequence: Synthetic oligonucleotide
  source 1..20: mol_type = other DNA
ggaatggcacccccggagtt

SEQ ID NO: 6542 - DNA, 20 bp, synthetic construct
  misc_feature 1..20: note = Description of Artificial Sequence: Synthetic oligonucleotide
  source 1..20: mol_type = other DNA
gaatggcacccccggagttg

SEQ ID NO: 6543 - DNA, 20 bp, synthetic construct
  misc_feature 1..20: note = Description of Artificial Sequence: Synthetic oligonucleotide
  source 1..20: mol_type = other DNA
aatggcacccccggagttgt

SEQ ID NO: 6544 - DNA, 20 bp, synthetic construct
  misc_feature 1..20: note = Description of Artificial Sequence: Synthetic oligonucleotide
  source 1..20: mol_type = other DNA
atggcacccccggagttgta

SEQ ID NO: 6545 - DNA, 20 bp, synthetic construct
  misc_feature 1..20: note = Description of Artificial Sequence: Synthetic oligonucleotide
  source 1..20: mol_type = other DNA
tggcacccccggagttgtac

SEQ ID NO: 6546 - DNA, 20 bp, synthetic construct
  misc_feature 1..20: note = Description of Artificial Sequence: Synthetic oligonucleotide
  source 1..20: mol_type = other DNA
ggcacccccggagttgtacg

SEQ ID NO: 6547 - DNA, 20 bp, synthetic construct
  misc_feature 1..20: note = Description of Artificial Sequence: Synthetic oligonucleotide
  source 1..20: mol_type = other DNA
gcacccccggagttgtacgc

SEQ ID NO: 6548 - DNA, 20 bp, synthetic construct
  misc_feature 1..20: note = Description of Artificial Sequence: Synthetic oligonucleotide
  source 1..20: mol_type = other DNA
cacccccggagttgtacgcg

SEQ ID NO: 6549 - DNA, 20 bp, synthetic construct
  misc_feature 1..20: note = Description of Artificial Sequence: Synthetic oligonucleotide
  source 1..20: mol_type = other DNA
acccccggagttgtacgcgg

SEQ ID NO: 6550 - DNA, 20 bp, synthetic construct
  misc_feature 1..20: note = Description of Artificial Sequence: Synthetic oligonucleotide
  source 1..20: mol_type = other DNA
cccccggagttgtacgcggt

SEQ ID NO: 6551 - DNA, 20 bp, synthetic construct
  misc_feature 1..20: note = Description of Artificial Sequence: Synthetic oligonucleotide
  source 1..20: mol_type = other DNA
ccccggagttgtacgcggtc

SEQ ID NO: 6552 - DNA, 20 bp, synthetic construct
  misc_feature 1..20: note = Description of Artificial Sequence: Synthetic oligonucleotide
  source 1..20: mol_type = other DNA
cccggagttgtacgcggtca

SEQ ID NO: 6553 - DNA, 20 bp, synthetic construct
  misc_feature 1..20: note = Description of Artificial Sequence: Synthetic oligonucleotide
  source 1..20: mol_type = other DNA
ccggagttgtacgcggtcat

SEQ ID NO: 6554 - DNA, 20 bp, synthetic construct
  misc_feature 1..20: note = Description of Artificial Sequence: Synthetic oligonucleotide
  source 1..20: mol_type = other DNA
cggagttgtacgcggtcatg

SEQ ID NO: 6555 - DNA, 20 bp, synthetic construct
  misc_feature 1..20: note = Description of Artificial Sequence: Synthetic oligonucleotide
  source 1..20: mol_type = other DNA
ggagttgtacgcggtcatgt

SEQ ID NO: 6556 - DNA, 20 bp, synthetic construct
  misc_feature 1..20: note = Description of Artificial Sequence: Synthetic oligonucleotide
  source 1..20: mol_type = other DNA
gagttgtacgcggtcatgtg

SEQ ID NO: 6557 - DNA, 20 bp, synthetic construct
  misc_feature 1..20: note = Description of Artificial Sequence: Synthetic oligonucleotide
  source 1..20: mol_type = other DNA
agttgtacgcggtcatgtgt

SEQ ID NO: 6558 - DNA, 20 bp, synthetic construct
  misc_feature 1..20: note = Description of Artificial Sequence: Synthetic oligonucleotide
  source 1..20: mol_type = other DNA
gttgtacgcggtcatgtgtg

SEQ ID NO: 6559 - DNA, 20 bp, synthetic construct
  misc_feature 1..20: note = Description of Artificial Sequence: Synthetic oligonucleotide
  source 1..20: mol_type = other DNA
ttgtacgcggtcatgtgtgg

SEQ ID NO: 6560 - DNA, 20 bp, synthetic construct
  misc_feature 1..20: note = Description of Artificial Sequence: Synthetic oligonucleotide
  source 1..20: mol_type = other DNA
tgtacgcggtcatgtgtggt

SEQ ID NO: 6561 - DNA, 20 bp, synthetic construct
  misc_feature 1..20: note = Description of Artificial Sequence: Synthetic oligonucleotide
  source 1..20: mol_type = other DNA
gtacgcggtcatgtgtggtg

SEQ ID NO: 6562 - DNA, 20 bp, synthetic construct
  misc_feature 1..20: note = Description of Artificial Sequence: Synthetic oligonucleotide
  source 1..20: mol_type = other DNA
tacgcggtcatgtgtggtgg

SEQ ID NO: 6563 - DNA, 20 bp, synthetic construct
  misc_feature 1..20: note = Description of Artificial Sequence: Synthetic oligonucleotide
  source 1..20: mol_type = other DNA
acgcggtcatgtgtggtggc

SEQ ID NO: 6564 - DNA, 20 bp, synthetic construct
  misc_feature 1..20: note = Description of Artificial Sequence: Synthetic oligonucleotide
  source 1..20: mol_type = other DNA
cgcggtcatgtgtggtggca

SEQ ID NO: 6565 - DNA, 20 bp, synthetic construct
  misc_feature 1..20: note = Description of Artificial Sequence: Synthetic oligonucleotide
  source 1..20: mol_type = other DNA
gcggtcatgtgtggtggcac

SEQ ID NO: 6566 - DNA, 20 bp, synthetic construct
  misc_feature 1..20: note = Description of Artificial Sequence: Synthetic oligonucleotide
  source 1..20: mol_type = other DNA
cggtcatgtgtggtggcact

SEQ ID NO: 6567 - DNA, 20 bp, synthetic construct
  misc_feature 1..20: note = Description of Artificial Sequence: Synthetic oligonucleotide
  source 1..20: mol_type = other DNA
ggtcatgtgtggtggcactg

SEQ ID NO: 6568 - DNA, 20 bp, synthetic construct
  misc_feature 1..20: note = Description of Artificial Sequence: Synthetic oligonucleotide
  source 1..20: mol_type = other DNA
gtcatgtgtggtggcactgg

SEQ ID NO: 6569 - DNA, 20 bp, synthetic construct
  misc_feature 1..20: note = Description of Artificial Sequence: Synthetic oligonucleotide
  source 1..20: mol_type = other DNA
tcatgtgtggtggcactggt

SEQ ID NO: 6570 - DNA, 20 bp, synthetic construct
  misc_feature 1..20: note = Description of Artificial Sequence: Synthetic oligonucleotide
  source 1..20: mol_type = other DNA
catgtgtggtggcactggtc

SEQ ID NO: 6571 - DNA, 20 bp, synthetic construct
  misc_feature 1..20: note = Description of Artificial Sequence: Synthetic oligonucleotide
  source 1..20: mol_type = other DNA
atgtgtggtggcactggtcc

SEQ ID NO: 6572 - DNA, 20 bp, synthetic construct
  misc_feature 1..20: note = Description of Artificial Sequence: Synthetic oligonucleotide
  source 1..20: mol_type = other DNA
tgtgtggtggcactggtcca

SEQ ID NO: 6573 - DNA, 20 bp, synthetic construct
  misc_feature 1..20: note = Description of Artificial Sequence: Synthetic oligonucleotide
  source 1..20: mol_type = other DNA
gtgtggtggcactggtccag

SEQ ID NO: 6574 - DNA, 20 bp, synthetic construct
  misc_feature 1..20: note = Description of Artificial Sequence: Synthetic oligonucleotide
  source 1..20: mol_type = other DNA
tgtggtggcactggtccagt

SEQ ID NO: 6575 - DNA, 20 bp, synthetic construct
  misc_feature 1..20: note = Description of Artificial Sequence: Synthetic oligonucleotide
  source 1..20: mol_type = other DNA
gtggtggcactggtccagtc

SEQ ID NO: 6576 - DNA, 20 bp, synthetic construct
  misc_feature 1..20: note = Description of Artificial Sequence: Synthetic oligonucleotide
  source 1..20: mol_type = other DNA
tggtggcactggtccagtca

SEQ ID NO: 6577 - DNA, 20 bp, synthetic construct
  misc_feature 1..20: note = Description of Artificial Sequence: Synthetic oligonucleotide
  source 1..20: mol_type = other DNA
ggtggcactggtccagtcat

SEQ ID NO: 6578 - DNA, 20 bp, synthetic construct
  misc_feature 1..20: note = Description of Artificial Sequence: Synthetic oligonucleotide
  source 1..20: mol_type = other DNA
gtggcactggtccagtcatg

SEQ ID NO: 6579 - DNA, 20 bp, synthetic construct
  misc_feature 1..20: note = Description of Artificial Sequence: Synthetic oligonucleotide
  source 1..20: mol_type = other DNA
tggcactggtccagtcatgg

SEQ ID NO: 6580 - DNA, 20 bp, synthetic construct
  misc_feature 1..20: note = Description of Artificial Sequence: Synthetic oligonucleotide
  source 1..20: mol_type = other DNA
ggcactggtccagtcatggg

SEQ ID NO: 6581 - DNA, 20 bp, synthetic construct
  misc_feature 1..20: note = Description of Artificial Sequence: Synthetic oligonucleotide
  source 1..20: mol_type = other DNA
gcactggtccagtcatgggg

SEQ ID NO: 6582 - DNA, 20 bp, synthetic construct
  misc_feature 1..20: note = Description of Artificial Sequence: Synthetic oligonucleotide
  source 1..20: mol_type = other DNA
cactggtccagtcatggggc

SEQ ID NO: 6583 - DNA, 20 bp, synthetic construct
  misc_feature 1..20: note = Description of Artificial Sequence: Synthetic oligonucleotide
  source 1..20: mol_type = other DNA
actggtccagtcatggggcc

SEQ ID NO: 6584 - DNA, 20 bp, synthetic construct
  misc_feature 1..20: note = Description of Artificial Sequence: Synthetic oligonucleotide
  source 1..20: mol_type = other DNA
ctggtccagtcatggggccc

SEQ ID NO: 6585 - DNA, 20 bp, synthetic construct
  misc_feature 1..20: note = Description of Artificial Sequence: Synthetic oligonucleotide
  source 1..20: mol_type = other DNA
tggtccagtcatggggcccc

SEQ ID NO: 6586 - DNA, 20 bp, synthetic construct
  misc_feature 1..20: note = Description of Artificial Sequence: Synthetic oligonucleotide
  source 1..20: mol_type = other DNA
ggtccagtcatggggcccct

SEQ ID NO: 6587 - DNA, 20 bp, synthetic construct
  misc_feature 1..20: note = Description of Artificial Sequence: Synthetic oligonucleotide
  source 1..20: mol_type = other DNA
gtccagtcatggggcccctg

SEQ ID NO: 6588 - DNA, 20 bp, synthetic construct
  misc_feature 1..20: note = Description of Artificial Sequence: Synthetic oligonucleotide
  source 1..20: mol_type = other DNA
tccagtcatggggcccctgg

SEQ ID NO: 6589 - DNA, 20 bp, synthetic construct
  misc_feature 1..20: note = Description of Artificial Sequence: Synthetic oligonucleotide
  source 1..20: mol_type = other DNA
ccagtcatggggcccctggc

SEQ ID NO: 6590 - DNA, 20 bp, synthetic construct
  misc_feature 1..20: note = Description of Artificial Sequence: Synthetic oligonucleotide
  source 1..20: mol_type = other DNA
cagtcatggggcccctggcc

SEQ ID NO: 6591 - DNA, 20 bp, synthetic construct
  misc_feature 1..20: note = Description of Artificial Sequence: Synthetic oligonucleotide
  source 1..20: mol_type = other DNA
agtcatggggcccctggcct

SEQ ID NO: 6592 - DNA, 20 bp, synthetic construct
  misc_feature 1..20: note = Description of Artificial Sequence: Synthetic oligonucleotide
  source 1..20: mol_type = other DNA
gtcatggggcccctggcctt

SEQ ID NO: 6593 - DNA, 20 bp, synthetic construct
  misc_feature 1..20: note = Description of Artificial Sequence: Synthetic oligonucleotide
  source 1..20: mol_type = other DNA
tcatggggcccctggccttg

SEQ ID NO: 6594 - DNA, 20 bp, synthetic construct
  misc_feature 1..20: note = Description of Artificial Sequence: Synthetic oligonucleotide
  source 1..20: mol_type = other DNA
catggggcccctggccttgt

SEQ ID NO: 6595 - DNA, 20 bp, synthetic construct
  misc_feature 1..20: note = Description of Artificial Sequence: Synthetic oligonucleotide
  source 1..20: mol_type = other DNA
atggggcccctggccttgtg

SEQ ID NO: 6596 - DNA, 20 bp, synthetic construct
  misc_feature 1..20: note = Description of Artificial Sequence: Synthetic oligonucleotide
  source 1..20: mol_type = other DNA
tggggcccctggccttgtgc

SEQ ID NO: 6597 - DNA, 20 bp, synthetic construct
  misc_feature 1..20: note = Description of Artificial Sequence: Synthetic oligonucleotide
  source 1..20: mol_type = other DNA
ggggcccctggccttgtgct

SEQ ID NO: 6598 - DNA, 20 bp, synthetic construct
  misc_feature 1..20: note = Description of Artificial Sequence: Synthetic oligonucleotide
  source 1..20: mol_type = other DNA
gggcccctggccttgtgctt

SEQ ID NO: 6599 - DNA, 20 bp, synthetic construct
  misc_feature 1..20: note = Description of Artificial Sequence: Synthetic oligonucleotide
  source 1..20: mol_type = other DNA
ggcccctggccttgtgctta

SEQ ID NO: 6600 - DNA, 20 bp, synthetic construct
  misc_feature 1..20: note = Description of Artificial Sequence: Synthetic oligonucleotide
  source 1..20: mol_type = other DNA
gcccctggccttgtgcttac

SEQ ID NO: 6601 - DNA, 20 bp, synthetic construct
  misc_feature 1..20: note = Description of Artificial Sequence: Synthetic oligonucleotide
  source 1..20: mol_type = other DNA
cccctggccttgtgcttacc

SEQ ID NO: 6602 - DNA, 20 bp, synthetic construct
  misc_feature 1..20: note = Description of Artificial Sequence: Synthetic oligonucleotide
  source 1..20: mol_type = other DNA
ccctggccttgtgcttacct

SEQ ID NO: 6603 - DNA, 20 bp, synthetic construct
  misc_feature 1..20: note = Description of Artificial Sequence: Synthetic oligonucleotide
  source 1..20: mol_type = other DNA
cctggccttgtgcttacctc

SEQ ID NO: 6604 - DNA, 20 bp, synthetic construct
  misc_feature 1..20: note = Description of Artificial Sequence: Synthetic oligonucleotide
  source 1..20: mol_type = other DNA
ctggccttgtgcttacctcc

SEQ ID NO: 6605 - DNA, 20 bp, synthetic construct
  misc_feature 1..20: note = Description of Artificial Sequence: Synthetic oligonucleotide
  source 1..20: mol_type = other DNA
tggccttgtgcttacctcca

SEQ ID NO: 6606 - DNA, 20 bp, synthetic construct
  misc_feature 1..20: note = Description of Artificial Sequence: Synthetic oligonucleotide
  source 1..20: mol_type = other DNA
ggccttgtgcttacctccat

SEQ ID NO: 6607 - DNA, 20 bp, synthetic construct
  misc_feature 1..20: note = Description of Artificial Sequence: Synthetic oligonucleotide
  source 1..20: mol_type = other DNA
gccttgtgcttacctccatc

SEQ ID NO: 6608 - DNA, 20 bp, synthetic construct
  misc_feature 1..20: note = Description of Artificial Sequence: Synthetic oligonucleotide
  source 1..20: mol_type = other DNA
ccttgtgcttacctccatct

SEQ ID NO: 6609 - DNA, 20 bp, synthetic construct
  misc_feature 1..20: note = Description of Artificial Sequence: Synthetic oligonucleotide
  source 1..20: mol_type = other DNA
cttgtgcttacctccatctc

SEQ ID NO: 6610 - DNA, 20 bp, synthetic construct
  misc_feature 1..20: note = Description of Artificial Sequence: Synthetic oligonucleotide
  source 1..20: mol_type = other DNA
ttgtgcttacctccatctct

SEQ ID NO: 6611 - DNA, 20 bp, synthetic construct
  misc_feature 1..20: note = Description of Artificial Sequence: Synthetic oligonucleotide
  source 1..20: mol_type = other DNA
tgtgcttacctccatctcta

SEQ ID NO: 6612 - DNA, 20 bp, synthetic construct
  misc_feature 1..20: note = Description of Artificial Sequence: Synthetic oligonucleotide
  source 1..20: mol_type = other DNA
gtgcttacctccatctctac

SEQ ID NO: 6613 - DNA, 20 bp, synthetic construct
  misc_feature 1..20: note = Description of Artificial Sequence: Synthetic oligonucleotide
  source 1..20: mol_type = other DNA
tgcttacctccatctctaca

SEQ ID NO: 6614 - DNA, 20 bp, synthetic construct
  misc_feature 1..20: note = Description of Artificial Sequence: Synthetic oligonucleotide
  source 1..20: mol_type = other DNA
gcttacctccatctctacac

SEQ ID NO: 6615 - DNA, 20 bp, synthetic construct
  misc_feature 1..20: note = Description of Artificial Sequence: Synthetic oligonucleotide
  source 1..20: mol_type = other DNA
cttacctccatctctacacg

SEQ ID NO: 6616 - DNA, 20 bp, synthetic construct
  misc_feature 1..20: note = Description of Artificial Sequence: Synthetic oligonucleotide
  source 1..20: mol_type = other DNA
ttacctccatctctacacgc

SEQ ID NO: 6617 - DNA, 20 bp, synthetic construct
  misc_feature 1..20: note = Description of Artificial Sequence: Synthetic oligonucleotide
  source 1..20: mol_type = other DNA
tacctccatctctacacgca

SEQ ID NO: 6618 - DNA, 20 bp, synthetic construct
  misc_feature 1..20: note = Description of Artificial Sequence: Synthetic oligonucleotide
  source 1..20: mol_type = other DNA
acctccatctctacacgcag

SEQ ID NO: 6619 - DNA, 20 bp, synthetic construct
  misc_feature 1..20: note = Description of Artificial Sequence: Synthetic oligonucleotide
  source 1..20: mol_type = other DNA
cctccatctctacacgcagc

SEQ ID NO: 6620 - DNA, 20 bp, synthetic construct
  misc_feature 1..20: note = Description of Artificial Sequence: Synthetic oligonucleotide
  source 1..20: mol_type = other DNA
ctccatctctacacgcagcc

SEQ ID NO: 6621 - DNA, 20 bp, synthetic construct
  misc_feature 1..20: note = Description of Artificial Sequence: Synthetic oligonucleotide
  source 1..20: mol_type = other DNA
tccatctctacacgcagccg

SEQ ID NO: 6622 - DNA, 20 bp, synthetic construct
  misc_feature 1..20: note = Description of Artificial Sequence: Synthetic oligonucleotide
  source 1..20: mol_type = other DNA
ccatctctacacgcagccgg

SEQ ID NO: 6623 - DNA, 20 bp, synthetic construct
  misc_feature 1..20: note = Description of Artificial Sequence: Synthetic oligonucleotide
  source 1..20: mol_type = other DNA
catctctacacgcagccggg

SEQ ID NO: 6624 - DNA, 20 bp, synthetic construct
  misc_feature 1..20: note = Description of Artificial Sequence: Synthetic oligonucleotide
  source 1..20: mol_type = other DNA
atctctacacgcagccgggt

SEQ ID NO: 6625 - DNA, 20 bp, synthetic construct
  misc_feature 1..20: note = Description of Artificial Sequence: Synthetic oligonucleotide
  source 1..20: mol_type = other DNA
tctctacacgcagccgggtt

SEQ ID NO: 6626 - DNA, 20 bp, synthetic construct
  misc_feature 1..20: note = Description of Artificial Sequence: Synthetic oligonucleotide
  source 1..20: mol_type = other DNA
ctctacacgcagccgggttg

SEQ ID NO: 6627 - DNA, 20 bp, synthetic construct
  misc_feature 1..20: note = Description of Artificial Sequence: Synthetic oligonucleotide
  source 1..20: mol_type = other DNA
tctacacgcagccgggttgg

SEQ ID NO: 6628 - DNA, 20 bp, synthetic construct
  misc_feature 1..20: note = Description of Artificial Sequence: Synthetic oligonucleotide
  source 1..20: mol_type = other DNA
ctacacgcagccgggttggc

SEQ ID NO: 6629 - DNA, 20 bp, synthetic construct
  misc_feature 1..20: note = Description of Artificial Sequence: Synthetic oligonucleotide
  source 1..20: mol_type = other DNA
tacacgcagccgggttggct

SEQ ID NO: 6630 - DNA, 20 bp, synthetic construct
  misc_feature 1..20: note = Description of Artificial Sequence: Synthetic oligonucleotide
  source 1..20: mol_type = other DNA
acacgcagccgggttggctg

SEQ ID NO: 6631 - DNA, 20 bp, synthetic construct
  misc_feature 1..20: note = Description of Artificial Sequence: Synthetic oligonucleotide
  source 1..20: mol_type = other DNA
cacgcagccgggttggctgt

SEQ ID NO: 6632 - DNA, 20 bp, synthetic construct
  misc_feature 1..20: note = Description of Artificial Sequence: Synthetic oligonucleotide
  source 1..20: mol_type = other DNA
acgcagccgggttggctgtc

SEQ ID NO: 6633 - DNA, 20 bp, synthetic construct
  misc_feature 1..20: note = Description of Artificial Sequence: Synthetic oligonucleotide
  source 1..20: mol_type = other DNA
cgcagccgggttggctgtct

SEQ ID NO: 6634 - DNA, 20 bp, synthetic construct
  misc_feature 1..20: note = Description of Artificial Sequence: Synthetic oligonucleotide
  source 1..20: mol_type = other DNA
gcagccgggttggctgtctg

SEQ ID NO: 6635 - DNA, 20 bp, synthetic construct
  misc_feature 1..20: note = Description of Artificial Sequence: Synthetic oligonucleotide
  source 1..20: mol_type = other DNA
cagccgggttggctgtctgg

SEQ ID NO: 6636 - DNA, 20 bp, synthetic construct
  misc_feature 1..20: note = Description of Artificial Sequence: Synthetic oligonucleotide
  source 1..20: mol_type = other DNA
agccgggttggctgtctgga

SEQ ID NO: 6637 - DNA, 20 bp, synthetic construct
  misc_feature 1..20: note = Description of Artificial Sequence: Synthetic oligonucleotide
  source 1..20: mol_type = other DNA
gccgggttggctgtctggag

SEQ ID NO: 6638 - DNA, 20 bp, synthetic construct
  misc_feature 1..20: note = Description of Artificial Sequence: Synthetic oligonucleotide
  source 1..20: mol_type = other DNA
ccgggttggctgtctggaga

SEQ ID NO: 6639 - DNA, 20 bp, synthetic construct
  misc_feature 1..20: note = Description of Artificial Sequence: Synthetic oligonucleotide
  source 1..20: mol_type = other DNA
cgggttggctgtctggagag

SEQ ID NO: 6640 - DNA, 20 bp, synthetic construct
  misc_feature 1..20: note = Description of Artificial Sequence: Synthetic oligonucleotide
  source 1..20: mol_type = other DNA
gggttggctgtctggagagc

SEQ ID NO: 6641 - DNA, 20 bp, synthetic construct
  misc_feature 1..20: note = Description of Artificial Sequence: Synthetic oligonucleotide
  source 1..20: mol_type = other DNA
ggttggctgtctggagagcc

SEQ ID NO: 6642 - DNA, 20 bp, synthetic construct
  misc_feature 1..20: note = Description of Artificial Sequence: Synthetic oligonucleotide
  source 1..20: mol_type = other DNA
gttggctgtctggagagccg

SEQ ID NO: 6643 - DNA, 20 bp, synthetic construct
  misc_feature 1..20: note = Description of Artificial Sequence: Synthetic oligonucleotide
  source 1..20: mol_type = other DNA
ttggctgtctggagagccgg

SEQ ID NO: 6644 - DNA, 20 bp, synthetic construct
  misc_feature 1..20: note = Description of Artificial Sequence: Synthetic oligonucleotide
  source 1..20: mol_type = other DNA
tggctgtctggagagccggt

SEQ ID NO: 6645 - DNA, 20 bp, synthetic construct
  misc_feature 1..20: note = Description of Artificial Sequence: Synthetic oligonucleotide
  source 1..20: mol_type = other DNA
ggctgtctggagagccggtg

SEQ ID NO: 6646 - DNA, 20 bp, synthetic construct
  misc_feature 1..20: note = Description of Artificial Sequence: Synthetic oligonucleotide
  source 1..20: mol_type = other DNA
gctgtctggagagccggtgg

SEQ ID NO: 6647 - DNA, 20 bp, synthetic construct
  misc_feature 1..20: note = Description of Artificial Sequence: Synthetic oligonucleotide
  source 1..20: mol_type = other DNA
ctgtctggagagccggtgga

SEQ ID NO: 6648 - DNA, 20 bp, synthetic construct
  misc_feature 1..20: note = Description of Artificial Sequence: Synthetic oligonucleotide
  source 1..20: mol_type = other DNA
tgtctggagagccggtggat

SEQ ID NO: 6649 - DNA, 20 bp, synthetic construct
  misc_feature 1..20: note = Description of Artificial Sequence: Synthetic oligonucleotide
  source 1..20: mol_type = other DNA
gtctggagagccggtggatg

SEQ ID NO: 6650 - DNA, 20 bp, synthetic construct
  misc_feature 1..20: note = Description of Artificial Sequence: Synthetic oligonucleotide
  source 1..20: mol_type = other DNA
tctggagagccggtggatgt

SEQ ID NO: 6651 - DNA, 20 bp, synthetic construct
  misc_feature 1..20: note = Description of Artificial Sequence: Synthetic oligonucleotide
  source 1..20: mol_type = other DNA
ctggagagccggtggatgtg

SEQ ID NO: 6652 - DNA, 20 bp, synthetic construct
  misc_feature 1..20: note = Description of Artificial Sequence: Synthetic oligonucleotide
  source 1..20: mol_type = other DNA
tggagagccggtggatgtgt

SEQ ID NO: 6653 - DNA, 20 bp, synthetic construct
  misc_feature 1..20: note = Description of Artificial Sequence: Synthetic oligonucleotide
  source 1..20: mol_type = other DNA
ggagagccggtggatgtgtt

SEQ ID NO: 6654 - DNA, 20 bp, synthetic construct
  misc_feature 1..20: note = Description of Artificial Sequence: Synthetic oligonucleotide
  source 1..20: mol_type = other DNA
gagagccggtggatgtgttc

SEQ ID NO: 6655 - DNA, 20 bp, synthetic construct
  misc_feature 1..20: note = Description of Artificial Sequence: Synthetic oligonucleotide
  source 1..20: mol_type = other DNA
agagccggtggatgtgttcg

SEQ ID NO: 6656 - DNA, 20 bp, synthetic construct
  misc_feature 1..20: note = Description of Artificial Sequence: Synthetic oligonucleotide
  source 1..20: mol_type = other DNA
gagccggtggatgtgttcgt

SEQ ID NO: 6657 - DNA, 20 bp, synthetic construct
  misc_feature 1..20: note = Description of Artificial Sequence: Synthetic oligonucleotide
  source 1..20: mol_type = other DNA
agccggtggatgtgttcgtt

SEQ ID NO: 6658 - DNA, 20 bp, synthetic construct
  misc_feature 1..20: note = Description of Artificial Sequence: Synthetic oligonucleotide
  source 1..20: mol_type = other DNA
gccggtggatgtgttcgttc

SEQ ID NO: 6659 - DNA, 20 bp, synthetic construct
  misc_feature 1..20: note = Description of Artificial Sequence: Synthetic oligonucleotide
  source 1..20: mol_type = other DNA
ccggtggatgtgttcgttcc

SEQ ID NO: 6660 - DNA, 20 bp, synthetic construct
  misc_feature 1..20: note = Description of Artificial Sequence: Synthetic oligonucleotide
  source 1..20: mol_type = other DNA
cggtggatgtgttcgttccc

SEQ ID NO: 6661 - DNA, 20 bp, synthetic construct
  misc_feature 1..20: note = Description of Artificial Sequence: Synthetic oligonucleotide
  source 1..20: mol_type = other DNA
ggtggatgtgttcgttcccc

SEQ ID NO: 6662 - DNA, 20 bp, synthetic construct
  misc_feature 1..20: note = Description of Artificial Sequence: Synthetic oligonucleotide
  source 1..20: mol_type = other DNA
gtggatgtgttcgttcccca

SEQ ID NO: 6663 - DNA, 20 bp, synthetic construct
  misc_feature 1..20: note = Description of Artificial Sequence: Synthetic oligonucleotide
  source 1..20: mol_type = other DNA
tggatgtgttcgttccccag

SEQ ID NO: 6664 - DNA, 20 bp, synthetic construct
  misc_feature 1..20: note = Description of Artificial Sequence: Synthetic oligonucleotide
  source 1..20: mol_type = other DNA
ggatgtgttcgttccccagc

SEQ ID NO: 6665 - DNA, 20 bp, synthetic construct
  misc_feature 1..20: note = Description of Artificial Sequence: Synthetic oligonucleotide
  source 1..20: mol_type = other DNA
gatgtgttcgttccccagcc

SEQ ID NO: 6666 - DNA, 20 bp, synthetic construct
  misc_feature 1..20: note = Description of Artificial Sequence: Synthetic oligonucleotide
  source 1..20: mol_type = other DNA
atgtgttcgttccccagcca

SEQ ID NO: 6667 - DNA, 20 bp, synthetic construct
  misc_feature 1..20: note = Description of Artificial Sequence: Synthetic oligonucleotide
  source 1..20: mol_type = other DNA
tgtgttcgttccccagccag

SEQ ID NO: 6668 - DNA, 20 bp, synthetic construct
  misc_feature 1..20: note = Description of Artificial Sequence: Synthetic oligonucleotide
  source 1..20: mol_type = other DNA
gtgttcgttccccagccaga

SEQ ID NO: 6669 - DNA, 20 bp, synthetic construct
  misc_feature 1..20: note = Description of Artificial Sequence: Synthetic oligonucleotide
  source 1..20: mol_type = other DNA
tgttcgttccccagccagaa

SEQ ID NO: 6670 - DNA, 20 bp, synthetic construct
  misc_feature 1..20: note = Description of Artificial Sequence: Synthetic oligonucleotide
  source 1..20: mol_type = other DNA
gttcgttccccagccagaag

SEQ ID NO: 6671 - DNA, 20 bp, synthetic construct
  misc_feature 1..20: note = Description of Artificial Sequence: Synthetic oligonucleotide
  source 1..20: mol_type = other DNA
ttcgttccccagccagaagt

SEQ ID NO: 6672 - DNA, 20 bp, synthetic construct
  misc_feature 1..20: note = Description of Artificial Sequence: Synthetic oligonucleotide
  source 1..20: mol_type = other DNA
tcgttccccagccagaagtc

SEQ ID NO: 6673 - DNA, 20 bp, synthetic construct
  misc_feature 1..20: note = Description of Artificial Sequence: Synthetic oligonucleotide
  source 1..20: mol_type = other DNA
cgttccccagccagaagtcc

SEQ ID NO: 6674 - DNA, 20 bp, synthetic construct
  misc_feature 1..20: note = Description of Artificial Sequence: Synthetic oligonucleotide
  source 1..20: mol_type = other DNA
gttccccagccagaagtccc

SEQ ID NO: 6675 - DNA, 20 bp, synthetic construct
  misc_feature 1..20: note = Description of Artificial Sequence: Synthetic oligonucleotide
  source 1..20: mol_type = other DNA
ttccccagccagaagtcccc

SEQ ID NO: 6676 - DNA, 20 bp, synthetic construct
  misc_feature 1..20: note = Description of Artificial Sequence: Synthetic oligonucleotide
  source 1..20: mol_type = other DNA
tccccagccagaagtcccca

SEQ ID NO: 6677 - DNA, 20 bp, synthetic construct
  misc_feature 1..20: note = Description of Artificial Sequence: Synthetic oligonucleotide
  source 1..20: mol_type = other DNA
ccccagccagaagtccccac

SEQ ID NO: 6678 - DNA, 20 bp, synthetic construct
  misc_feature 1..20: note = Description of Artificial Sequence: Synthetic oligonucleotide
  source 1..20: mol_type = other DNA
cccagccagaagtccccacg

SEQ ID NO: 6679 - DNA, 20 bp, synthetic construct
  misc_feature 1..20: note = Description of Artificial Sequence: Synthetic oligonucleotide
  source 1..20: mol_type = other DNA
ccagccagaagtccccacgg

SEQ ID NO: 6680 - DNA, 20 bp, synthetic construct
  misc_feature 1..20: note = Description of Artificial Sequence: Synthetic oligonucleotide
  source 1..20: mol_type = other DNA
cagccagaagtccccacgga

SEQ ID NO: 6681 - DNA, 20 bp, synthetic construct
  misc_feature 1..20: note = Description of Artificial Sequence: Synthetic oligonucleotide
  source 1..20: mol_type = other DNA
agccagaagtccccacggat

SEQ ID NO: 6682 - DNA, 20 bp, synthetic construct
  misc_feature 1..20: note = Description of Artificial Sequence: Synthetic oligonucleotide
  source 1..20: mol_type = other DNA
gccagaagtccccacggatg

SEQ ID NO: 6683 - DNA, 20 bp, synthetic construct
  misc_feature 1..20: note = Description of Artificial Sequence: Synthetic oligonucleotide
  source 1..20: mol_type = other DNA
ccagaagtccccacggatgc

SEQ ID NO: 6684 - DNA, 20 bp, synthetic construct
  misc_feature 1..20: note = Description of Artificial Sequence: Synthetic oligonucleotide
  source 1..20: mol_type = other DNA
cagaagtccccacggatgct

SEQ ID NO: 6685 - DNA, 20 bp, synthetic construct
  misc_feature 1..20: note = Description of Artificial Sequence: Synthetic oligonucleotide
  source 1..20: mol_type = other DNA
agaagtccccacggatgctg

SEQ ID NO: 6686 - DNA, 20 bp, synthetic construct
  misc_feature 1..20: note = Description of Artificial Sequence: Synthetic oligonucleotide
  source 1..20: mol_type = other DNA
gaagtccccacggatgctgc

SEQ ID NO: 6687 - DNA, 20 bp, synthetic construct
  misc_feature 1..20: note = Description of Artificial Sequence: Synthetic oligonucleotide
  source 1..20: mol_type = other DNA
aagtccccacggatgctgcc

SEQ ID NO: 6688 - DNA, 20 bp, synthetic construct
  misc_feature 1..20: note = Description of Artificial Sequence: Synthetic oligonucleotide
  source 1..20: mol_type = other DNA
agtccccacggatgctgcca

SEQ ID NO: 6689 - DNA, 20 bp, synthetic construct
  misc_feature 1..20: note = Description of Artificial Sequence: Synthetic oligonucleotide
  source 1..20: mol_type = other DNA
gtccccacggatgctgccaa

SEQ ID NO: 6690 - DNA, 20 bp, synthetic construct
  misc_feature 1..20: note = Description of Artificial Sequence: Synthetic oligonucleotide
  source 1..20: mol_type = other DNA
tccccacggatgctgccaaa

SEQ ID NO: 6691 - DNA, 20 bp, synthetic construct
  misc_feature 1..20: note = Description of Artificial Sequence: Synthetic oligonucleotide
  source 1..20: mol_type = other DNA
ccccacggatgctgccaaag

SEQ ID NO: 6692 - DNA, 20 bp, synthetic construct
  misc_feature 1..20: note = Description of Artificial Sequence: Synthetic oligonucleotide
  source 1..20: mol_type = other DNA
cccacggatgctgccaaagc

SEQ ID NO: 6693 - DNA, 20 bp, synthetic construct
  misc_feature 1..20: note = Description of Artificial Sequence: Synthetic oligonucleotide
  source 1..20: mol_type = other DNA
ccacggatgctgccaaagcc

SEQ ID NO: 6694 - DNA, 20 bp, synthetic construct
  misc_feature 1..20: note = Description of Artificial Sequence: Synthetic oligonucleotide
  source 1..20: mol_type = other DNA
cacggatgctgccaaagccc

SEQ ID NO: 6695 - DNA, 20 bp, synthetic construct
  misc_feature 1..20: note = Description of Artificial Sequence: Synthetic oligonucleotide
  source 1..20: mol_type = other DNA
acggatgctgccaaagccct

SEQ ID NO: 6696 - DNA, 20 bp, synthetic construct
  misc_feature 1..20: note = Description of Artificial Sequence: Synthetic oligonucleotide
  source 1..20: mol_type = other DNA
cggatgctgccaaagccctg

SEQ ID NO: 6697 - DNA, 20 bp, synthetic construct
  misc_feature 1..20: note = Description of Artificial Sequence: Synthetic oligonucleotide
  source 1..20: mol_type = other DNA
ggatgctgccaaagccctgc

SEQ ID NO: 6698 - DNA, 20 bp, synthetic construct
  misc_feature 1..20: note = Description of Artificial Sequence: Synthetic oligonucleotide
  source 1..20: mol_type = other DNA
gatgctgccaaagccctgct

SEQ ID NO: 6699 - DNA, 20 bp, synthetic construct
  misc_feature 1..20: note = Description of Artificial Sequence: Synthetic oligonucleotide
  source 1..20: mol_type = other DNA
atgctgccaaagccctgctt

SEQ ID NO: 6700 - DNA, 20 bp, synthetic construct
  misc_feature 1..20: note = Description of Artificial Sequence: Synthetic oligonucleotide
  source 1..20: mol_type = other DNA
tgctgccaaagccctgcttg

SEQ ID NO: 6701 - DNA, 20 bp, synthetic construct
  misc_feature 1..20: note = Description of Artificial Sequence: Synthetic oligonucleotide
  source 1..20: mol_type = other DNA
gctgccaaagccctgcttgt

SEQ ID NO: 6702 - DNA, 20 bp, synthetic construct
  misc_feature 1..20: note = Description of Artificial Sequence: Synthetic oligonucleotide
  source 1..20: mol_type = other DNA
ctgccaaagccctgcttgta

SEQ ID NO: 6703 - DNA, 20 bp, synthetic construct
  misc_feature 1..20: note = Description of Artificial Sequence: Synthetic oligonucleotide
  source 1..20: mol_type = other DNA
tgccaaagccctgcttgtac

SEQ ID NO: 6704 - DNA, 20 bp, synthetic construct
  misc_feature 1..20: note = Description of Artificial Sequence: Synthetic oligonucleotide
  source 1..20: mol_type = other DNA
gccaaagccctgcttgtact

SEQ ID NO: 6705 - DNA, 20 bp, synthetic construct
  misc_feature 1..20: note = Description of Artificial Sequence: Synthetic oligonucleotide
  source 1..20: mol_type = other DNA
ccaaagccctgcttgtactg

SEQ ID NO: 6706 - DNA, 20 bp, synthetic construct
  misc_feature 1..20: note = Description of Artificial Sequence: Synthetic oligonucleotide
  source 1..20: mol_type = other DNA
caaagccctgcttgtactgc

SEQ ID NO: 6707 - DNA, 20 bp, synthetic construct
  misc_feature 1..20: note = Description of Artificial Sequence: Synthetic oligonucleotide
  source 1..20: mol_type = other DNA
aaagccctgcttgtactgct

SEQ ID NO: 6708 - DNA, 20 bp, synthetic construct
  misc_feature 1..20: note = Description of Artificial Sequence: Synthetic oligonucleotide
  source 1..20: mol_type = other DNA
aagccctgcttgtactgctt

SEQ ID NO: 6709 - DNA, 20 bp, synthetic construct
  misc_feature 1..20: note = Description of Artificial Sequence: Synthetic oligonucleotide
  source 1..20: mol_type = other DNA
agccctgcttgtactgcttc

SEQ ID NO: 6710 - DNA, 20 bp, synthetic construct
  misc_feature 1..20: note = Description of Artificial Sequence: Synthetic oligonucleotide
  source 1..20: mol_type = other DNA
gccctgcttgtactgcttcc

SEQ ID NO: 6711 - DNA, 20 bp, synthetic construct
  misc_feature 1..20: note = Description of Artificial Sequence: Synthetic oligonucleotide
  source 1..20: mol_type = other DNA
ccctgcttgtactgcttcca

SEQ ID NO: 6712 - DNA, 20 bp, synthetic construct
  misc_feature 1..20: note = Description of Artificial Sequence: Synthetic oligonucleotide
  source 1..20: mol_type = other DNA
cctgcttgtactgcttccag

SEQ ID NO: 6713 - DNA, 20 bp, synthetic construct
  misc_feature 1..20: note = Description of Artificial Sequence: Synthetic oligonucleotide
  source 1..20: mol_type = other DNA
ctgcttgtactgcttccagt

SEQ ID NO: 6714 - DNA, 20 bp, synthetic construct
  misc_feature 1..20: note = Description of Artificial Sequence: Synthetic oligonucleotide
  source 1..20: mol_type = other DNA
tgcttgtactgcttccagtc

SEQ ID NO: 6715 - DNA, 20 bp, synthetic construct
  misc_feature 1..20: note = Description of Artificial Sequence: Synthetic oligonucleotide
  source 1..20: mol_type = other DNA
gcttgtactgcttccagtcc

SEQ ID NO: 6716 - DNA, 20 bp, synthetic construct
  misc_feature 1..20: note = Description of Artificial Sequence: Synthetic oligonucleotide
  source 1..20: mol_type = other DNA
cttgtactgcttccagtccc

SEQ ID NO: 6717 - DNA, 20 bp, synthetic construct
  misc_feature 1..20: note = Description of Artificial Sequence: Synthetic oligonucleotide
  source 1..20: mol_type = other DNA
ttgtactgcttccagtcccg

SEQ ID NO: 6718 - DNA, 20 bp, synthetic construct
  misc_feature 1..20: note = Description of Artificial Sequence: Synthetic oligonucleotide
  source 1..20: mol_type = other DNA
tgtactgcttccagtcccgg

SEQ ID NO: 6719 - DNA, 20 bp, synthetic construct
  misc_feature 1..20: note = Description of Artificial Sequence: Synthetic oligonucleotide
  source 1..20: mol_type = other DNA
gtactgcttccagtcccggt

SEQ ID NO: 6720 - DNA, 20 bp, synthetic construct
  misc_feature 1..20: note = Description of Artificial Sequence: Synthetic oligonucleotide
  source 1..20: mol_type = other DNA
tactgcttccagtcccggta

SEQ ID NO: 6721 - DNA, 20 bp, synthetic construct
  misc_feature 1..20: note = Description of Artificial Sequence: Synthetic oligonucleotide
  source 1..20: mol_type = other DNA
actgcttccagtcccggtag

SEQ ID NO: 6722 - DNA, 20 bp, synthetic construct
  misc_feature 1..20: note = Description of Artificial Sequence: Synthetic oligonucleotide
  source 1..20: mol_type = other DNA
ctgcttccagtcccggtaga

SEQ ID NO: 6723 - DNA, 20 bp, synthetic construct
  misc_feature 1..20: note = Description of Artificial Sequence: Synthetic oligonucleotide
  source 1..20: mol_type = other DNA
tgcttccagtcccggtagaa

SEQ ID NO: 6724 - DNA, 20 bp, synthetic construct
  misc_feature 1..20: note = Description of Artificial Sequence: Synthetic oligonucleotide
  source 1..20: mol_type = other DNA
gcttccagtcccggtagaag

SEQ ID NO: 6725 - DNA, 20 bp, synthetic construct
  misc_feature 1..20: note = Description of Artificial Sequence: Synthetic oligonucleotide
  source 1..20: mol_type = other DNA
cttccagtcccggtagaagg

SEQ ID NO: 6726 - DNA, 20 bp, synthetic construct
  misc_feature 1..20: note = Description of Artificial Sequence: Synthetic oligonucleotide
  source 1..20: mol_type = other DNA
ttccagtcccggtagaagga

SEQ ID NO: 6727 - DNA, 20 bp, synthetic construct
  misc_feature 1..20: note = Description of Artificial Sequence: Synthetic oligonucleotide
  source 1..20: mol_type = other DNA
tccagtcccggtagaaggag

SEQ ID NO: 6728 - DNA, 20 bp, synthetic construct
  misc_feature 1..20: note = Description of Artificial Sequence: Synthetic oligonucleotide
  source 1..20: mol_type = other DNA
ccagtcccggtagaaggaga

SEQ ID NO: 6729 - DNA, 20 bp, synthetic construct
  misc_feature 1..20: note = Description of Artificial Sequence: Synthetic oligonucleotide
  source 1..20: mol_type = other DNA
cagtcccggtagaaggagac

SEQ ID NO: 6730 - DNA, 20 bp, synthetic construct
  misc_feature 1..20: note = Description of Artificial Sequence: Synthetic oligonucleotide
  source 1..20: mol_type = other DNA
agtcccggtagaaggagaca

SEQ ID NO: 6731 - DNA, 20 bp, synthetic construct
  misc_feature 1..20: note = Description of Artificial Sequence: Synthetic oligonucleotide
  source 1..20: mol_type = other DNA
gtcccggtagaaggagacaa

SEQ ID NO: 6732 - DNA, 20 bp, synthetic construct
  misc_feature 1..20: note = Description of Artificial Sequence: Synthetic oligonucleotide
  source 1..20: mol_type = other DNA
tcccggtagaaggagacaag

SEQ ID NO: 6733 - DNA, 20 bp, synthetic construct
  misc_feature 1..20: note = Description of Artificial Sequence: Synthetic oligonucleotide
  source 1..20: mol_type = other DNA
cccggtagaaggagacaagg

SEQ ID NO: 6734 - DNA, 20 bp, synthetic construct
  misc_feature 1..20: note = Description of Artificial Sequence: Synthetic oligonucleotide
  source 1..20: mol_type = other DNA
ccggtagaaggagacaaggc

SEQ ID NO: 6735 - DNA, 20 bp, synthetic construct
  misc_feature 1..20: note = Description of Artificial Sequence: Synthetic oligonucleotide
  source 1..20: mol_type = other DNA
cggtagaaggagacaaggcc

SEQ ID NO: 6736 - DNA, 20 bp, synthetic construct
  misc_feature 1..20: note = Description of Artificial Sequence: Synthetic oligonucleotide
  source 1..20: mol_type = other DNA
ggtagaaggagacaaggcca

SEQ ID NO: 6737 - DNA, 20 bp, synthetic construct
  misc_feature 1..20: note = Description of Artificial Sequence: Synthetic oligonucleotide
  source 1..20: mol_type = other DNA
gtagaaggagacaaggccac

SEQ ID NO: 6738 - DNA, 20 bp, synthetic construct
  misc_feature 1..20: note = Description of Artificial Sequence: Synthetic oligonucleotide
  source 1..20: mol_type = other DNA
tagaaggagacaaggccact

SEQ ID NO: 6739 - DNA, 20 bp, synthetic construct
  misc_feature 1..20: note = Description of Artificial Sequence: Synthetic oligonucleotide
  source 1..20: mol_type = other DNA
agaaggagacaaggccactt

SEQ ID NO: 6740 - DNA, 20 bp, synthetic construct
  misc_feature 1..20: note = Description of Artificial Sequence: Synthetic oligonucleotide
  source 1..20: mol_type = other DNA
gaaggagacaaggccacttt

SEQ ID NO: 6741 - DNA, 20 bp, synthetic construct
  misc_feature 1..20: note = Description of Artificial Sequence: Synthetic oligonucleotide
  source 1..20: mol_type = other DNA
aaggagacaaggccactttt

SEQ ID NO: 6742 - DNA, 20 bp, synthetic construct
  misc_feature 1..20: note = Description of Artificial Sequence: Synthetic oligonucleotide
  source 1..20: mol_type = other DNA
aggagacaaggccacttttt

SEQ ID NO: 6743 - DNA, 20 bp, synthetic construct
  misc_feature 1..20: note = Description of Artificial Sequence: Synthetic oligonucleotide
  source 1..20: mol_type = other DNA
ggagacaaggccactttttc

SEQ ID NO: 6744 - DNA, 20 bp, synthetic construct
  misc_feature 1..20: note = Description of Artificial Sequence: Synthetic oligonucleotide
  source 1..20: mol_type = other DNA
gagacaaggccactttttcg

SEQ ID NO: 6745 - DNA, 20 bp, synthetic construct
  misc_feature 1..20: note = Description of Artificial Sequence: Synthetic oligonucleotide
  source 1..20: mol_type = other DNA
agacaaggccactttttcgt

SEQ ID NO: 6746 - DNA, 20 bp, synthetic construct
  misc_feature 1..20: note = Description of Artificial Sequence: Synthetic oligonucleotide
  source 1..20: mol_type = other DNA
gacaaggccactttttcgtc

SEQ ID NO: 6747 - DNA, 20 bp, synthetic construct
  misc_feature 1..20: note = Description of Artificial Sequence: Synthetic oligonucleotide
  source 1..20: mol_type = other DNA
acaaggccactttttcgtct

SEQ ID NO: 6748 - DNA, 20 bp, synthetic construct
  misc_feature 1..20: note = Description of Artificial Sequence: Synthetic oligonucleotide
  source 1..20: mol_type = other DNA
caaggccactttttcgtctc

SEQ ID NO: 6749 - DNA, 20 bp, synthetic construct
  misc_feature 1..20: note = Description of Artificial Sequence: Synthetic oligonucleotide
  source 1..20: mol_type = other DNA
aaggccactttttcgtctct

SEQ ID NO: 6750 - DNA, 20 bp, synthetic construct
  misc_feature 1..20: note = Description of Artificial Sequence: Synthetic oligonucleotide
  source 1..20: mol_type = other DNA
aggccactttttcgtctctg

SEQ ID NO: 6751 - DNA, 20 bp, synthetic construct
  misc_feature 1..20: note = Description of Artificial Sequence: Synthetic oligonucleotide
  source 1..20: mol_type = other DNA
ggccactttttcgtctctgg

SEQ ID NO: 6752 - DNA, 20 bp, synthetic construct
  misc_feature 1..20: note = Description of Artificial Sequence: Synthetic oligonucleotide
  source 1..20: mol_type = other DNA
gccactttttcgtctctgga

SEQ ID NO: 6753 - DNA, 20 bp, synthetic construct
  misc_feature 1..20: note = Description of Artificial Sequence: Synthetic oligonucleotide
  source 1..20: mol_type = other DNA
ccactttttcgtctctggat

SEQ ID NO: 6754 - DNA, 20 bp, synthetic construct
  misc_feature 1..20: note = Description of Artificial Sequence: Synthetic oligonucleotide
  source 1..20: mol_type = other DNA
cactttttcgtctctggatg

SEQ ID NO: 6755 - DNA, 20 bp, synthetic construct
  misc_feature 1..20: note = Description of Artificial Sequence: Synthetic oligonucleotide
  source 1..20: mol_type = other DNA
actttttcgtctctggatga

SEQ ID NO: 6756 - DNA, 20 bp, synthetic construct
  misc_feature 1..20: note = Description of Artificial Sequence: Synthetic oligonucleotide
  source 1..20: mol_type = other DNA
ctttttcgtctctggatgat

SEQ ID NO: 6757 - DNA, 20 bp, synthetic construct
  misc_feature 1..20: note = Description of Artificial Sequence: Synthetic oligonucleotide
  source 1..20: mol_type = other DNA
tttttcgtctctggatgatg

SEQ ID NO: 6758 - DNA, 20 bp, synthetic construct
  misc_feature 1..20: note = Description of Artificial Sequence: Synthetic oligonucleotide
  source 1..20: mol_type = other DNA
ttttcgtctctggatgatgg

SEQ ID NO: 6759 - DNA, 20 bp, synthetic construct
  misc_feature 1..20: note = Description of Artificial Sequence: Synthetic oligonucleotide
  source 1..20: mol_type = other DNA
tttcgtctctggatgatggt

SEQ ID NO: 6760 - DNA, 20 bp, synthetic construct
  misc_feature 1..20: note = Description of Artificial Sequence: Synthetic oligonucleotide
  source 1..20: mol_type = other DNA
ttcgtctctggatgatggtc

SEQ ID NO: 6761 - DNA, 20 bp, synthetic construct
  misc_feature 1..20: note = Description of Artificial Sequence: Synthetic oligonucleotide
  source 1..20: mol_type = other DNA
tcgtctctggatgatggtcc

SEQ ID NO: 6762 - DNA, 20 bp, synthetic construct
  misc_feature 1..20: note = Description of Artificial Sequence: Synthetic oligonucleotide
  source 1..20: mol_type = other DNA
cgtctctggatgatggtcca

SEQ ID NO: 6763 - DNA, 20 bp, synthetic construct
  misc_feature 1..20: note = Description of Artificial Sequence: Synthetic oligonucleotide
  source 1..20: mol_type = other DNA
gtctctggatgatggtccag

SEQ ID NO: 6764 - DNA, 20 bp, synthetic construct
  misc_feature 1..20: note = Description of Artificial Sequence: Synthetic oligonucleotide
  source 1..20: mol_type = other DNA
tctctggatgatggtccagc

SEQ ID NO: 6765 - DNA, 20 bp, synthetic construct
  misc_feature 1..20: note = Description of Artificial Sequence: Synthetic oligonucleotide
  source 1..20: mol_type = other DNA
ctctggatgatggtccagcc

SEQ ID NO: 6766 - DNA, 20 bp, synthetic construct
  misc_feature 1..20: note = Description of Artificial Sequence: Synthetic oligonucleotide
  source 1..20: mol_type = other DNA
tctggatgatggtccagcct

SEQ ID NO: 6767 - DNA, 20 bp, synthetic construct
  misc_feature 1..20: note = Description of Artificial Sequence: Synthetic oligonucleotide
  source 1..20: mol_type = other DNA
ctggatgatggtccagcctc

SEQ ID NO: 6768 - DNA, 20 bp, synthetic construct
  misc_feature 1..20: note = Description of Artificial Sequence: Synthetic oligonucleotide
  source 1..20: mol_type = other DNA
tggatgatggtccagcctcc

SEQ ID NO: 6769 - DNA, 20 bp, synthetic construct
  misc_feature 1..20: note = Description of Artificial Sequence: Synthetic oligonucleotide
  source 1..20: mol_type = other DNA
ggatgatggtccagcctccg

SEQ ID NO: 6770 - DNA, 20 bp, synthetic construct
  misc_feature 1..20: note = Description of Artificial Sequence: Synthetic oligonucleotide
  source 1..20: mol_type = other DNA
gatgatggtccagcctccgc

SEQ ID NO: 6771 - DNA, 20 bp, synthetic construct
  misc_feature 1..20: note = Description of Artificial Sequence: Synthetic oligonucleotide
  source 1..20: mol_type = other DNA
atgatggtccagcctccgcc

SEQ ID NO: 6772 - DNA, 20 bp, synthetic construct
  misc_feature 1..20: note = Description of Artificial Sequence: Synthetic oligonucleotide
  source 1..20: mol_type = other DNA
tgatggtccagcctccgcct

SEQ ID NO: 6773 - DNA, 20 bp, synthetic construct
  misc_feature 1..20: note = Description of Artificial Sequence: Synthetic oligonucleotide
  source 1..20: mol_type = other DNA
gatggtccagcctccgcctg

SEQ ID NO: 6774 - DNA, 20 bp, synthetic construct
  misc_feature 1..20: note = Description of Artificial Sequence: Synthetic oligonucleotide
  source 1..20: mol_type = other DNA
atggtccagcctccgcctga

SEQ ID NO: 6775 - DNA, 20 bp, synthetic construct
  misc_feature 1..20: note = Description of Artificial Sequence: Synthetic oligonucleotide
  source 1..20: mol_type = other DNA
tggtccagcctccgcctgaa

SEQ ID NO: 6776 - DNA, 20 bp, synthetic construct
  misc_feature 1..20: note = Description of Artificial Sequence: Synthetic oligonucleotide
  source 1..20: mol_type = other DNA
ggtccagcctccgcctgaag

SEQ ID NO: 6777 - DNA, 20 bp, synthetic construct
  misc_feature 1..20: note = Description of Artificial Sequence: Synthetic oligonucleotide
  source 1..20: mol_type = other DNA
gtccagcctccgcctgaagt

SEQ ID NO: 6778 - DNA, 20 bp, synthetic construct
  misc_feature 1..20: note = Description of Artificial Sequence: Synthetic oligonucleotide
  source 1..20: mol_type = other DNA
tccagcctccgcctgaagtc

SEQ ID NO: 6779 - DNA, 20 bp, synthetic construct
  misc_feature 1..20: note = Description of Artificial Sequence: Synthetic oligonucleotide
  source 1..20: mol_type = other DNA
ccagcctccgcctgaagtct

SEQ ID NO: 6780 - DNA, 20 bp, synthetic construct
  misc_feature 1..20: note = Description of Artificial Sequence: Synthetic oligonucleotide
  source 1..20: mol_type = other DNA
cagcctccgcctgaagtctc

SEQ ID NO: 6781 - DNA, 20 bp, synthetic construct
  misc_feature 1..20: note = Description of Artificial Sequence: Synthetic oligonucleotide
  source 1..20: mol_type = other DNA
agcctccgcctgaagtctcc

SEQ ID NO: 6782 - DNA, 20 bp, synthetic construct
  misc_feature 1..20: note = Description of Artificial Sequence: Synthetic oligonucleotide
  source 1..20: mol_type = other DNA
gcctccgcctgaagtctcca

SEQ ID NO: 6783 - DNA, 20 bp, synthetic construct
  misc_feature 1..20: note = Description of Artificial Sequence: Synthetic oligonucleotide
  source 1..20: mol_type = other DNA
cctccgcctgaagtctccat

SEQ ID NO: 6784 - DNA, 20 bp, synthetic construct
  misc_feature 1..20: note = Description of Artificial Sequence: Synthetic oligonucleotide
  source 1..20: mol_type = other DNA
ctccgcctgaagtctccatg

SEQ ID NO: 6785 - DNA, 20 bp, synthetic construct
  misc_feature 1..20: note = Description of Artificial Sequence: Synthetic oligonucleotide
  source 1..20: mol_type = other DNA
tccgcctgaagtctccatgt

SEQ ID NO: 6786 - DNA, 20 bp, synthetic construct
  misc_feature 1..20: note = Description of Artificial Sequence: Synthetic oligonucleotide
  source 1..20: mol_type = other DNA
ccgcctgaagtctccatgtc

SEQ ID NO: 6787 - DNA, 20 bp, synthetic construct
  misc_feature 1..20: note = Description of Artificial Sequence: Synthetic oligonucleotide
  source 1..20: mol_type = other DNA
cgcctgaagtctccatgtca

SEQ ID NO: 6788 - DNA, 20 bp, synthetic construct
  misc_feature 1..20: note = Description of Artificial Sequence: Synthetic oligonucleotide
  source 1..20: mol_type = other DNA
gcctgaagtctccatgtcac

SEQ ID NO: 6789 - DNA, 20 bp, synthetic construct
  misc_feature 1..20: note = Description of Artificial Sequence: Synthetic oligonucleotide
  source 1..20: mol_type = other DNA
cctgaagtctccatgtcaca

SEQ ID NO: 6790 - DNA, 20 bp, synthetic construct
  misc_feature 1..20: note = Description of Artificial Sequence: Synthetic oligonucleotide
  source 1..20: mol_type = other DNA
ctgaagtctccatgtcacag

SEQ ID NO: 6791 - DNA, 20 bp, synthetic construct
  misc_feature 1..20: note = Description of Artificial Sequence: Synthetic oligonucleotide
  source 1..20: mol_type = other DNA
tgaagtctccatgtcacaga

SEQ ID NO: 6792 - DNA, 20 bp, synthetic construct
  misc_feature 1..20: note = Description of Artificial Sequence: Synthetic oligonucleotide
  source 1..20: mol_type = other DNA
gaagtctccatgtcacagaa

SEQ ID NO: 6793 - DNA, 20 bp, synthetic construct
  misc_feature 1..20: note = Description of Artificial Sequence: Synthetic oligonucleotide
  source 1..20: mol_type = other DNA
aagtctccatgtcacagaac

SEQ ID NO: 6794 - DNA, 20 bp, synthetic construct
  misc_feature 1..20: note = Description of Artificial Sequence: Synthetic oligonucleotide
  source 1..20: mol_type = other DNA
agtctccatgtcacagaaca

SEQ ID NO: 6795 - DNA, 20 bp, synthetic construct
  misc_feature 1..20: note = Description of Artificial Sequence: Synthetic oligonucleotide
  source 1..20: mol_type = other DNA
gtctccatgtcacagaacac

SEQ ID NO: 6796 - DNA, 20 bp, synthetic construct
  misc_feature 1..20: note = Description of Artificial Sequence: Synthetic oligonucleotide
  source 1..20: mol_type = other DNA
tctccatgtcacagaacacc

SEQ ID NO: 6797 - DNA, 20 bp, synthetic construct
  misc_feature 1..20: note = Description of Artificial Sequence: Synthetic oligonucleotide
  source 1..20: mol_type = other DNA
ctccatgtcacagaacacct

SEQ ID NO: 6798 - DNA, 20 bp, synthetic construct
  misc_feature 1..20: note = Description of Artificial Sequence: Synthetic oligonucleotide
  source 1..20: mol_type = other DNA
tccatgtcacagaacacctg

SEQ ID NO: 6799 - DNA, 20 bp, synthetic construct
  misc_feature 1..20: note = Description of Artificial Sequence: Synthetic oligonucleotide
  source 1..20: mol_type = other DNA
ccatgtcacagaacacctga

SEQ ID NO: 6800 - DNA, 20 bp, synthetic construct
  misc_feature 1..20: note = Description of Artificial Sequence: Synthetic oligonucleotide
  source 1..20: mol_type = other DNA
catgtcacagaacacctgaa

SEQ ID NO: 6801 - DNA, 20 bp, synthetic construct
  misc_feature 1..20: note = Description of Artificial Sequence: Synthetic oligonucleotide
  source 1..20: mol_type = other DNA
atgtcacagaacacctgaag

SEQ ID NO: 6802 - DNA, 20 bp, synthetic construct
  misc_feature 1..20: note = Description of Artificial Sequence: Synthetic oligonucleotide
  source 1..20: mol_type = other DNA
tgtcacagaacacctgaagc

SEQ ID NO: 6803 - DNA, 20 bp, synthetic construct
  misc_feature 1..20: note = Description of Artificial Sequence: Synthetic oligonucleotide
  source 1..20: mol_type = other DNA
gtcacagaacacctgaagca

SEQ ID NO: 6804 - DNA, 20 bp, synthetic construct
  misc_feature 1..20: note = Description of Artificial Sequence: Synthetic oligonucleotide
  source 1..20: mol_type = other DNA
tcacagaacacctgaagcag

SEQ ID NO: 6805 - DNA, 20 bp, synthetic construct
  misc_feature 1..20: note = Description of Artificial Sequence: Synthetic oligonucleotide
  source 1..20: mol_type = other DNA
cacagaacacctgaagcaga

SEQ ID NO: 6806 - DNA, 20 bp, synthetic construct
  misc_feature 1..20: note = Description of Artificial Sequence: Synthetic oligonucleotide
  source 1..20: mol_type = other DNA
acagaacacctgaagcagag

SEQ ID NO: 6807 - DNA, 20 bp, synthetic construct
  misc_feature 1..20: note = Description of Artificial Sequence: Synthetic oligonucleotide
  source 1..20: mol_type = other DNA
cagaacacctgaagcagagg

SEQ ID NO: 6808 - DNA, 20 bp, synthetic construct
  misc_feature 1..20: note = Description of Artificial Sequence: Synthetic oligonucleotide
  source 1..20: mol_type = other DNA
agaacacctgaagcagaggg

SEQ ID NO: 6809 - DNA, 20 bp, synthetic construct
  misc_feature 1..20: note = Description of Artificial Sequence: Synthetic oligonucleotide
  source 1..20: mol_type = other DNA
gaacacctgaagcagagggg

SEQ ID NO: 6810 - DNA, 20 bp, synthetic construct
  misc_feature 1..20: note = Description of Artificial Sequence: Synthetic oligonucleotide
  source 1..20: mol_type = other DNA
aacacctgaagcagagggga

SEQ ID NO: 6811 - DNA, 20 bp, synthetic construct
  misc_feature 1..20: note = Description of Artificial Sequence: Synthetic oligonucleotide
  source 1..20: mol_type = other DNA
acacctgaagcagaggggat

SEQ ID NO: 6812 - DNA, 20 bp, synthetic construct
  misc_feature 1..20: note = Description of Artificial Sequence: Synthetic oligonucleotide
  source 1..20: mol_type = other DNA
cacctgaagcagaggggata

SEQ ID NO: 6813 - DNA, 20 bp, synthetic construct
  misc_feature 1..20: note = Description of Artificial Sequence: Synthetic oligonucleotide
  source 1..20: mol_type = other DNA
acctgaagcagaggggatac

SEQ ID NO: 6814 - DNA, 20 bp, synthetic construct
  misc_feature 1..20: note = Description of Artificial Sequence: Synthetic oligonucleotide
  source 1..20: mol_type = other DNA
cctgaagcagaggggatact

SEQ ID NO: 6815 - DNA, 20 bp, synthetic construct
  misc_feature 1..20: note = Description of Artificial Sequence: Synthetic oligonucleotide
  source 1..20: mol_type = other DNA
ctgaagcagaggggatactc

SEQ ID NO: 6816 - DNA, 20 bp, synthetic construct
  misc_feature 1..20: note = Description of Artificial Sequence: Synthetic oligonucleotide
  source 1..20: mol_type = other DNA
tgaagcagaggggatactct

SEQ ID NO: 6817 - DNA, 20 bp, synthetic construct
  misc_feature 1..20: note = Description of Artificial Sequence: Synthetic oligonucleotide
  source 1..20: mol_type = other DNA
gaagcagaggggatactctg

SEQ ID NO: 6818 - DNA, 20 bp, synthetic construct
  misc_feature 1..20: note = Description of Artificial Sequence: Synthetic oligonucleotide
  source 1..20: mol_type = other DNA
aagcagaggggatactctgg

SEQ ID NO: 6819 - DNA, 20 bp, synthetic construct
  misc_feature 1..20: note = Description of Artificial Sequence: Synthetic oligonucleotide
  source 1..20: mol_type = other DNA
agcagaggggatactctggt

SEQ ID NO: 6820 - DNA, 20 bp, synthetic construct
  misc_feature 1..20: note = Description of Artificial Sequence: Synthetic oligonucleotide
  source 1..20: mol_type = other DNA
gcagaggggatactctggtg

SEQ ID NO: 6821 - DNA, 20 bp, synthetic construct
  misc_feature 1..20: note = Description of Artificial Sequence: Synthetic oligonucleotide
  source 1..20: mol_type = other DNA
cagaggggatactctggtga

SEQ ID NO: 6822 - DNA, 20 bp, synthetic construct
  misc_feature 1..20: note = Description of Artificial Sequence: Synthetic oligonucleotide
  source 1..20: mol_type = other DNA
agaggggatactctggtgag

SEQ ID NO: 6823 - DNA, 20 bp, synthetic construct
  misc_feature 1..20: note = Description of Artificial Sequence: Synthetic oligonucleotide
  source 1..20: mol_type = other DNA
gaggggatactctggtgagg

SEQ ID NO: 6824 - DNA, 20 bp, synthetic construct
  misc_feature 1..20: note = Description of Artificial Sequence: Synthetic oligonucleotide
  source 1..20: mol_type = other DNA
aggggatactctggtgaggg

SEQ ID NO: 6825 - DNA, 20 bp, synthetic construct
  misc_feature 1..20: note = Description of Artificial Sequence: Synthetic oligonucleotide
  source 1..20: mol_type = other DNA
ggggatactctggtgaggga

SEQ ID NO: 6826 - DNA, 20 bp, synthetic construct
  misc_feature 1..20: note = Description of Artificial Sequence: Synthetic oligonucleotide
  source 1..20: mol_type = other DNA
gggatactctggtgagggac

SEQ ID NO: 6827 - DNA, 20 bp, synthetic construct
  misc_feature 1..20: note = Description of Artificial Sequence: Synthetic oligonucleotide
  source 1..20: mol_type = other DNA
ggatactctggtgagggact

SEQ ID NO: 6828 - DNA, 20 bp, synthetic construct
  misc_feature 1..20: note = Description of Artificial Sequence: Synthetic oligonucleotide
  source 1..20: mol_type = other DNA
gatactctggtgagggactt

SEQ ID NO: 6829 - DNA, 20 bp, synthetic construct
  misc_feature 1..20: note = Description of Artificial Sequence: Synthetic oligonucleotide
  source 1..20: mol_type = other DNA
atactctggtgagggacttg

SEQ ID NO: 6830 - DNA, 20 bp, synthetic construct
  misc_feature 1..20: note = Description of Artificial Sequence: Synthetic oligonucleotide
  source 1..20: mol_type = other DNA
tactctggtgagggacttgc

SEQ ID NO: 6831 - DNA, 20 bp, synthetic construct
  misc_feature 1..20: note = Description of Artificial Sequence: Synthetic oligonucleotide
  source 1..20: mol_type = other DNA
actctggtgagggacttgca

SEQ ID NO: 6832 - DNA, 20 bp, synthetic construct
  misc_feature 1..20: note = Description of Artificial Sequence: Synthetic oligonucleotide
  source 1..20: mol_type = other DNA
ctctggtgagggacttgcag

SEQ ID NO: 6833 - DNA, 20 bp, synthetic construct
  misc_feature 1..20: note = Description of Artificial Sequence: Synthetic oligonucleotide
  source 1..20: mol_type = other DNA
tctggtgagggacttgcagg

SEQ ID NO: 6834 - DNA, 20 bp, synthetic construct
  misc_feature 1..20: note = Description of Artificial Sequence: Synthetic oligonucleotide
  source 1..20: mol_type = other DNA
ctggtgagggacttgcaggg

SEQ ID NO: 6835 - DNA, 20 bp, synthetic construct
  misc_feature 1..20: note = Description of Artificial Sequence: Synthetic oligonucleotide
  source 1..20: mol_type = other DNA
tggtgagggacttgcagggg

SEQ ID NO: 6836 - DNA, 20 bp, synthetic construct
  misc_feature 1..20: note = Description of Artificial Sequence: Synthetic oligonucleotide
  source 1..20: mol_type = other DNA
ggtgagggacttgcaggggc

SEQ ID NO: 6837 - DNA, 20 bp, synthetic construct
  misc_feature 1..20: note = Description of Artificial Sequence: Synthetic oligonucleotide
  source 1..20: mol_type = other DNA
gtgagggacttgcaggggca

SEQ ID NO: 6838 - DNA, 20 bp, synthetic construct
  misc_feature 1..20: note = Description of Artificial Sequence: Synthetic oligonucleotide
  source 1..20: mol_type = other DNA
tgagggacttgcaggggcag

SEQ ID NO: 6839 - DNA, 20 bp, synthetic construct
  misc_feature 1..20: note = Description of Artificial Sequence: Synthetic oligonucleotide
  source 1..20: mol_type = other DNA
gagggacttgcaggggcaga

SEQ ID NO: 6840 - DNA, 20 bp, synthetic construct
  misc_feature 1..20: note = Description of Artificial Sequence: Synthetic oligonucleotide
  source 1..20: mol_type = other DNA
agggacttgcaggggcagaa

SEQ ID NO: 6841 - DNA, 20 bp, synthetic construct
  misc_feature 1..20: note = Description of Artificial Sequence: Synthetic oligonucleotide
  source 1..20: mol_type = other DNA
gggacttgcaggggcagaag

SEQ ID NO: 6842 - DNA, 20 bp, synthetic construct
  misc_feature 1..20: note = Description of Artificial Sequence: Synthetic oligonucleotide
  source 1..20: mol_type = other DNA
ggacttgcaggggcagaagg

SEQ ID NO: 6843 - DNA, 20 bp, synthetic construct
  misc_feature 1..20: note = Description of Artificial Sequence: Synthetic oligonucleotide
  source 1..20: mol_type = other DNA
gacttgcaggggcagaaggc

SEQ ID NO: 6844 - DNA, 20 bp, synthetic construct
  misc_feature 1..20: note = Description of Artificial Sequence: Synthetic oligonucleotide
  source 1..20: mol_type = other DNA
acttgcaggggcagaaggca

SEQ ID NO: 6845 - DNA, 20 bp, synthetic construct
  misc_feature 1..20: note = Description of Artificial Sequence: Synthetic oligonucleotide
  source 1..20: mol_type = other DNA
cttgcaggggcagaaggcag

SEQ ID NO: 6846 - DNA, 20 bp, synthetic construct
  misc_feature 1..20: note = Description of Artificial Sequence: Synthetic oligonucleotide
  source 1..20: mol_type = other DNA
ttgcaggggcagaaggcagg

SEQ ID NO: 6847 - DNA, 20 bp, synthetic construct
  misc_feature 1..20: note = Description of Artificial Sequence: Synthetic oligonucleotide
  source 1..20: mol_type = other DNA
tgcaggggcagaaggcagga

SEQ ID NO: 6848 - DNA, 20 bp, synthetic construct
  misc_feature 1..20: note = Description of Artificial Sequence: Synthetic oligonucleotide
  source 1..20: mol_type = other DNA
gcaggggcagaaggcaggag

SEQ ID NO: 6849 - DNA, 20 bp, synthetic construct
  misc_feature 1..20: note = Description of Artificial Sequence: Synthetic oligonucleotide
  source 1..20: mol_type = other DNA
caggggcagaaggcaggagc

SEQ ID NO: 6850 - DNA, 20 bp, synthetic construct
  misc_feature 1..20: note = Description of Artificial Sequence: Synthetic oligonucleotide
  source 1..20: mol_type = other DNA
aggggcagaaggcaggagca

SEQ ID NO: 6851 - DNA, 20 bp, synthetic construct
  misc_feature 1..20: note = Description of Artificial Sequence: Synthetic oligonucleotide
  source 1..20: mol_type = other DNA
ggggcagaaggcaggagcaa

SEQ ID NO: 6852 - DNA, 20 bp, synthetic construct
  misc_feature 1..20: note = Description of Artificial Sequence: Synthetic oligonucleotide
  source 1..20: mol_type = other DNA
gggcagaaggcaggagcaag

SEQ ID NO: 6853 - DNA, 20 bp, synthetic construct
  misc_feature 1..20: note = Description of Artificial Sequence: Synthetic oligonucleotide
  source 1..20: mol_type = other DNA
ggcagaaggcaggagcaaga

SEQ ID NO: 6854 - DNA, 20 bp, synthetic construct
  misc_feature 1..20: note = Description of Artificial Sequence: Synthetic oligonucleotide
  source 1..20: mol_type = other DNA
gcagaaggcaggagcaagag

SEQ ID NO: 6855 - DNA, 20 bp, synthetic construct
  misc_feature 1..20: note = Description of Artificial Sequence: Synthetic oligonucleotide
  source 1..20: mol_type = other DNA
cagaaggcaggagcaagagg

SEQ ID NO: 6856 - DNA, 20 bp, synthetic construct
  misc_feature 1..20: note = Description of Artificial Sequence: Synthetic oligonucleotide
  source 1..20: mol_type = other DNA
agaaggcaggagcaagaggg

SEQ ID NO: 6857 - DNA, 20 bp, synthetic construct
  misc_feature 1..20: note = Description of Artificial Sequence: Synthetic oligonucleotide
  source 1..20: mol_type = other DNA
gaaggcaggagcaagagggc

SEQ ID NO: 6858 - DNA, 20 bp, synthetic construct
  misc_feature 1..20: note = Description of Artificial Sequence: Synthetic oligonucleotide
  source 1..20: mol_type = other DNA
aaggcaggagcaagagggca

SEQ ID NO: 6859 - DNA, 20 bp, synthetic construct
  misc_feature 1..20: note = Description of Artificial Sequence: Synthetic oligonucleotide
  source 1..20: mol_type = other DNA
aggcaggagcaagagggcag

SEQ ID NO: 6860 - DNA, 20 bp, synthetic construct
  misc_feature 1..20: note = Description of Artificial Sequence: Synthetic oligonucleotide
  source 1..20: mol_type = other DNA
ggcaggagcaagagggcagg

SEQ ID NO: 6861 - DNA, 20 bp, synthetic construct
  misc_feature 1..20: note = Description of Artificial Sequence: Synthetic oligonucleotide
  source 1..20: mol_type = other DNA
gcaggagcaagagggcaggc

SEQ ID NO: 6862 - DNA, 20 bp, synthetic construct
  misc_feature 1..20: note = Description of Artificial Sequence: Synthetic oligonucleotide
  source 1..20: mol_type = other DNA
caggagcaagagggcaggct

SEQ ID NO: 6863 - DNA, 20 bp, synthetic construct
  misc_feature 1..20: note = Description of Artificial Sequence: Synthetic oligonucleotide
  source 1..20: mol_type = other DNA
aggagcaagagggcaggctt

SEQ ID NO: 6864 - DNA, 20 bp, synthetic construct
  misc_feature 1..20: note = Description of Artificial Sequence: Synthetic oligonucleotide
  source 1..20: mol_type = other DNA
ggagcaagagggcaggcttc

SEQ ID NO: 6865 - DNA, 20 bp, synthetic construct
  misc_feature 1..20: note = Description of Artificial Sequence: Synthetic oligonucleotide
  source 1..20: mol_type = other DNA
gagcaagagggcaggcttcc

SEQ ID NO: 6866 - DNA, 20 bp, synthetic construct
  misc_feature 1..20: note = Description of Artificial Sequence: Synthetic oligonucleotide
  source 1..20: mol_type = other DNA
agcaagagggcaggcttccc

SEQ ID NO: 6867 - DNA, 20 bp, synthetic construct
  misc_feature 1..20: note = Description of Artificial Sequence: Synthetic oligonucleotide
  source 1..20: mol_type = other DNA
gcaagagggcaggcttccca

SEQ ID NO: 6868 - DNA, 20 bp, synthetic construct
  misc_feature 1..20: note = Description of Artificial Sequence: Synthetic oligonucleotide
  source 1..20: mol_type = other DNA
caagagggcaggcttcccaa

SEQ ID NO: 6869 - DNA, 20 bp, synthetic construct
  misc_feature 1..20: note = Description of Artificial Sequence: Synthetic oligonucleotide
  source 1..20: mol_type = other DNA
aagagggcaggcttcccaac

SEQ ID NO: 6870 - DNA, 20 bp, synthetic construct
  misc_feature 1..20: note = Description of Artificial Sequence: Synthetic oligonucleotide
  source 1..20: mol_type = other DNA
agagggcaggcttcccaacc

SEQ ID NO: 6871 - DNA, 20 bp, synthetic construct
  misc_feature 1..20: note = Description of Artificial Sequence: Synthetic oligonucleotide
  source 1..20: mol_type = other DNA
gagggcaggcttcccaacct

SEQ ID NO: 6872 - DNA, 20 bp, synthetic construct
  misc_feature 1..20: note = Description of Artificial Sequence: Synthetic oligonucleotide
  source 1..20: mol_type = other DNA
agggcaggcttcccaacctg

SEQ ID NO: 6873 - DNA, 20 bp, synthetic construct
  misc_feature 1..20: note = Description of Artificial Sequence: Synthetic oligonucleotide
  source 1..20: mol_type = other DNA
gggcaggcttcccaacctgt

SEQ ID NO: 6874 - DNA, 20 bp, synthetic construct
  misc_feature 1..20: note = Description of Artificial Sequence: Synthetic oligonucleotide
  source 1..20: mol_type = other DNA
ggcaggcttcccaacctgtt

SEQ ID NO: 6875 - DNA, 20 bp, synthetic construct
  misc_feature 1..20: note = Description of Artificial Sequence: Synthetic oligonucleotide
  source 1..20: mol_type = other DNA
gcaggcttcccaacctgttc

SEQ ID NO: 6876 - DNA, 20 bp, synthetic construct
  misc_feature 1..20: note = Description of Artificial Sequence: Synthetic oligonucleotide
  source 1..20: mol_type = other DNA
caggcttcccaacctgttcc

SEQ ID NO: 6877 - DNA, 20 bp, synthetic construct
  misc_feature 1..20: note = Description of Artificial Sequence: Synthetic oligonucleotide
  source 1..20: mol_type = other DNA
aggcttcccaacctgttcct

SEQ ID NO: 6878 - DNA, 20 bp, synthetic construct
  misc_feature 1..20: note = Description of Artificial Sequence: Synthetic oligonucleotide
  source 1..20: mol_type = other DNA
ggcttcccaacctgttcctg

SEQ ID NO: 6879 - DNA, 20 bp, synthetic construct
  misc_feature 1..20: note = Description of Artificial Sequence: Synthetic oligonucleotide
  source 1..20: mol_type = other DNA
gcttcccaacctgttcctgt

SEQ ID NO: 6880 - DNA, 20 bp, synthetic construct
  misc_feature 1..20: note = Description of Artificial Sequence: Synthetic oligonucleotide
  source 1..20: mol_type = other DNA
cttcccaacctgttcctgtc

SEQ ID NO: 6881 - DNA, 20 bp, synthetic construct
  misc_feature 1..20: note = Description of Artificial Sequence: Synthetic oligonucleotide
  source 1..20: mol_type = other DNA
ttcccaacctgttcctgtcc

SEQ ID NO: 6882 - DNA, 20 bp, synthetic construct
  misc_feature 1..20: note = Description of Artificial Sequence: Synthetic oligonucleotide
  source 1..20: mol_type = other DNA
tcccaacctgttcctgtccc

SEQ ID NO: 6883 - DNA, 20 bp, synthetic construct
  misc_feature 1..20: note = Description of Artificial Sequence: Synthetic oligonucleotide
  source 1..20: mol_type = other DNA
cccaacctgttcctgtccct

SEQ ID NO: 6884 - DNA, 20 bp, synthetic construct
  misc_feature 1..20: note = Description of Artificial Sequence: Synthetic oligonucleotide
  source 1..20: mol_type = other DNA
ccaacctgttcctgtccctg

SEQ ID NO: 6885 - DNA, 20 bp, synthetic construct
  misc_feature 1..20: note = Description of Artificial Sequence: Synthetic oligonucleotide
  source 1..20: mol_type = other DNA
caacctgttcctgtccctgc

SEQ ID NO: 6886 - DNA, 20 bp, synthetic construct
  misc_feature 1..20: note = Description of Artificial Sequence: Synthetic oligonucleotide
  source 1..20: mol_type = other DNA
aacctgttcctgtccctgca

SEQ ID NO: 6887 - DNA, 20 bp, synthetic construct
  misc_feature 1..20: note = Description of Artificial Sequence: Synthetic oligonucleotide
  source 1..20: mol_type = other DNA
acctgttcctgtccctgcag

SEQ ID NO: 6888 - DNA, 20 bp, synthetic construct
  misc_feature 1..20: note = Description of Artificial Sequence: Synthetic oligonucleotide
  source 1..20: mol_type = other DNA
cctgttcctgtccctgcaga

SEQ ID NO: 6889 - DNA, 20 bp, synthetic construct
  misc_feature 1..20: note = Description of Artificial Sequence: Synthetic oligonucleotide
  source 1..20: mol_type = other DNA
ctgttcctgtccctgcagag

SEQ ID NO: 6890 - DNA, 20 bp, synthetic construct
  misc_feature 1..20: note = Description of Artificial Sequence: Synthetic oligonucleotide
  source 1..20: mol_type = other DNA
tgttcctgtccctgcagagc

SEQ ID NO: 6891 - DNA, 20 bp, synthetic construct
  misc_feature 1..20: note = Description of Artificial Sequence: Synthetic oligonucleotide
  source 1..20: mol_type = other DNA
gttcctgtccctgcagagcc

SEQ ID NO: 6892 - DNA, 20 bp, synthetic construct
  misc_feature 1..20: note = Description of Artificial Sequence: Synthetic oligonucleotide
  source 1..20: mol_type = other DNA
ttcctgtccctgcagagcca

SEQ ID NO: 6893 - DNA, 20 bp, synthetic construct
  misc_feature 1..20: note = Description of Artificial Sequence: Synthetic oligonucleotide
  source 1..20: mol_type = other DNA
tcctgtccctgcagagccag

SEQ ID NO: 6894 - DNA, 20 bp, synthetic construct
  misc_feature 1..20: note = Description of Artificial Sequence: Synthetic oligonucleotide
  source 1..20: mol_type = other DNA
cctgtccctgcagagccagt

SEQ ID NO: 6895 - DNA, 20 bp, synthetic construct
  misc_feature 1..20: note = Description of Artificial Sequence: Synthetic oligonucleotide
  source 1..20: mol_type = other DNA
ctgtccctgcagagccagta

SEQ ID NO: 6896 - DNA, 20 bp, synthetic construct
  misc_feature 1..20: note = Description of Artificial Sequence: Synthetic oligonucleotide
  source 1..20: mol_type = other DNA
tgtccctgcagagccagtag

SEQ ID NO: 6897 - DNA, 20 bp, synthetic construct
  misc_feature 1..20: note = Description of Artificial Sequence: Synthetic oligonucleotide
  source 1..20: mol_type = other DNA
gtccctgcagagccagtaga

SEQ ID NO: 6898 - DNA, 20 bp, synthetic construct
  misc_feature 1..20: note = Description of Artificial Sequence: Synthetic oligonucleotide
  source 1..20: mol_type = other DNA
tccctgcagagccagtagat

SEQ ID NO: 6899 - DNA, 20 bp, synthetic construct
  misc_feature 1..20: note = Description of Artificial Sequence: Synthetic oligonucleotide
  source 1..20: mol_type = other DNA
ccctgcagagccagtagatg

SEQ ID NO: 6900 - DNA, 20 bp, synthetic construct
  misc_feature 1..20: note = Description of Artificial Sequence: Synthetic oligonucleotide
  source 1..20: mol_type = other DNA
cctgcagagccagtagatgt

SEQ ID NO: 6901 - DNA, 20 bp, synthetic construct
  misc_feature 1..20: note = Description of Artificial Sequence: Synthetic oligonucleotide
  source 1..20: mol_type = other DNA
ctgcagagccagtagatgtg

SEQ ID NO: 6902 - DNA, 20 bp, synthetic construct
  misc_feature 1..20: note = Description of Artificial Sequence: Synthetic oligonucleotide
  source 1..20: mol_type = other DNA
tgcagagccagtagatgtgt

SEQ ID NO: 6903 - DNA, 20 bp, synthetic construct
  misc_feature 1..20: note = Description of Artificial Sequence: Synthetic oligonucleotide
  source 1..20: mol_type = other DNA
gcagagccagtagatgtgtg

SEQ ID NO: 6904 - DNA, 20 bp, synthetic construct
  misc_feature 1..20: note = Description of Artificial Sequence: Synthetic oligonucleotide
  source 1..20: mol_type = other DNA
cagagccagtagatgtgtgc

SEQ ID NO: 6905 - DNA, 20 bp, synthetic construct
  misc_feature 1..20: note = Description of Artificial Sequence: Synthetic oligonucleotide
  source 1..20: mol_type = other DNA
agagccagtagatgtgtgca

SEQ ID NO: 6906 - DNA, 20 bp, synthetic construct
  misc_feature 1..20: note = Description of Artificial Sequence: Synthetic oligonucleotide
  source 1..20: mol_type = other DNA
gagccagtagatgtgtgcac

SEQ ID NO: 6907 - DNA, 20 bp, synthetic construct
  misc_feature 1..20: note = Description of Artificial Sequence: Synthetic oligonucleotide
  source 1..20: mol_type = other DNA
agccagtagatgtgtgcact

SEQ ID NO: 6908 - DNA, 20 bp, synthetic construct
  misc_feature 1..20: note = Description of Artificial Sequence: Synthetic oligonucleotide
  source 1..20: mol_type = other DNA
gccagtagatgtgtgcactc

SEQ ID NO: 6909 - DNA, 20 bp, synthetic construct
  misc_feature 1..20: note = Description of Artificial Sequence: Synthetic oligonucleotide
  source 1..20: mol_type = other DNA
ccagtagatgtgtgcactcc

SEQ ID NO: 6910 - DNA, 20 bp, synthetic construct
  misc_feature 1..20: note = Description of Artificial Sequence: Synthetic oligonucleotide
  source 1..20: mol_type = other DNA
cagtagatgtgtgcactccc

SEQ ID NO: 6911 - DNA, 20 bp, synthetic construct
  misc_feature 1..20: note = Description of Artificial Sequence: Synthetic oligonucleotide
  source 1..20: mol_type = other DNA
agtagatgtgtgcactcccg

SEQ ID NO: 6912 - DNA, 20 bp, synthetic construct
  misc_feature 1..20: note = Description of Artificial Sequence: Synthetic oligonucleotide
  source 1..20: mol_type = other DNA
gtagatgtgtgcactcccgc

SEQ ID NO: 6913 - DNA, 20 bp, synthetic construct
  misc_feature 1..20: note = Description of Artificial Sequence: Synthetic oligonucleotide
  source 1..20: mol_type = other DNA
tagatgtgtgcactcccgca

SEQ ID NO: 6914 - DNA, 20 bp, synthetic construct
  misc_feature 1..20: note = Description of Artificial Sequence: Synthetic oligonucleotide
  source 1..20: mol_type = other DNA
agatgtgtgcactcccgcag

SEQ ID NO: 6915 - DNA, 20 bp, synthetic construct
  misc_feature 1..20: note = Description of Artificial Sequence: Synthetic oligonucleotide
  source 1..20: mol_type = other DNA
gatgtgtgcactcccgcagt

SEQ ID NO: 6916 - DNA, 20 bp, synthetic construct
  misc_feature 1..20: note = Description of Artificial Sequence: Synthetic oligonucleotide
  source 1..20: mol_type = other DNA
atgtgtgcactcccgcagtc

SEQ ID NO: 6917 - DNA, 20 bp, synthetic construct
  misc_feature 1..20: note = Description of Artificial Sequence: Synthetic oligonucleotide
  source 1..20: mol_type = other DNA
tgtgtgcactcccgcagtca

SEQ ID NO: 6918 - DNA, 20 bp, synthetic construct
  misc_feature 1..20: note = Description of Artificial Sequence: Synthetic oligonucleotide
  source 1..20: mol_type = other DNA
gtgtgcactcccgcagtcac

SEQ ID NO: 6919 - DNA, 20 bp, synthetic construct
  misc_feature 1..20: note = Description of Artificial Sequence: Synthetic oligonucleotide
  source 1..20: mol_type = other DNA
tgtgcactcccgcagtcaca

SEQ ID NO: 6920 - DNA, 20 bp, synthetic construct
  misc_feature 1..20: note = Description of Artificial Sequence: Synthetic oligonucleotide
  source 1..20: mol_type = other DNA
gtgcactcccgcagtcacac

SEQ ID NO: 6921 - DNA, 20 bp, synthetic construct
  misc_feature 1..20: note = Description of Artificial Sequence: Synthetic oligonucleotide
  source 1..20: mol_type = other DNA
tgcactcccgcagtcacact

SEQ ID NO: 6922 - DNA, 20 bp, synthetic construct
  misc_feature 1..20: note = Description of Artificial Sequence: Synthetic oligonucleotide
  source 1..20: mol_type = other DNA
gcactcccgcagtcacactg

SEQ ID NO: 6923 - DNA, 20 bp, synthetic construct
  misc_feature 1..20: note = Description of Artificial Sequence: Synthetic oligonucleotide
  source 1..20: mol_type = other DNA
cactcccgcagtcacactgg

SEQ ID NO: 6924 - DNA, 20 bp, synthetic construct
  misc_feature 1..20: note = Description of Artificial Sequence: Synthetic oligonucleotide
  source 1..20: mol_type = other DNA
actcccgcagtcacactggc

SEQ ID NO: 6925 - DNA, 20 bp, synthetic construct
  misc_feature 1..20: note = Description of Artificial Sequence: Synthetic oligonucleotide
  source 1..20: mol_type = other DNA
ctcccgcagtcacactggct

SEQ ID NO: 6926 - DNA, 20 bp, synthetic construct
  misc_feature 1..20: note = Description of Artificial Sequence: Synthetic oligonucleotide
  source 1..20: mol_type = other DNA
tcccgcagtcacactggctc

SEQ ID NO: 6927 - DNA, 20 bp, synthetic construct
  misc_feature 1..20: note = Description of Artificial Sequence: Synthetic oligonucleotide
  source 1..20: mol_type = other DNA
cccgcagtcacactggctca

SEQ ID NO: 6928 - DNA, 20 bp, synthetic construct
  misc_feature 1..20: note = Description of Artificial Sequence: Synthetic oligonucleotide
  source 1..20: mol_type = other DNA
ccgcagtcacactggctcac

SEQ ID NO: 6929 - DNA, 20 bp, synthetic construct
  misc_feature 1..20: note = Description of Artificial Sequence: Synthetic oligonucleotide
  source 1..20: mol_type = other DNA
cgcagtcacactggctcact

SEQ ID NO: 6930 - DNA, 20 bp, synthetic construct
  misc_feature 1..20: note = Description of Artificial Sequence: Synthetic oligonucleotide
  source 1..20: mol_type = other DNA
gcagtcacactggctcactc

SEQ ID NO: 6931 - DNA, 20 bp, synthetic construct
  misc_feature 1..20: note = Description of Artificial Sequence: Synthetic oligonucleotide
  source 1..20: mol_type = other DNA
cagtcacactggctcactcg

SEQ ID NO: 6932 - DNA, 20 bp, synthetic construct
  misc_feature 1..20: note = Description of Artificial Sequence: Synthetic oligonucleotide
  source 1..20: mol_type = other DNA
agtcacactggctcactcgg

SEQ ID NO: 6933 - DNA, 20 bp, synthetic construct
  misc_feature 1..20: note = Description of Artificial Sequence: Synthetic oligonucleotide
  source 1..20: mol_type = other DNA
gtcacactggctcactcggg

SEQ ID NO: 6934 - DNA, 20 bp, synthetic construct
  misc_feature 1..20: note = Description of Artificial Sequence: Synthetic oligonucleotide
  source 1..20: mol_type = other DNA
tcacactggctcactcgggc

SEQ ID NO: 6935 - DNA, 20 bp, synthetic construct
  misc_feature 1..20: note = Description of Artificial Sequence: Synthetic oligonucleotide
  source 1..20: mol_type = other DNA
cacactggctcactcgggca

SEQ ID NO: 6936 - DNA, 20 bp, synthetic construct
  misc_feature 1..20: note = Description of Artificial Sequence: Synthetic oligonucleotide
  source 1..20: mol_type = other DNA
acactggctcactcgggcag

SEQ ID NO: 6937 - DNA, 20 bp, synthetic construct
  misc_feature 1..20: note = Description of Artificial Sequence: Synthetic oligonucleotide
  source 1..20: mol_type = other DNA
cactggctcactcgggcagt

SEQ ID NO: 6938 - DNA, 20 bp, synthetic construct
  misc_feature 1..20: note = Description of Artificial Sequence: Synthetic oligonucleotide
  source 1..20: mol_type = other DNA
actggctcactcgggcagtg

SEQ ID NO: 6939 - DNA, 20 bp, synthetic construct
  misc_feature 1..20: note = Description of Artificial Sequence: Synthetic oligonucleotide
  source 1..20: mol_type = other DNA
ctggctcactcgggcagtga

SEQ ID NO: 6940 - DNA, 20 bp, synthetic construct
  misc_feature 1..20: note = Description of Artificial Sequence: Synthetic oligonucleotide
  source 1..20: mol_type = other DNA
tggctcactcgggcagtgat

SEQ ID NO: 6941 - DNA, 20 bp, synthetic construct
  misc_feature 1..20: note = Description of Artificial Sequence: Synthetic oligonucleotide
  source 1..20: mol_type = other DNA
ggctcactcgggcagtgatg

SEQ ID NO: 6942 - DNA, 20 bp, synthetic construct
  misc_feature 1..20: note = Description of Artificial Sequence: Synthetic oligonucleotide
  source 1..20: mol_type = other DNA
gctcactcgggcagtgatgc

SEQ ID NO: 6943 - DNA, 20 bp, synthetic construct
  misc_feature 1..20: note = Description of Artificial Sequence: Synthetic oligonucleotide
  source 1..20: mol_type = other DNA
ctcactcgggcagtgatgct

SEQ ID NO: 6944 - DNA, 20 bp, synthetic construct
  misc_feature 1..20: note = Description of Artificial Sequence: Synthetic oligonucleotide
  source 1..20: mol_type = other DNA
tcactcgggcagtgatgctg

SEQ ID NO: 6945 - DNA, 20 bp, synthetic construct
  misc_feature 1..20: note = Description of Artificial Sequence: Synthetic oligonucleotide
  source 1..20: mol_type = other DNA
cactcgggcagtgatgctgc

SEQ ID NO: 6946 - DNA, 20 bp, synthetic construct
  misc_feature 1..20: note = Description of Artificial Sequence: Synthetic oligonucleotide
  source 1..20: mol_type = other DNA
actcgggcagtgatgctgcc

SEQ ID NO: 6947 - DNA, 20 bp, synthetic construct
  misc_feature 1..20: note = Description of Artificial Sequence: Synthetic oligonucleotide
  source 1..20: mol_type = other DNA
ctcgggcagtgatgctgccc

SEQ ID NO: 6948 - DNA, 20 bp, synthetic construct
  misc_feature 1..20: note = Description of Artificial Sequence: Synthetic oligonucleotide
  source 1..20: mol_type = other DNA
tcgggcagtgatgctgcccc

SEQ ID NO: 6949 - DNA, 20 bp, synthetic construct
  misc_feature 1..20: note = Description of Artificial Sequence: Synthetic oligonucleotide
  source 1..20: mol_type = other DNA
cgggcagtgatgctgcccca

SEQ ID NO: 6950 - DNA, 20 bp, synthetic construct
  misc_feature 1..20: note = Description of Artificial Sequence: Synthetic oligonucleotide
  source 1..20: mol_type = other DNA
gggcagtgatgctgccccac

SEQ ID NO: 6951 - DNA, 20 bp, synthetic construct
  misc_feature 1..20: note = Description of Artificial Sequence: Synthetic oligonucleotide
  source 1..20: mol_type = other DNA
ggcagtgatgctgccccact

SEQ ID NO: 6952 - DNA, 20 bp, synthetic construct
  misc_feature 1..20: note = Description of Artificial Sequence: Synthetic oligonucleotide
  source 1..20: mol_type = other DNA
gcagtgatgctgccccactg

SEQ ID NO: 6953 - DNA, 20 bp, synthetic construct
  misc_feature 1..20: note = Description of Artificial Sequence: Synthetic oligonucleotide
  source 1..20: mol_type = other DNA
cagtgatgctgccccactgc

SEQ ID NO: 6954 - DNA, 20 bp, synthetic construct
  misc_feature 1..20: note = Description of Artificial Sequence: Synthetic oligonucleotide
  source 1..20: mol_type = other DNA
agtgatgctgccccactgct

SEQ ID NO: 6955 - DNA, 20 bp, synthetic construct
  misc_feature 1..20: note = Description of Artificial Sequence: Synthetic oligonucleotide
  source 1..20: mol_type = other DNA
gtgatgctgccccactgctg

SEQ ID NO: 6956 - DNA, 20 bp, synthetic construct
  misc_feature 1..20: note = Description of Artificial Sequence: Synthetic oligonucleotide
  source 1..20: mol_type = other DNA
tgatgctgccccactgctgg

SEQ ID NO: 6957 - DNA, 20 bp, synthetic construct
  misc_feature 1..20: note = Description of Artificial Sequence: Synthetic oligonucleotide
  source 1..20: mol_type = other DNA
gatgctgccccactgctggt

SEQ ID NO: 6958 - DNA, 20 bp, synthetic construct
  misc_feature 1..20: note = Description of Artificial Sequence: Synthetic oligonucleotide
  source 1..20: mol_type = other DNA
atgctgccccactgctggtg

SEQ ID NO: 6959 - DNA, 20 bp, synthetic construct
  misc_feature 1..20: note = Description of Artificial Sequence: Synthetic oligonucleotide
  source 1..20: mol_type = other DNA
tgctgccccactgctggtga

SEQ ID NO: 6960 - DNA, 20 bp, synthetic construct
  misc_feature 1..20: note = Description of Artificial Sequence: Synthetic oligonucleotide
  source 1..20: mol_type = other DNA
gctgccccactgctggtgag

SEQ ID NO: 6961 - DNA, 20 bp, synthetic construct
  misc_feature 1..20: note = Description of Artificial Sequence: Synthetic oligonucleotide
  source 1..20: mol_type = other DNA
ctgccccactgctggtgagc

SEQ ID NO: 6962 - DNA, 20 bp, synthetic construct
  misc_feature 1..20: note = Description of Artificial Sequence: Synthetic oligonucleotide
  source 1..20: mol_type = other DNA
tgccccactgctggtgagct

SEQ ID NO: 6963 - DNA, 20 bp, synthetic construct
  misc_feature 1..20: note = Description of Artificial Sequence: Synthetic oligonucleotide
  source 1..20: mol_type = other DNA
gccccactgctggtgagctg

SEQ ID NO: 6964 - DNA, 20 bp, synthetic construct
  misc_feature 1..20: note = Description of Artificial Sequence: Synthetic oligonucleotide
  source 1..20: mol_type = other DNA
ccccactgctggtgagctgg

SEQ ID NO: 6965 - DNA, 20 bp, synthetic construct
  misc_feature 1..20: note = Description of Artificial Sequence: Synthetic oligonucleotide
  source 1..20: mol_type = other DNA
cccactgctggtgagctggg

SEQ ID NO: 6966 - DNA, 20 bp, synthetic construct
  misc_feature 1..20: note = Description of Artificial Sequence: Synthetic oligonucleotide
  source 1..20: mol_type = other DNA
ccactgctggtgagctgggg

SEQ ID NO: 6967 - DNA, 20 bp, synthetic construct
  misc_feature 1..20: note = Description of Artificial Sequence: Synthetic oligonucleotide
  source 1..20: mol_type = other DNA
cactgctggtgagctggggt

SEQ ID NO: 6968 - DNA, 20 bp, synthetic construct
  misc_feature 1..20: note = Description of Artificial Sequence: Synthetic oligonucleotide
  source 1..20: mol_type = other DNA
actgctggtgagctggggtg

SEQ ID NO: 6969 - DNA, 20 bp, synthetic construct
  misc_feature 1..20: note = Description of Artificial Sequence: Synthetic oligonucleotide
  source 1..20: mol_type = other DNA
ctgctggtgagctggggtgg

SEQ ID NO: 6970 - DNA, 20 bp, synthetic construct
  misc_feature 1..20: note = Description of Artificial Sequence: Synthetic oligonucleotide
  source 1..20: mol_type = other DNA
tgctggtgagctggggtggg

SEQ ID NO: 6971 - DNA, 20 bp, synthetic construct
  misc_feature 1..20: note = Description of Artificial Sequence: Synthetic oligonucleotide
  source 1..20: mol_type = other DNA
gctggtgagctggggtgggt

SEQ ID NO: 6972 - DNA, 20 bp, synthetic construct
  misc_feature 1..20: note = Description of Artificial Sequence: Synthetic oligonucleotide
  source 1..20: mol_type = other DNA
ctggtgagctggggtgggtg

SEQ ID NO: 6973 - DNA, 20 bp, synthetic construct
  misc_feature 1..20: note = Description of Artificial Sequence: Synthetic oligonucleotide
  source 1..20: mol_type = other DNA
tggtgagctggggtgggtgg

SEQ ID NO: 6974 - DNA, 20 bp, synthetic construct
  misc_feature 1..20: note = Description of Artificial Sequence: Synthetic oligonucleotide
  source 1..20: mol_type = other DNA
ggtgagctggggtgggtggt

SEQ ID NO: 6975 - DNA, 20 bp, synthetic construct
  misc_feature 1..20: note = Description of Artificial Sequence: Synthetic oligonucleotide
  source 1..20: mol_type = other DNA
gtgagctggggtgggtggtg

SEQ ID NO: 6976 - DNA, 20 bp, synthetic construct
  misc_feature 1..20: note = Description of Artificial Sequence: Synthetic oligonucleotide
  source 1..20: mol_type = other DNA
tgagctggggtgggtggtgc

SEQ ID NO: 6977 - DNA, 20 bp, synthetic construct
  misc_feature 1..20: note = Description of Artificial Sequence: Synthetic oligonucleotide
  source 1..20: mol_type = other DNA
gagctggggtgggtggtgca

SEQ ID NO: 6978 - DNA, 20 bp, synthetic construct
  misc_feature 1..20: note = Description of Artificial Sequence: Synthetic oligonucleotide
  source 1..20: mol_type = other DNA
agctggggtgggtggtgcat

SEQ ID NO: 6979 - DNA, 20 bp, synthetic construct
  misc_feature 1..20: note = Description of Artificial Sequence: Synthetic oligonucleotide
  source 1..20: mol_type = other DNA
gctggggtgggtggtgcatt

SEQ ID NO: 6980 - DNA, 20 bp, synthetic construct
  misc_feature 1..20: note = Description of Artificial Sequence: Synthetic oligonucleotide
  source 1..20: mol_type = other DNA
ctggggtgggtggtgcattg

SEQ ID NO: 6981 - DNA, 20 bp, synthetic construct
  misc_feature 1..20: note = Description of Artificial Sequence: Synthetic oligonucleotide
  source 1..20: mol_type = other DNA
tggggtgggtggtgcattgc

SEQ ID NO: 6982 - DNA, 20 bp, synthetic construct
  misc_feature 1..20: note = Description of Artificial Sequence: Synthetic oligonucleotide
  source 1..20: mol_type = other DNA
ggggtgggtggtgcattgct

SEQ ID NO: 6983 - DNA, 20 bp, synthetic construct
  misc_feature 1..20: note = Description of Artificial Sequence: Synthetic oligonucleotide
  source 1..20: mol_type = other DNA
gggtgggtggtgcattgctc

SEQ ID NO: 6984 - DNA, 20 bp, synthetic construct
  misc_feature 1..20: note = Description of Artificial Sequence: Synthetic oligonucleotide
  source 1..20: mol_type = other DNA
ggtgggtggtgcattgctct

SEQ ID NO: 6985 - DNA, 20 bp, synthetic construct
  misc_feature 1..20: note = Description of Artificial Sequence: Synthetic oligonucleotide
  source 1..20: mol_type = other DNA
gtgggtggtgcattgctctg

SEQ ID NO: 6986 - DNA, 20 bp, synthetic construct
  misc_feature 1..20: note = Description of Artificial Sequence: Synthetic oligonucleotide
  source 1..20: mol_type = other DNA
tgggtggtgcattgctctgg

SEQ ID NO: 6987 - DNA, 20 bp, synthetic construct
  misc_feature 1..20: note = Description of Artificial Sequence: Synthetic oligonucleotide
  source 1..20: mol_type = other DNA
gggtggtgcattgctctgga

SEQ ID NO: 6988 - DNA, 20 bp, synthetic construct
  misc_feature 1..20: note = Description of Artificial Sequence: Synthetic oligonucleotide
  source 1..20: mol_type = other DNA
ggtggtgcattgctctggaa

SEQ ID NO: 6989 - DNA, 20 bp, synthetic construct
  misc_feature 1..20: note = Description of Artificial Sequence: Synthetic oligonucleotide
  source 1..20: mol_type = other DNA
gtggtgcattgctctggaag

SEQ ID NO: 6990 - DNA, 20 bp, synthetic construct
  misc_feature 1..20: note = Description of Artificial Sequence: Synthetic oligonucleotide
  source 1..20: mol_type = other DNA
tggtgcattgctctggaaga

SEQ ID NO: 6991 - DNA, 20 bp, synthetic construct
  misc_feature 1..20: note = Description of Artificial Sequence: Synthetic oligonucleotide
  source 1..20: mol_type = other DNA
ggtgcattgctctggaagaa

SEQ ID NO: 6992 - DNA, 20 bp, synthetic construct
  misc_feature 1..20: note = Description of Artificial Sequence: Synthetic oligonucleotide
  source 1..20: mol_type = other DNA
gtgcattgctctggaagaac

SEQ ID NO: 6993 - DNA, 20 bp, synthetic construct
  misc_feature 1..20: note = Description of Artificial Sequence: Synthetic oligonucleotide
  source 1..20: mol_type = other DNA
tgcattgctctggaagaacg

SEQ ID NO: 6994 - DNA, 20 bp, synthetic construct
  misc_feature 1..20: note = Description of Artificial Sequence: Synthetic oligonucleotide
  source 1..20: mol_type = other DNA
gcattgctctggaagaacga

SEQ ID NO: 6995 - DNA, 20 bp, synthetic construct
  misc_feature 1..20: note = Description of Artificial Sequence: Synthetic oligonucleotide
  source 1..20: mol_type = other DNA
cattgctctggaagaacgat

SEQ ID NO: 6996 - DNA, 20 bp, synthetic construct
  misc_feature 1..20: note = Description of Artificial Sequence: Synthetic oligonucleotide
  source 1..20: mol_type = other DNA
attgctctggaagaacgatg

SEQ ID NO: 6997 - DNA, 20 bp, synthetic construct
  misc_feature 1..20: note = Description of Artificial Sequence: Synthetic oligonucleotide
  source 1..20: mol_type = other DNA
ttgctctggaagaacgatgc

SEQ ID NO: 6998 - DNA, 20 bp, synthetic construct
  misc_feature 1..20: note = Description of Artificial Sequence: Synthetic oligonucleotide
  source 1..20: mol_type = other DNA
tgctctggaagaacgatgca

SEQ ID NO: 6999 - DNA, 20 bp, synthetic construct
  misc_feature 1..20: note = Description of Artificial Sequence: Synthetic oligonucleotide
  source 1..20: mol_type = other DNA
gctctggaagaacgatgcaa

SEQ ID NO: 7000 - DNA, 20 bp, synthetic construct
  misc_feature 1..20: note = Description of Artificial Sequence: Synthetic oligonucleotide
  source 1..20: mol_type = other DNA
ctctggaagaacgatgcaaa

SEQ ID NO: 7001 - DNA, 20 bp, synthetic construct
  misc_feature 1..20: note = Description of Artificial Sequence: Synthetic oligonucleotide
  source 1..20: mol_type = other DNA
tctggaagaacgatgcaaat

SEQ ID NO: 7002 - DNA, 20 bp, synthetic construct
  misc_feature 1..20: note = Description of Artificial Sequence: Synthetic oligonucleotide
  source 1..20: mol_type = other DNA
ctggaagaacgatgcaaatt

SEQ ID NO: 7003 - DNA, 20 bp, synthetic construct
  misc_feature 1..20: note = Description of Artificial Sequence: Synthetic oligonucleotide
  source 1..20: mol_type = other DNA
tggaagaacgatgcaaattg

SEQ ID NO: 7004 - DNA, 20 bp, synthetic construct
  misc_feature 1..20: note = Description of Artificial Sequence: Synthetic oligonucleotide
  source 1..20: mol_type = other DNA
ggaagaacgatgcaaattgg

SEQ ID NO: 7005 - DNA, 20 bp, synthetic construct
  misc_feature 1..20: note = Description of Artificial Sequence: Synthetic oligonucleotide
  source 1..20: mol_type = other DNA
gaagaacgatgcaaattggg

SEQ ID NO: 7006 - DNA, 20 bp, synthetic construct
  misc_feature 1..20: note = Description of Artificial Sequence: Synthetic oligonucleotide
  source 1..20: mol_type = other DNA
aagaacgatgcaaattgggc

SEQ ID NO: 7007 - DNA, 20 bp, synthetic construct
  misc_feature 1..20: note = Description of Artificial Sequence: Synthetic oligonucleotide
  source 1..20: mol_type = other DNA
agaacgatgcaaattgggcc

SEQ ID NO: 7008 - DNA, 20 bp, synthetic construct
  misc_feature 1..20: note = Description of Artificial Sequence: Synthetic oligonucleotide
  source 1..20: mol_type = other DNA
gaacgatgcaaattgggccc

SEQ ID NO: 7009 - DNA, 20 bp, synthetic construct
  misc_feature 1..20: note = Description of Artificial Sequence: Synthetic oligonucleotide
  source 1..20: mol_type = other DNA
aacgatgcaaattgggcccg

SEQ ID NO: 7010 - DNA, 20 bp, synthetic construct
  misc_feature 1..20: note = Description of Artificial Sequence: Synthetic oligonucleotide
  source 1..20: mol_type = other DNA
acgatgcaaattgggcccgg

SEQ ID NO: 7011 - DNA, 20 bp, synthetic construct
  misc_feature 1..20: note = Description of Artificial Sequence: Synthetic oligonucleotide
  source 1..20: mol_type = other DNA
cgatgcaaattgggcccggg

SEQ ID NO: 7012 - DNA, 20 bp, synthetic construct
  misc_feature 1..20: note = Description of Artificial Sequence: Synthetic oligonucleotide
  source 1..20: mol_type = other DNA
gatgcaaattgggcccgggg

SEQ ID NO: 7013 - DNA, 20 bp, synthetic construct
  misc_feature 1..20: note = Description of Artificial Sequence: Synthetic oligonucleotide
  source 1..20: mol_type = other DNA
atgcaaattgggcccggggg

SEQ ID NO: 7014 - DNA, 20 bp, synthetic construct
  misc_feature 1..20: note = Description of Artificial Sequence: Synthetic oligonucleotide
  source 1..20: mol_type = other DNA
tgcaaattgggcccgggggt

SEQ ID NO: 7015 - DNA, 20 bp, synthetic construct
  misc_feature 1..20: note = Description of Artificial Sequence: Synthetic oligonucleotide
  source 1..20: mol_type = other DNA
gcaaattgggcccgggggtg

SEQ ID NO: 7016 - DNA, 20 bp, synthetic construct
  misc_feature 1..20: note = Description of Artificial Sequence: Synthetic oligonucleotide
  source 1..20: mol_type = other DNA
caaattgggcccgggggtga

SEQ ID NO: 7017 - DNA, 20 bp, synthetic construct
  misc_feature 1..20: note = Description of Artificial Sequence: Synthetic oligonucleotide
  source 1..20: mol_type = other DNA
aaattgggcccgggggtgag

SEQ ID NO: 7018 - DNA, 20 bp, synthetic construct
  misc_feature 1..20: note = Description of Artificial Sequence: Synthetic oligonucleotide
  source 1..20: mol_type = other DNA
aattgggcccgggggtgagt

SEQ ID NO: 7019 - DNA, 20 bp, synthetic construct
  misc_feature 1..20: note = Description of Artificial Sequence: Synthetic oligonucleotide
  source 1..20: mol_type = other DNA
attgggcccgggggtgagtg

SEQ ID NO: 7020 - DNA, 20 bp, synthetic construct
  misc_feature 1..20: note = Description of Artificial Sequence: Synthetic oligonucleotide
  source 1..20: mol_type = other DNA
ttgggcccgggggtgagtgc

SEQ ID NO: 7021 - DNA, 20 bp, synthetic construct
  misc_feature 1..20: note = Description of Artificial Sequence: Synthetic oligonucleotide
  source 1..20: mol_type = other DNA
tgggcccgggggtgagtgca

SEQ ID NO: 7022 - DNA, 20 bp, synthetic construct
  misc_feature 1..20: note = Description of Artificial Sequence: Synthetic oligonucleotide
  source 1..20: mol_type = other DNA
gggcccgggggtgagtgcac

SEQ ID NO: 7023 - DNA, 20 bp, synthetic construct
  misc_feature 1..20: note = Description of Artificial Sequence: Synthetic oligonucleotide
  source 1..20: mol_type = other DNA
ggcccgggggtgagtgcaca

SEQ ID NO: 7024 - DNA, 20 bp, synthetic construct
  misc_feature 1..20: note = Description of Artificial Sequence: Synthetic oligonucleotide
  source 1..20: mol_type = other DNA
gcccgggggtgagtgcacat

SEQ ID NO: 7025 - DNA, 20 bp, synthetic construct
  misc_feature 1..20: note = Description of Artificial Sequence: Synthetic oligonucleotide
  source 1..20: mol_type = other DNA
cccgggggtgagtgcacatg

SEQ ID NO: 7026 - DNA, 20 bp, synthetic construct
  misc_feature 1..20: note = Description of Artificial Sequence: Synthetic oligonucleotide
  source 1..20: mol_type = other DNA
ccgggggtgagtgcacatga

SEQ ID NO: 7027 - DNA, 20 bp, synthetic construct
  misc_feature 1..20: note = Description of Artificial Sequence: Synthetic oligonucleotide
  source 1..20: mol_type = other DNA
cgggggtgagtgcacatgaa

SEQ ID NO: 7028 - DNA, 20 bp, synthetic construct
  misc_feature 1..20: note = Description of Artificial Sequence: Synthetic oligonucleotide
  source 1..20: mol_type = other DNA
gggggtgagtgcacatgaag

SEQ ID NO: 7029 - DNA, 20 bp, synthetic construct
  misc_feature 1..20: note = Description of Artificial Sequence: Synthetic oligonucleotide
  source 1..20: mol_type = other DNA
ggggtgagtgcacatgaagc

SEQ ID NO: 7030 - DNA, 20 bp, synthetic construct
  misc_feature 1..20: note = Description of Artificial Sequence: Synthetic oligonucleotide
  source 1..20: mol_type = other DNA
gggtgagtgcacatgaagct

SEQ ID NO: 7031 - DNA, 20 bp, synthetic construct
  misc_feature 1..20: note = Description of Artificial Sequence: Synthetic oligonucleotide
  source 1..20: mol_type = other DNA
ggtgagtgcacatgaagctt

SEQ ID NO: 7032 - DNA, 20 bp, synthetic construct
  misc_feature 1..20: note = Description of Artificial Sequence: Synthetic oligonucleotide
  source 1..20: mol_type = other DNA
gtgagtgcacatgaagcttg

SEQ ID NO: 7033 - DNA, 20 bp, synthetic construct
  misc_feature 1..20: note = Description of Artificial Sequence: Synthetic oligonucleotide
  source 1..20: mol_type = other DNA
tgagtgcacatgaagcttgg

SEQ ID NO: 7034 - DNA, 20 bp, synthetic construct
  misc_feature 1..20: note = Description of Artificial Sequence: Synthetic oligonucleotide
  source 1..20: mol_type = other DNA
gagtgcacatgaagcttgga

SEQ ID NO: 7035 - DNA, 20 bp, synthetic construct
  misc_feature 1..20: note = Description of Artificial Sequence: Synthetic oligonucleotide
  source 1..20: mol_type = other DNA
agtgcacatgaagcttggag

SEQ ID NO: 7036 - DNA, 20 bp, synthetic construct
  misc_feature 1..20: note = Description of Artificial Sequence: Synthetic oligonucleotide
  source 1..20: mol_type = other DNA
gtgcacatgaagcttggagg

SEQ ID NO: 7037 - DNA, 20 bp, synthetic construct
  misc_feature 1..20: note = Description of Artificial Sequence: Synthetic oligonucleotide
  source 1..20: mol_type = other DNA
tgcacatgaagcttggaggg

SEQ ID NO: 7038 - DNA, 20 bp, synthetic construct
  misc_feature 1..20: note = Description of Artificial Sequence: Synthetic oligonucleotide
  source 1..20: mol_type = other DNA
gcacatgaagcttggaggga

SEQ ID NO: 7039 - DNA, 20 bp, synthetic construct
  misc_feature 1..20: note = Description of Artificial Sequence: Synthetic oligonucleotide
  source 1..20: mol_type = other DNA
cacatgaagcttggagggaa

SEQ ID NO: 7040 - DNA, 20 bp, synthetic construct
  misc_feature 1..20: note = Description of Artificial Sequence: Synthetic oligonucleotide
  source 1..20: mol_type = other DNA
acatgaagcttggagggaaa

SEQ ID NO: 7041 - DNA, 20 bp, synthetic construct
  misc_feature 1..20: note = Description of Artificial Sequence: Synthetic oligonucleotide
  source 1..20: mol_type = other DNA
catgaagcttggagggaaaa

SEQ ID NO: 7042 - DNA, 20 bp, synthetic construct
  misc_feature 1..20: note = Description of Artificial Sequence: Synthetic oligonucleotide
  source 1..20: mol_type = other DNA
atgaagcttggagggaaaaa

SEQ ID NO: 7043 - DNA, 20 bp, synthetic construct
  misc_feature 1..20: note = Description of Artificial Sequence: Synthetic oligonucleotide
  source 1..20: mol_type = other DNA
tgaagcttggagggaaaaat

SEQ ID NO: 7044 - DNA, 20 bp, synthetic construct
  misc_feature 1..20: note = Description of Artificial Sequence: Synthetic oligonucleotide
  source 1..20: mol_type = other DNA
gaagcttggagggaaaaatc

SEQ ID NO: 7045 - DNA, 20 bp, synthetic construct
  misc_feature 1..20: note = Description of Artificial Sequence: Synthetic oligonucleotide
  source 1..20: mol_type = other DNA
aagcttggagggaaaaatcc

SEQ ID NO: 7046 - DNA, 20 bp, synthetic construct
  misc_feature 1..20: note = Description of Artificial Sequence: Synthetic oligonucleotide
  source 1..20: mol_type = other DNA
agcttggagggaaaaatcca

SEQ ID NO: 7047 - DNA, 20 bp, synthetic construct
  misc_feature 1..20: note = Description of Artificial Sequence: Synthetic oligonucleotide
  source 1..20: mol_type = other DNA
gcttggagggaaaaatccag

SEQ ID NO: 7048 - DNA, 20 bp, synthetic construct
  misc_feature 1..20: note = Description of Artificial Sequence: Synthetic oligonucleotide
  source 1..20: mol_type = other DNA
cttggagggaaaaatccaga

SEQ ID NO: 7049 - DNA, 20 bp, synthetic construct
  misc_feature 1..20: note = Description of Artificial Sequence: Synthetic oligonucleotide
  source 1..20: mol_type = other DNA
ttggagggaaaaatccagat

SEQ ID NO: 7050 - DNA, 20 bp, synthetic construct
  misc_feature 1..20: note = Description of Artificial Sequence: Synthetic oligonucleotide
  source 1..20: mol_type = other DNA
tggagggaaaaatccagata

SEQ ID NO: 7051 - DNA, 20 bp, synthetic construct
  misc_feature 1..20: note = Description of Artificial Sequence: Synthetic oligonucleotide
  source 1..20: mol_type = other DNA
ggagggaaaaatccagatac

SEQ ID NO: 7052 - DNA, 20 bp, synthetic construct
  misc_feature 1..20: note = Description of Artificial Sequence: Synthetic oligonucleotide
  source 1..20: mol_type = other DNA
gagggaaaaatccagatact

SEQ ID NO: 7053 - DNA, 20 bp, synthetic construct
  misc_feature 1..20: note = Description of Artificial Sequence: Synthetic oligonucleotide
  source 1..20: mol_type = other DNA
agggaaaaatccagatactt

SEQ ID NO: 7054 - DNA, 20 bp, synthetic construct
  misc_feature 1..20: note = Description of Artificial Sequence: Synthetic oligonucleotide
  source 1..20: mol_type = other DNA
gggaaaaatccagatacttt

SEQ ID NO: 7055 - DNA, 20 bp, synthetic construct
  misc_feature 1..20: note = Description of Artificial Sequence: Synthetic oligonucleotide
  source 1..20: mol_type = other DNA
ggaaaaatccagatactttt

SEQ ID NO: 7056 - DNA, 20 bp, synthetic construct
  misc_feature 1..20: note = Description of Artificial Sequence: Synthetic oligonucleotide
  source 1..20: mol_type = other DNA
gaaaaatccagatacttttt

SEQ ID NO: 7057 - DNA, 20 bp, synthetic construct
  misc_feature 1..20: note = Description of Artificial Sequence: Synthetic oligonucleotide
  source 1..20: mol_type = other DNA
aaaaatccagatactttttt

SEQ ID NO: 7058 - DNA, 20 bp, synthetic construct
  misc_feature 1..20: note = Description of Artificial Sequence: Synthetic oligonucleotide
  source 1..20: mol_type = other DNA
aaaatccagatacttttttt

SEQ ID NO: 7059 - DNA, 20 bp, synthetic construct
  misc_feature 1..20: note = Description of Artificial Sequence: Synthetic oligonucleotide
  source 1..20: mol_type = other DNA
aaatccagatactttttttt

SEQ ID NO: 7060 - DNA, 20 bp, synthetic construct
  misc_feature 1..20: note = Description of Artificial Sequence: Synthetic oligonucleotide
  source 1..20: mol_type = other DNA
aatccagatacttttttttt

SEQ ID NO: 7061 - DNA, 20 bp, synthetic construct
  misc_feature 1..20: note = Description of Artificial Sequence: Synthetic oligonucleotide
  source 1..20: mol_type = other DNA
atccagatactttttttttt

SEQ ID NO: 7062 - DNA, 20 bp, synthetic construct
  misc_feature 1..20: note = Description of Artificial Sequence: Synthetic oligonucleotide
  source 1..20: mol_type = other DNA
tccagatacttttttttttt

SEQ ID NO: 7063 - DNA, 20 bp, synthetic construct
  misc_feature 1..20: note = Description of Artificial Sequence: Synthetic oligonucleotide
  source 1..20: mol_type = other DNA
ccagatactttttttttttt

SEQ ID NO: 7064 - DNA, 20 bp, synthetic construct
  misc_feature 1..20: note = Description of Artificial Sequence: Synthetic oligonucleotide
  source 1..20: mol_type = other DNA
cagatacttttttttttttt

SEQ ID NO: 7065 - DNA, 20 bp, synthetic construct
  misc_feature 1..20: note = Description of Artificial Sequence: Synthetic oligonucleotide
  source 1..20: mol_type = other DNA
agatactttttttttttttg

SEQ ID NO: 7066 - DNA, 20 bp, synthetic construct
  misc_feature 1..20: note = Description of Artificial Sequence: Synthetic oligonucleotide
  source 1..20: mol_type = other DNA
gatactttttttttttttga

SEQ ID NO: 7067 - DNA, 20 bp, synthetic construct
  misc_feature 1..20: note = Description of Artificial Sequence: Synthetic oligonucleotide
  source 1..20: mol_type = other DNA
atactttttttttttttgaa

SEQ ID NO: 7068 - DNA, 20 bp, synthetic construct
  misc_feature 1..20: note = Description of Artificial Sequence: Synthetic oligonucleotide
  source 1..20: mol_type = other DNA
tactttttttttttttgaag

SEQ ID NO: 7069 - DNA, 20 bp, synthetic construct
  misc_feature 1..20: note = Description of Artificial Sequence: Synthetic oligonucleotide
  source 1..20: mol_type = other DNA
actttttttttttttgaagc

SEQ ID NO: 7070 - DNA, 20 bp, synthetic construct
  misc_feature 1..20: note = Description of Artificial Sequence: Synthetic oligonucleotide
  source 1..20: mol_type = other DNA
ctttttttttttttgaagca

SEQ ID NO: 7071 - DNA, 20 bp, synthetic construct
  misc_feature 1..20: note = Description of Artificial Sequence: Synthetic oligonucleotide
  source 1..20: mol_type = other DNA
tttttttttttttgaagcag

SEQ ID NO: 7072 - DNA, 20 bp, synthetic construct
  misc_feature 1..20: note = Description of Artificial Sequence: Synthetic oligonucleotide
  source 1..20: mol_type = other DNA
ttttttttttttgaagcaga

SEQ ID NO: 7073 - DNA, 20 bp, synthetic construct
  misc_feature 1..20: note = Description of Artificial Sequence: Synthetic oligonucleotide
  source 1..20: mol_type = other DNA
tttttttttttgaagcagaa

SEQ ID NO: 7074 - DNA, 20 bp, synthetic construct
  misc_feature 1..20: note = Description of Artificial Sequence: Synthetic oligonucleotide
  source 1..20: mol_type = other DNA
ttttttttttgaagcagaat

SEQ ID NO: 7075 - DNA, 20 bp, synthetic construct
  misc_feature 1..20: note = Description of Artificial Sequence: Synthetic oligonucleotide
  source 1..20: mol_type = other DNA
tttttttttgaagcagaatt

SEQ ID NO: 7076 - DNA, 20 bp, synthetic construct
  misc_feature 1..20: note = Description of Artificial Sequence: Synthetic oligonucleotide
  source 1..20: mol_type = other DNA
ttttttttgaagcagaattt

SEQ ID NO: 7077 - DNA, 20 bp, synthetic construct
  misc_feature 1..20: note = Description of Artificial Sequence: Synthetic oligonucleotide
  source 1..20: mol_type = other DNA
tttttttgaagcagaatttc

SEQ ID NO: 7078 - DNA, 20 bp, synthetic construct
  misc_feature 1..20: note = Description of Artificial Sequence: Synthetic oligonucleotide
  source 1..20: mol_type = other DNA
ttttttgaagcagaatttca

SEQ ID NO: 7079 - DNA, 20 bp, synthetic construct
  misc_feature 1..20: note = Description of Artificial Sequence: Synthetic oligonucleotide
  source 1..20: mol_type = other DNA
tttttgaagcagaatttcac

SEQ ID NO: 7080 - DNA, 20 bp, synthetic construct
  misc_feature 1..20: note = Description of Artificial Sequence: Synthetic oligonucleotide
  source 1..20: mol_type = other DNA
ttttgaagcagaatttcact

SEQ ID NO: 7081 - DNA, 20 bp, synthetic construct
  misc_feature 1..20: note = Description of Artificial Sequence: Synthetic oligonucleotide
  source 1..20: mol_type = other DNA
tttgaagcagaatttcactc

SEQ ID NO: 7082 - DNA, 20 bp, synthetic construct
  misc_feature 1..20: note = Description of Artificial Sequence: Synthetic oligonucleotide
  source 1..20: mol_type = other DNA
ttgaagcagaatttcactct

SEQ ID NO: 7083 - DNA, 20 bp, synthetic construct
  misc_feature 1..20: note = Description of Artificial Sequence: Synthetic oligonucleotide
  source 1..20: mol_type = other DNA
tgaagcagaatttcactctt

SEQ ID NO: 7084 - DNA, 20 bp, synthetic construct
  misc_feature 1..20: note = Description of Artificial Sequence: Synthetic oligonucleotide
  source 1..20: mol_type = other DNA
gaagcagaatttcactcttg

SEQ ID NO: 7085 - DNA, 20 bp, synthetic construct
  misc_feature 1..20: note = Description of Artificial Sequence: Synthetic oligonucleotide
  source 1..20: mol_type = other DNA
aagcagaatttcactcttgt

SEQ ID NO: 7086 - DNA, 20 bp, synthetic construct
  misc_feature 1..20: note = Description of Artificial Sequence: Synthetic oligonucleotide
  source 1..20: mol_type = other DNA
agcagaatttcactcttgtt

SEQ ID NO: 7087 - DNA, 20 bp, synthetic construct
  misc_feature 1..20: note = Description of Artificial Sequence: Synthetic oligonucleotide
  source 1..20: mol_type = other DNA
gcagaatttcactcttgttg

SEQ ID NO: 7088 - DNA, 20 bp, synthetic construct
  misc_feature 1..20: note = Description of Artificial Sequence: Synthetic oligonucleotide
  source 1..20: mol_type = other DNA
cagaatttcactcttgttgc

SEQ ID NO: 7089 - DNA, 20 bp, synthetic construct
  misc_feature 1..20: note = Description of Artificial Sequence: Synthetic oligonucleotide
  source 1..20: mol_type = other DNA
agaatttcactcttgttgcc

SEQ ID NO: 7090 - DNA, 20 bp, synthetic construct
  misc_feature 1..20: note = Description of Artificial Sequence: Synthetic oligonucleotide
  source 1..20: mol_type = other DNA
gaatttcactcttgttgccc

SEQ ID NO: 7091 - DNA, 20 bp, synthetic construct
  misc_feature 1..20: note = Description of Artificial Sequence: Synthetic oligonucleotide
  source 1..20: mol_type = other DNA
aatttcactcttgttgccca

SEQ ID NO: 7092 - DNA, 20 bp, synthetic construct
  misc_feature 1..20: note = Description of Artificial Sequence: Synthetic oligonucleotide
  source 1..20: mol_type = other DNA
atttcactcttgttgcccag

SEQ ID NO: 7093 - DNA, 20 bp, synthetic construct
  misc_feature 1..20: note = Description of Artificial Sequence: Synthetic oligonucleotide
  source 1..20: mol_type = other DNA
tttcactcttgttgcccagg

SEQ ID NO: 7094 - DNA, 20 bp, synthetic construct
  misc_feature 1..20: note = Description of Artificial Sequence: Synthetic oligonucleotide
  source 1..20: mol_type = other DNA
ttcactcttgttgcccaggc

SEQ ID NO: 7095 - DNA, 20 bp, synthetic construct
  misc_feature 1..20: note = Description of Artificial Sequence: Synthetic oligonucleotide
  source 1..20: mol_type = other DNA
tcactcttgttgcccaggct

SEQ ID NO: 7096 - DNA, 20 bp, synthetic construct
  misc_feature 1..20: note = Description of Artificial Sequence: Synthetic oligonucleotide
  source 1..20: mol_type = other DNA
cactcttgttgcccaggcta

SEQ ID NO: 7097 - DNA, 20 bp, synthetic construct
  misc_feature 1..20: note = Description of Artificial Sequence: Synthetic oligonucleotide
  source 1..20: mol_type = other DNA
actcttgttgcccaggctag

SEQ ID NO: 7098 - DNA, 20 bp, synthetic construct
  misc_feature 1..20: note = Description of Artificial Sequence: Synthetic oligonucleotide
  source 1..20: mol_type = other DNA
ctcttgttgcccaggctaga

SEQ ID NO: 7099 - DNA, 20 bp, synthetic construct
  misc_feature 1..20: note = Description of Artificial Sequence: Synthetic oligonucleotide
  source 1..20: mol_type = other DNA
tcttgttgcccaggctagag

SEQ ID NO: 7100 - DNA, 20 bp, synthetic construct
  misc_feature 1..20: note = Description of Artificial Sequence: Synthetic oligonucleotide
  source 1..20: mol_type = other DNA
cttgttgcccaggctagagt

SEQ ID NO: 7101 - DNA, 20 bp, synthetic construct
  misc_feature 1..20: note = Description of Artificial Sequence: Synthetic oligonucleotide
  source 1..20: mol_type = other DNA
ttgttgcccaggctagagta

SEQ ID NO: 7102 - DNA, 20 bp, synthetic construct
  misc_feature 1..20: note = Description of Artificial Sequence: Synthetic oligonucleotide
  source 1..20: mol_type = other DNA
tgttgcccaggctagagtac

SEQ ID NO: 7103 - DNA, 20 bp, synthetic construct
  misc_feature 1..20: note = Description of Artificial Sequence: Synthetic oligonucleotide
  source 1..20: mol_type = other DNA
gttgcccaggctagagtaca

SEQ ID NO: 7104 - DNA, 20 bp, synthetic construct
  misc_feature 1..20: note = Description of Artificial Sequence: Synthetic oligonucleotide
  source 1..20: mol_type = other DNA
ttgcccaggctagagtacag

SEQ ID NO: 7105 - DNA, 20 bp, synthetic construct
  misc_feature 1..20: note = Description of Artificial Sequence: Synthetic oligonucleotide
  source 1..20: mol_type = other DNA
tgcccaggctagagtacagt

SEQ ID NO: 7106 - DNA, 20 bp, synthetic construct
  misc_feature 1..20: note = Description of Artificial Sequence: Synthetic oligonucleotide
  source 1..20: mol_type = other DNA
gcccaggctagagtacagtg

SEQ ID NO: 7107 - DNA, 20 bp, synthetic construct
  misc_feature 1..20: note = Description of Artificial Sequence: Synthetic oligonucleotide
  source 1..20: mol_type = other DNA
cccaggctagagtacagtgg

SEQ ID NO: 7108 - DNA, 20 bp, synthetic construct
  misc_feature 1..20: note = Description of Artificial Sequence: Synthetic oligonucleotide
  source 1..20: mol_type = other DNA
ccaggctagagtacagtggt

SEQ ID NO: 7109 - DNA, 20 bp, synthetic construct
  misc_feature 1..20: note = Description of Artificial Sequence: Synthetic oligonucleotide
  source 1..20: mol_type = other DNA
caggctagagtacagtggtg

SEQ ID NO: 7110 - DNA, 20 bp, synthetic construct
  misc_feature 1..20: note = Description of Artificial Sequence: Synthetic oligonucleotide
  source 1..20: mol_type = other DNA
aggctagagtacagtggtgc

SEQ ID NO: 7111 - DNA, 20 bp, synthetic construct
  misc_feature 1..20: note = Description of Artificial Sequence: Synthetic oligonucleotide
  source 1..20: mol_type = other DNA
ggctagagtacagtggtgca

SEQ ID NO: 7112 - DNA, 20 bp, synthetic construct
  misc_feature 1..20: note = Description of Artificial Sequence: Synthetic oligonucleotide
  source 1..20: mol_type = other DNA
gctagagtacagtggtgcaa

SEQ ID NO: 7113 - DNA, 20 bp, synthetic construct
  misc_feature 1..20: note = Description of Artificial Sequence: Synthetic oligonucleotide
  source 1..20: mol_type = other DNA
ctagagtacagtggtgcaat

SEQ ID NO: 7114 - DNA, 20 bp, synthetic construct
  misc_feature 1..20: note = Description of Artificial Sequence: Synthetic oligonucleotide
  source 1..20: mol_type = other DNA
tagagtacagtggtgcaatc

SEQ ID NO: 7115 - DNA, 20 bp, synthetic construct
  misc_feature 1..20: note = Description of Artificial Sequence: Synthetic oligonucleotide
  source 1..20: mol_type = other DNA
agagtacagtggtgcaatct

SEQ ID NO: 7116 - DNA, 20 bp, synthetic construct
  misc_feature 1..20: note = Description of Artificial Sequence: Synthetic oligonucleotide
  source 1..20: mol_type = other DNA
gagtacagtggtgcaatctc

SEQ ID NO: 7117 - DNA, 20 bp, synthetic construct
  misc_feature 1..20: note = Description of Artificial Sequence: Synthetic oligonucleotide
  source 1..20: mol_type = other DNA
agtacagtggtgcaatctcg

SEQ ID NO: 7118 - DNA, 20 bp, synthetic construct
  misc_feature 1..20: note = Description of Artificial Sequence: Synthetic oligonucleotide
  source 1..20: mol_type = other DNA
gtacagtggtgcaatctcgg

SEQ ID NO: 7119 - DNA, 20 bp, synthetic construct
  misc_feature 1..20: note = Description of Artificial Sequence: Synthetic oligonucleotide
  source 1..20: mol_type = other DNA
tacagtggtgcaatctcggc

SEQ ID NO: 7120 - DNA, 20 bp, synthetic construct
  misc_feature 1..20: note = Description of Artificial Sequence: Synthetic oligonucleotide
  source 1..20: mol_type = other DNA
acagtggtgcaatctcggct

SEQ ID NO: 7121 - DNA, 20 bp, synthetic construct
  misc_feature 1..20: note = Description of Artificial Sequence: Synthetic oligonucleotide
  source 1..20: mol_type = other DNA
cagtggtgcaatctcggctc

SEQ ID NO: 7122 - DNA, 20 bp, synthetic construct
  misc_feature 1..20: note = Description of Artificial Sequence: Synthetic oligonucleotide
  source 1..20: mol_type = other DNA
agtggtgcaatctcggctca

SEQ ID NO: 7123 - DNA, 20 bp, synthetic construct
  misc_feature 1..20: note = Description of Artificial Sequence: Synthetic oligonucleotide
  source 1..20: mol_type = other DNA
gtggtgcaatctcggctcac

SEQ ID NO: 7124 - DNA, 20 bp, synthetic construct
  misc_feature 1..20: note = Description of Artificial Sequence: Synthetic oligonucleotide
  source 1..20: mol_type = other DNA
tggtgcaatctcggctcact

SEQ ID NO: 7125 - DNA, 20 bp, synthetic construct
  misc_feature 1..20: note = Description of Artificial Sequence: Synthetic oligonucleotide
  source 1..20: mol_type = other DNA
ggtgcaatctcggctcactg

SEQ ID NO: 7126 - DNA, 20 bp, synthetic construct
  misc_feature 1..20: note = Description of Artificial Sequence: Synthetic oligonucleotide
  source 1..20: mol_type = other DNA
gtgcaatctcggctcactgc

SEQ ID NO: 7127 - DNA, 20 bp, synthetic construct
  misc_feature 1..20: note = Description of Artificial Sequence: Synthetic oligonucleotide
  source 1..20: mol_type = other DNA
tgcaatctcggctcactgca

SEQ ID NO: 7128 - DNA, 20 bp, synthetic construct
  misc_feature 1..20: note = Description of Artificial Sequence: Synthetic oligonucleotide
  source 1..20: mol_type = other DNA
gcaatctcggctcactgcaa

SEQ ID NO: 7129 - DNA, 20 bp, synthetic construct
  misc_feature 1..20: note = Description of Artificial Sequence: Synthetic oligonucleotide
  source 1..20: mol_type = other DNA
caatctcggctcactgcaac

SEQ ID NO: 7130 - DNA, 20 bp, synthetic construct
  misc_feature 1..20: note = Description of Artificial Sequence: Synthetic oligonucleotide
  source 1..20: mol_type = other DNA
aatctcggctcactgcaacc

SEQ ID NO: 7131 - DNA, 20 bp, synthetic construct
  misc_feature 1..20: note = Description of Artificial Sequence: Synthetic oligonucleotide
  source 1..20: mol_type = other DNA
atctcggctcactgcaacct

SEQ ID NO: 7132 - DNA, 20 bp, synthetic construct
  misc_feature 1..20: note = Description of Artificial Sequence: Synthetic oligonucleotide
  source 1..20: mol_type = other DNA
tctcggctcactgcaacctc

SEQ ID NO: 7133 - DNA, 20 bp, synthetic construct
  misc_feature 1..20: note = Description of Artificial Sequence: Synthetic oligonucleotide
  source 1..20: mol_type = other DNA
ctcggctcactgcaacctcc

SEQ ID NO: 7134 - DNA, 20 bp, synthetic construct
  misc_feature 1..20: note = Description of Artificial Sequence: Synthetic oligonucleotide
  source 1..20: mol_type = other DNA
tcggctcactgcaacctcca

SEQ ID NO: 7135 - DNA, 20 bp, synthetic construct
  misc_feature 1..20: note = Description of Artificial Sequence: Synthetic oligonucleotide
  source 1..20: mol_type = other DNA
cggctcactgcaacctccac

SEQ ID NO: 7136 - DNA, 20 bp, synthetic construct
  misc_feature 1..20: note = Description of Artificial Sequence: Synthetic oligonucleotide
  source 1..20: mol_type = other DNA
ggctcactgcaacctccacc

SEQ ID NO: 7137 - DNA, 20 bp, synthetic construct
  misc_feature 1..20: note = Description of Artificial Sequence: Synthetic oligonucleotide
  source 1..20: mol_type = other DNA
gctcactgcaacctccacct

SEQ ID NO: 7138 - DNA, 20 bp, synthetic construct
  misc_feature 1..20: note = Description of Artificial Sequence: Synthetic oligonucleotide
  source 1..20: mol_type = other DNA
ctcactgcaacctccacctc

SEQ ID NO: 7139 - DNA, 20 bp, synthetic construct
  misc_feature 1..20: note = Description of Artificial Sequence: Synthetic oligonucleotide
  source 1..20: mol_type = other DNA
tcactgcaacctccacctcc

SEQ ID NO: 7140 - DNA, 20 bp, synthetic construct
  misc_feature 1..20: note = Description of Artificial Sequence: Synthetic oligonucleotide
  source 1..20: mol_type = other DNA
cactgcaacctccacctcct

SEQ ID NO: 7141 - DNA, 20 bp, synthetic construct
  misc_feature 1..20: note = Description of Artificial Sequence: Synthetic oligonucleotide
  source 1..20: mol_type = other DNA
actgcaacctccacctcctg

SEQ ID NO: 7142 - DNA, 20 bp, synthetic construct
  misc_feature 1..20: note = Description of Artificial Sequence: Synthetic oligonucleotide
  source 1..20: mol_type = other DNA
ctgcaacctccacctcctga

SEQ ID NO: 7143 - DNA, 20 bp, synthetic construct
  misc_feature 1..20: note = Description of Artificial Sequence: Synthetic oligonucleotide
  source 1..20: mol_type = other DNA
tgcaacctccacctcctgag

SEQ ID NO: 7144 - DNA, 20 bp, synthetic construct
  misc_feature 1..20: note = Description of Artificial Sequence: Synthetic oligonucleotide
  source 1..20: mol_type = other DNA
gcaacctccacctcctgagt

SEQ ID NO: 7145 - DNA, 20 bp, synthetic construct
  misc_feature 1..20: note = Description of Artificial Sequence: Synthetic oligonucleotide
  source 1..20: mol_type = other DNA
caacctccacctcctgagtt

SEQ ID NO: 7146 - DNA, 20 bp, synthetic construct
  misc_feature 1..20: note = Description of Artificial Sequence: Synthetic oligonucleotide
  source 1..20: mol_type = other DNA
aacctccacctcctgagttc

SEQ ID NO: 7147 - DNA, 20 bp, synthetic construct
  misc_feature 1..20: note = Description of Artificial Sequence: Synthetic oligonucleotide
  source 1..20: mol_type = other DNA
acctccacctcctgagttcc

SEQ ID NO: 7148 - DNA, 20 bp, synthetic construct
  misc_feature 1..20: note = Description of Artificial Sequence: Synthetic oligonucleotide
  source 1..20: mol_type = other DNA
cctccacctcctgagttcca

SEQ ID NO: 7149 - DNA, 20 bp, synthetic construct
  misc_feature 1..20: note = Description of Artificial Sequence: Synthetic oligonucleotide
  source 1..20: mol_type = other DNA
ctccacctcctgagttccag

SEQ ID NO: 7150 - DNA, 20 bp, synthetic construct
  misc_feature 1..20: note = Description of Artificial Sequence: Synthetic oligonucleotide
  source 1..20: mol_type = other DNA
tccacctcctgagttccagt

SEQ ID NO: 7151 - DNA, 20 bp, synthetic construct
  misc_feature 1..20: note = Description of Artificial Sequence: Synthetic oligonucleotide
  source 1..20: mol_type = other DNA
ccacctcctgagttccagtg

SEQ ID NO: 7152 - DNA, 20 bp, synthetic construct
  misc_feature 1..20: note = Description of Artificial Sequence: Synthetic oligonucleotide
  source 1..20: mol_type = other DNA
cacctcctgagttccagtga

SEQ ID NO: 7153 - DNA, 20 bp, synthetic construct
  misc_feature 1..20: note = Description of Artificial Sequence: Synthetic oligonucleotide
  source 1..20: mol_type = other DNA
acctcctgagttccagtgat

SEQ ID NO: 7154 - DNA, 20 bp, synthetic construct
  misc_feature 1..20: note = Description of Artificial Sequence: Synthetic oligonucleotide
  source 1..20: mol_type = other DNA
cctcctgagttccagtgatt

SEQ ID NO: 7155 - DNA, 20 bp, synthetic construct
  misc_feature 1..20: note = Description of Artificial Sequence: Synthetic oligonucleotide
  source 1..20: mol_type = other DNA
ctcctgagttccagtgattc

SEQ ID NO: 7156 - DNA, 20 bp, synthetic construct
  misc_feature 1..20: note = Description of Artificial Sequence: Synthetic oligonucleotide
  source 1..20: mol_type = other DNA
tcctgagttccagtgattct

SEQ ID NO: 7157 - DNA, 20 bp, synthetic construct
  misc_feature 1..20: note = Description of Artificial Sequence: Synthetic oligonucleotide
  source 1..20: mol_type = other DNA
cctgagttccagtgattctc

SEQ ID NO: 7158 - DNA, 20 bp, synthetic construct
  misc_feature 1..20: note = Description of Artificial Sequence: Synthetic oligonucleotide
  source 1..20: mol_type = other DNA
ctgagttccagtgattctcc

SEQ ID NO: 7159 - DNA, 20 bp, synthetic construct
  misc_feature 1..20: note = Description of Artificial Sequence: Synthetic oligonucleotide
  source 1..20: mol_type = other DNA
tgagttccagtgattctcct

SEQ ID NO: 7160 - DNA, 20 bp, synthetic construct
  misc_feature 1..20: note = Description of Artificial Sequence: Synthetic oligonucleotide
  source 1..20: mol_type = other DNA
gagttccagtgattctcctg

SEQ ID NO: 7161 - DNA, 20 bp, synthetic construct
  misc_feature 1..20: note = Description of Artificial Sequence: Synthetic oligonucleotide
  source 1..20: mol_type = other DNA
agttccagtgattctcctgc

SEQ ID NO: 7162 - DNA, 20 bp, synthetic construct
  misc_feature 1..20: note = Description of Artificial Sequence: Synthetic oligonucleotide
  source 1..20: mol_type = other DNA
gttccagtgattctcctgcc

SEQ ID NO: 7163 - DNA, 20 bp, synthetic construct
  misc_feature 1..20: note = Description of Artificial Sequence: Synthetic oligonucleotide
  source 1..20: mol_type = other DNA
ttccagtgattctcctgcct

SEQ ID NO: 7164 - DNA, 20 bp, synthetic construct
  misc_feature 1..20: note = Description of Artificial Sequence: Synthetic oligonucleotide
  source 1..20: mol_type = other DNA
tccagtgattctcctgcctt

SEQ ID NO: 7165 - DNA, 20 bp, synthetic construct
  misc_feature 1..20: note = Description of Artificial Sequence: Synthetic oligonucleotide
  source 1..20: mol_type = other DNA
ccagtgattctcctgccttc

SEQ ID NO: 7166 - DNA, 20 bp, synthetic construct
  misc_feature 1..20: note = Description of Artificial Sequence: Synthetic oligonucleotide
  source 1..20: mol_type = other DNA
cagtgattctcctgccttcc

SEQ ID NO: 7167 - DNA, 20 bp, synthetic construct
  misc_feature 1..20: note = Description of Artificial Sequence: Synthetic oligonucleotide
  source 1..20: mol_type = other DNA
agtgattctcctgccttcct

SEQ ID NO: 7168 - DNA, 20 bp, synthetic construct
  misc_feature 1..20: note = Description of Artificial Sequence: Synthetic oligonucleotide
  source 1..20: mol_type = other DNA
gtgattctcctgccttccta

SEQ ID NO: 7169 - DNA, 20 bp, synthetic construct
  misc_feature 1..20: note = Description of Artificial Sequence: Synthetic oligonucleotide
  source 1..20: mol_type = other DNA
tgattctcctgccttcctag

SEQ ID NO: 7170 - DNA, 20 bp, synthetic construct
  misc_feature 1..20: note = Description of Artificial Sequence: Synthetic oligonucleotide
  source 1..20: mol_type = other DNA
gattctcctgccttcctagt

SEQ ID NO: 7171 - DNA, 20 bp, synthetic construct
  misc_feature 1..20: note = Description of Artificial Sequence: Synthetic oligonucleotide
  source 1..20: mol_type = other DNA
attctcctgccttcctagta

SEQ ID NO: 7172 - DNA, 20 bp, synthetic construct
  misc_feature 1..20: note = Description of Artificial Sequence: Synthetic oligonucleotide
  source 1..20: mol_type = other DNA
ttctcctgccttcctagtag

SEQ ID NO: 7173 - DNA, 20 bp, synthetic construct
  misc_feature 1..20: note = Description of Artificial Sequence: Synthetic oligonucleotide
  source 1..20: mol_type = other DNA
tctcctgccttcctagtagc

SEQ ID NO: 7174 - DNA, 20 bp, synthetic construct
  misc_feature 1..20: note = Description of Artificial Sequence: Synthetic oligonucleotide
  source 1..20: mol_type = other DNA
ctcctgccttcctagtagct

SEQ ID NO: 7175 - DNA, 20 bp, synthetic construct
  misc_feature 1..20: note = Description of Artificial Sequence: Synthetic oligonucleotide
  source 1..20: mol_type = other DNA
tcctgccttcctagtagctg

SEQ ID NO: 7176 - DNA, 20 bp, synthetic construct
  misc_feature 1..20: note = Description of Artificial Sequence: Synthetic oligonucleotide
  source 1..20: mol_type = other DNA
cctgccttcctagtagctgg

SEQ ID NO: 7177 - DNA, 20 bp, synthetic construct
  misc_feature 1..20: note = Description of Artificial Sequence: Synthetic oligonucleotide
  source 1..20: mol_type = other DNA
ctgccttcctagtagctggg

SEQ ID NO: 7178 - DNA, 20 bp, synthetic construct
  misc_feature 1..20: note = Description of Artificial Sequence: Synthetic oligonucleotide
  source 1..20: mol_type = other DNA
tgccttcctagtagctggga

SEQ ID NO: 7179 - DNA, 20 bp, synthetic construct
  misc_feature 1..20: note = Description of Artificial Sequence: Synthetic oligonucleotide
  source 1..20: mol_type = other DNA
gccttcctagtagctgggac

SEQ ID NO: 7180 - DNA, 20 bp, synthetic construct
  misc_feature 1..20: note = Description of Artificial Sequence: Synthetic oligonucleotide
  source 1..20: mol_type = other DNA
ccttcctagtagctgggacc

SEQ ID NO: 7181 - DNA, 20 bp, synthetic construct
  misc_feature 1..20: note = Description of Artificial Sequence: Synthetic oligonucleotide
  source 1..20: mol_type = other DNA
cttcctagtagctgggacca

SEQ ID NO: 7182 - DNA, 20 bp, synthetic construct
  misc_feature 1..20: note = Description of Artificial Sequence: Synthetic oligonucleotide
  source 1..20: mol_type = other DNA
ttcctagtagctgggaccag

SEQ ID NO: 7183 - DNA, 20 bp, synthetic construct
  misc_feature 1..20: note = Description of Artificial Sequence: Synthetic oligonucleotide
  source 1..20: mol_type = other DNA
tcctagtagctgggaccaga

SEQ ID NO: 7184 - DNA, 20 bp, synthetic construct
  misc_feature 1..20: note = Description of Artificial Sequence: Synthetic oligonucleotide
  source 1..20: mol_type = other DNA
cctagtagctgggaccagag

SEQ ID NO: 7185 - DNA, 20 bp, synthetic construct
  misc_feature 1..20: note = Description of Artificial Sequence: Synthetic oligonucleotide
  source 1..20: mol_type = other DNA
ctagtagctgggaccagagt

SEQ ID NO: 7186 - DNA, 20 bp, synthetic construct
  misc_feature 1..20: note = Description of Artificial Sequence: Synthetic oligonucleotide
  source 1..20: mol_type = other DNA
tagtagctgggaccagagtg

SEQ ID NO: 7187 - DNA, 20 bp, synthetic construct
  misc_feature 1..20: note = Description of Artificial Sequence: Synthetic oligonucleotide
  source 1..20: mol_type = other DNA
agtagctgggaccagagtgc

SEQ ID NO: 7188 - DNA, 20 bp, synthetic construct
  misc_feature 1..20: note = Description of Artificial Sequence: Synthetic oligonucleotide
  source 1..20: mol_type = other DNA
gtagctgggaccagagtgcc

SEQ ID NO: 7189 - DNA, 20 bp, synthetic construct
  misc_feature 1..20: note = Description of Artificial Sequence: Synthetic oligonucleotide
  source 1..20: mol_type = other DNA
tagctgggaccagagtgcct

SEQ ID NO: 7190 - DNA, 20 bp, synthetic construct
  misc_feature 1..20: note = Description of Artificial Sequence: Synthetic oligonucleotide
  source 1..20: mol_type = other DNA
agctgggaccagagtgcctg

SEQ ID NO: 7191 - DNA, 20 bp, synthetic construct
  misc_feature 1..20: note = Description of Artificial Sequence: Synthetic oligonucleotide
  source 1..20: mol_type = other DNA
gctgggaccagagtgcctgt

SEQ ID NO: 7192 - DNA, 20 bp, synthetic construct
  misc_feature 1..20: note = Description of Artificial Sequence: Synthetic oligonucleotide
  source 1..20: mol_type = other DNA
ctgggaccagagtgcctgtc

SEQ ID NO: 7193 - DNA, 20 bp, synthetic construct
  misc_feature 1..20: note = Description of Artificial Sequence: Synthetic oligonucleotide
  source 1..20: mol_type = other DNA
tgggaccagagtgcctgtca

SEQ ID NO: 7194 - DNA, 20 bp, synthetic construct
  misc_feature 1..20: note = Description of Artificial Sequence: Synthetic oligonucleotide
  source 1..20: mol_type = other DNA
gggaccagagtgcctgtcac

SEQ ID NO: 7195 - DNA, 20 bp, synthetic construct
  misc_feature 1..20: note = Description of Artificial Sequence: Synthetic oligonucleotide
  source 1..20: mol_type = other DNA
ggaccagagtgcctgtcacc

SEQ ID NO: 7196 - DNA, 20 bp, synthetic construct
  misc_feature 1..20: note = Description of Artificial Sequence: Synthetic oligonucleotide
  source 1..20: mol_type = other DNA
gaccagagtgcctgtcacca

SEQ ID NO: 7197 - DNA, 20 bp, synthetic construct
  misc_feature 1..20: note = Description of Artificial Sequence: Synthetic oligonucleotide
  source 1..20: mol_type = other DNA
accagagtgcctgtcaccac

SEQ ID NO: 7198 - DNA, 20 bp, synthetic construct
  misc_feature 1..20: note = Description of Artificial Sequence: Synthetic oligonucleotide
  source 1..20: mol_type = other DNA
ccagagtgcctgtcaccaca

SEQ ID NO: 7199 - DNA, 20 bp, synthetic construct
  misc_feature 1..20: note = Description of Artificial Sequence: Synthetic oligonucleotide
  source 1..20: mol_type = other DNA
cagagtgcctgtcaccacac

SEQ ID NO: 7200 - DNA, 20 bp, synthetic construct
  misc_feature 1..20: note = Description of Artificial Sequence: Synthetic oligonucleotide
  source 1..20: mol_type = other DNA
agagtgcctgtcaccacact

SEQ ID NO: 7201 - DNA, 20 bp, synthetic construct
  misc_feature 1..20: note = Description of Artificial Sequence: Synthetic oligonucleotide
  source 1..20: mol_type = other DNA
gagtgcctgtcaccacactg

SEQ ID NO: 7202 - DNA, 20 bp, synthetic construct
  misc_feature 1..20: note = Description of Artificial Sequence: Synthetic oligonucleotide
  source 1..20: mol_type = other DNA
agtgcctgtcaccacactgg

SEQ ID NO: 7203 - DNA, 20 bp, synthetic construct
  misc_feature 1..20: note = Description of Artificial Sequence: Synthetic oligonucleotide
  source 1..20: mol_type = other DNA
gtgcctgtcaccacactggg

SEQ ID NO: 7204 - DNA, 20 bp, synthetic construct
  misc_feature 1..20: note = Description of Artificial Sequence: Synthetic oligonucleotide
  source 1..20: mol_type = other DNA
tgcctgtcaccacactgggc

SEQ ID NO: 7205 - DNA, 20 bp, synthetic construct
  misc_feature 1..20: note = Description of Artificial Sequence: Synthetic oligonucleotide
  source 1..20: mol_type = other DNA
gcctgtcaccacactgggct

SEQ ID NO: 7206 - DNA, 20 bp, synthetic construct
  misc_feature 1..20: note = Description of Artificial Sequence: Synthetic oligonucleotide
  source 1..20: mol_type = other DNA
cctgtcaccacactgggcta

SEQ ID NO: 7207 - DNA, 20 bp, synthetic construct
  misc_feature 1..20: note = Description of Artificial Sequence: Synthetic oligonucleotide
  source 1..20: mol_type = other DNA
ctgtcaccacactgggctaa

SEQ ID NO: 7208 - DNA, 20 bp, synthetic construct
  misc_feature 1..20: note = Description of Artificial Sequence: Synthetic oligonucleotide
  source 1..20: mol_type = other DNA
tgtcaccacactgggctaat

SEQ ID NO: 7209 - DNA, 20 bp, synthetic construct
  misc_feature 1..20: note = Description of Artificial Sequence: Synthetic oligonucleotide
  source 1..20: mol_type = other DNA
gtcaccacactgggctaatt

SEQ ID NO: 7210 - DNA, 20 bp, synthetic construct
  misc_feature 1..20: note = Description of Artificial Sequence: Synthetic oligonucleotide
  source 1..20: mol_type = other DNA
tcaccacactgggctaattt

SEQ ID NO: 7211 - DNA, 20 bp, synthetic construct
  misc_feature 1..20: note = Description of Artificial Sequence: Synthetic oligonucleotide
  source 1..20: mol_type = other DNA
caccacactgggctaatttt

SEQ ID NO: 7212 - DNA, 20 bp, synthetic construct
  misc_feature 1..20: note = Description of Artificial Sequence: Synthetic oligonucleotide
  source 1..20: mol_type = other DNA
accacactgggctaattttt

SEQ ID NO: 7213 - DNA, 20 bp, synthetic construct
  misc_feature 1..20: note = Description of Artificial Sequence: Synthetic oligonucleotide
  source 1..20: mol_type = other DNA
ccacactgggctaatttttg

SEQ ID NO: 7214 - DNA, 20 bp, synthetic construct
  misc_feature 1..20: note = Description of Artificial Sequence: Synthetic oligonucleotide
  source 1..20: mol_type = other DNA
cacactgggctaatttttgt

SEQ ID NO: 7215 - DNA, 20 bp, synthetic construct
  misc_feature 1..20: note = Description of Artificial Sequence: Synthetic oligonucleotide
  source 1..20: mol_type = other DNA
acactgggctaatttttgta

SEQ ID NO: 7216 - DNA, 20 bp, synthetic construct
  misc_feature 1..20: note = Description of Artificial Sequence: Synthetic oligonucleotide
  source 1..20: mol_type = other DNA
cactgggctaatttttgtat

SEQ ID NO: 7217 - DNA, 20 bp, synthetic construct
  misc_feature 1..20: note = Description of Artificial Sequence: Synthetic oligonucleotide
  source 1..20: mol_type = other DNA
actgggctaatttttgtatt

SEQ ID NO: 7218 - DNA, 20 bp, synthetic construct
  misc_feature 1..20: note = Description of Artificial Sequence: Synthetic oligonucleotide
  source 1..20: mol_type = other DNA
ctgggctaatttttgtattt

SEQ ID NO: 7219 - DNA, 20 bp, synthetic construct
  misc_feature 1..20: note = Description of Artificial Sequence: Synthetic oligonucleotide
  source 1..20: mol_type = other DNA
tgggctaatttttgtatttt

SEQ ID NO: 7220 - DNA, 20 bp, synthetic construct
  misc_feature 1..20: note = Description of Artificial Sequence: Synthetic oligonucleotide
  source 1..20: mol_type = other DNA
gggctaatttttgtattttt

SEQ ID NO: 7221 - DNA, 20 bp, synthetic construct
  misc_feature 1..20: note = Description of Artificial Sequence: Synthetic oligonucleotide
  source 1..20: mol_type = other DNA
ggctaatttttgtattttta

SEQ ID NO: 7222 - DNA, 20 bp, synthetic construct
  misc_feature 1..20: note = Description of Artificial Sequence: Synthetic oligonucleotide
  source 1..20: mol_type = other DNA
gctaatttttgtatttttag

SEQ ID NO: 7223 - DNA, 20 bp, synthetic construct
  misc_feature 1..20: note = Description of Artificial Sequence: Synthetic oligonucleotide
  source 1..20: mol_type = other DNA
ctaatttttgtatttttagt

SEQ ID NO: 7224 - DNA, 20 bp, synthetic construct
  misc_feature 1..20: note = Description of Artificial Sequence: Synthetic oligonucleotide
  source 1..20: mol_type = other DNA
taatttttgtatttttagta

SEQ ID NO: 7225 - DNA, 20 bp, synthetic construct
  misc_feature 1..20: note = Description of Artificial Sequence: Synthetic oligonucleotide
  source 1..20: mol_type = other DNA
aatttttgtatttttagtag

SEQ ID NO: 7226 - DNA, 20 bp, synthetic construct
  misc_feature 1..20: note = Description of Artificial Sequence: Synthetic oligonucleotide
  source 1..20: mol_type = other DNA
atttttgtatttttagtaga

SEQ ID NO: 7227 - DNA, 20 bp, synthetic construct
  misc_feature 1..20: note = Description of Artificial Sequence: Synthetic oligonucleotide
  source 1..20: mol_type = other DNA
tttttgtatttttagtagag

SEQ ID NO: 7228 - DNA, 20 bp, synthetic construct
  misc_feature 1..20: note = Description of Artificial Sequence: Synthetic oligonucleotide
  source 1..20: mol_type = other DNA
ttttgtatttttagtagaga

SEQ ID NO: 7229 - DNA, 20 bp, synthetic construct
  misc_feature 1..20: note = Description of Artificial Sequence: Synthetic oligonucleotide
  source 1..20: mol_type = other DNA
tttgtatttttagtagagac

SEQ ID NO: 7230 - DNA, 20 bp, synthetic construct
  misc_feature 1..20: note = Description of Artificial Sequence: Synthetic oligonucleotide
  source 1..20: mol_type = other DNA
ttgtatttttagtagagact

SEQ ID NO: 7231 - DNA, 20 bp, synthetic construct
  misc_feature 1..20: note = Description of Artificial Sequence: Synthetic oligonucleotide
  source 1..20: mol_type = other DNA
tgtatttttagtagagactg

SEQ ID NO: 7232 - DNA, 20 bp, synthetic construct
  misc_feature 1..20: note = Description of Artificial Sequence: Synthetic oligonucleotide
  source 1..20: mol_type = other DNA
gtatttttagtagagactgg

SEQ ID NO: 7233 - DNA, 20 bp, synthetic construct
  misc_feature 1..20: note = Description of Artificial Sequence: Synthetic oligonucleotide
  source 1..20: mol_type = other DNA
tatttttagtagagactggg

SEQ ID NO: 7234 - DNA, 20 bp, synthetic construct
  misc_feature 1..20: note = Description of Artificial Sequence: Synthetic oligonucleotide
  source 1..20: mol_type = other DNA
atttttagtagagactgggt

SEQ ID NO: 7235 - DNA, 20 bp, synthetic construct
  misc_feature 1..20: note = Description of Artificial Sequence: Synthetic oligonucleotide
  source 1..20: mol_type = other DNA
tttttagtagagactgggtt

SEQ ID NO: 7236 - DNA, 20 bp, synthetic construct
  misc_feature 1..20: note = Description of Artificial Sequence: Synthetic oligonucleotide
  source 1..20: mol_type = other DNA
ttttagtagagactgggttt

SEQ ID NO: 7237 - DNA, 20 bp, synthetic construct
  misc_feature 1..20: note = Description of Artificial Sequence: Synthetic oligonucleotide
  source 1..20: mol_type = other DNA
tttagtagagactgggtttc

SEQ ID NO: 7238 - DNA, 20 bp, synthetic construct
  misc_feature 1..20: note = Description of Artificial Sequence: Synthetic oligonucleotide
  source 1..20: mol_type = other DNA
ttagtagagactgggtttca

SEQ ID NO: 7239 - DNA, 20 bp, synthetic construct
  misc_feature 1..20: note = Description of Artificial Sequence: Synthetic oligonucleotide
  source 1..20: mol_type = other DNA
tagtagagactgggtttcag

SEQ ID NO: 7240 - DNA, 20 bp, synthetic construct
  misc_feature 1..20: note = Description of Artificial Sequence: Synthetic oligonucleotide
  source 1..20: mol_type = other DNA
agtagagactgggtttcagc

SEQ ID NO: 7241 - DNA, 20 bp, synthetic construct
  misc_feature 1..20: note = Description of Artificial Sequence: Synthetic oligonucleotide
  source 1..20: mol_type = other DNA
gtagagactgggtttcagca

SEQ ID NO: 7242 - DNA, 20 bp, synthetic construct
  misc_feature 1..20: note = Description of Artificial Sequence: Synthetic oligonucleotide
  source 1..20: mol_type = other DNA
tagagactgggtttcagcat

SEQ ID NO: 7243 - DNA, 20 bp, synthetic construct
  misc_feature 1..20: note = Description of Artificial Sequence: Synthetic oligonucleotide
  source 1..20: mol_type = other DNA
agagactgggtttcagcatg

SEQ ID NO: 7244 - DNA, 20 bp, synthetic construct
  misc_feature 1..20: note = Description of Artificial Sequence: Synthetic oligonucleotide
  source 1..20: mol_type = other DNA
gagactgggtttcagcatgt

SEQ ID NO: 7245 - DNA, 20 bp, synthetic construct
  misc_feature 1..20: note = Description of Artificial Sequence: Synthetic oligonucleotide
  source 1..20: mol_type = other DNA
agactgggtttcagcatgtt

SEQ ID NO: 7246 - DNA, 20 bp, synthetic construct
  misc_feature 1..20: note = Description of Artificial Sequence: Synthetic oligonucleotide
  source 1..20: mol_type = other DNA
gactgggtttcagcatgttg

SEQ ID NO: 7247 - DNA, 20 bp, synthetic construct
  misc_feature 1..20: note = Description of Artificial Sequence: Synthetic oligonucleotide
  source 1..20: mol_type = other DNA
actgggtttcagcatgttgg

SEQ ID NO: 7248 - DNA, 20 bp, synthetic construct
  misc_feature 1..20: note = Description of Artificial Sequence: Synthetic oligonucleotide
  source 1..20: mol_type = other DNA
ctgggtttcagcatgttggc

SEQ ID NO: 7249 - DNA, 20 bp, synthetic construct
  misc_feature 1..20: note = Description of Artificial Sequence: Synthetic oligonucleotide
  source 1..20: mol_type = other DNA
tgggtttcagcatgttggcc

SEQ ID NO: 7250 - DNA, 20 bp, synthetic construct
  misc_feature 1..20: note = Description of Artificial Sequence: Synthetic oligonucleotide
  source 1..20: mol_type = other DNA
gggtttcagcatgttggcca

SEQ ID NO: 7251 - DNA, 20 bp, synthetic construct
  misc_feature 1..20: note = Description of Artificial Sequence: Synthetic oligonucleotide
  source 1..20: mol_type = other DNA
ggtttcagcatgttggccag

SEQ ID NO: 7252 - DNA, 20 bp, synthetic construct
  misc_feature 1..20: note = Description of Artificial Sequence: Synthetic oligonucleotide
  source 1..20: mol_type = other DNA
gtttcagcatgttggccagg

SEQ ID NO: 7253 - DNA, 20 bp, synthetic construct
  misc_feature 1..20: note = Description of Artificial Sequence: Synthetic oligonucleotide
  source 1..20: mol_type = other DNA
tttcagcatgttggccaggc

SEQ ID NO: 7254 - DNA, 20 bp, synthetic construct
  misc_feature 1..20: note = Description of Artificial Sequence: Synthetic oligonucleotide
  source 1..20: mol_type = other DNA
ttcagcatgttggccaggct

SEQ ID NO: 7255 - DNA, 20 bp, synthetic construct
  misc_feature 1..20: note = Description of Artificial Sequence: Synthetic oligonucleotide
  source 1..20: mol_type = other DNA
tcagcatgttggccaggctg

SEQ ID NO: 7256 - DNA, 20 bp, synthetic construct
  misc_feature 1..20: note = Description of Artificial Sequence: Synthetic oligonucleotide
  source 1..20: mol_type = other DNA
cagcatgttggccaggctgg

SEQ ID NO: 7257 - DNA, 20 bp, synthetic construct
  misc_feature 1..20: note = Description of Artificial Sequence: Synthetic oligonucleotide
  source 1..20: mol_type = other DNA
agcatgttggccaggctggt

SEQ ID NO: 7258 - DNA, 20 bp, synthetic construct
  misc_feature 1..20: note = Description of Artificial Sequence: Synthetic oligonucleotide
  source 1..20: mol_type = other DNA
gcatgttggccaggctggtc

SEQ ID NO: 7259 - DNA, 20 bp, synthetic construct
  misc_feature 1..20: note = Description of Artificial Sequence: Synthetic oligonucleotide
  source 1..20: mol_type = other DNA
catgttggccaggctggtct

SEQ ID NO: 7260 - DNA, 20 bp, synthetic construct
  misc_feature 1..20: note = Description of Artificial Sequence: Synthetic oligonucleotide
  source 1..20: mol_type = other DNA
atgttggccaggctggtctc

SEQ ID NO: 7261 - DNA, 20 bp, synthetic construct
  misc_feature 1..20: note = Description of Artificial Sequence: Synthetic oligonucleotide
  source 1..20: mol_type = other DNA
tgttggccaggctggtctca

SEQ ID NO: 7262 - DNA, 20 bp, synthetic construct
  misc_feature 1..20: note = Description of Artificial Sequence: Synthetic oligonucleotide
  source 1..20: mol_type = other DNA
gttggccaggctggtctcaa

SEQ ID NO: 7263 - DNA, 20 bp, synthetic construct
  misc_feature 1..20: note = Description of Artificial Sequence: Synthetic oligonucleotide
  source 1..20: mol_type = other DNA
ttggccaggctggtctcaaa

SEQ ID NO: 7264 - DNA, 20 bp, synthetic construct
  misc_feature 1..20: note = Description of Artificial Sequence: Synthetic oligonucleotide
  source 1..20: mol_type = other DNA
tggccaggctggtctcaaag

SEQ ID NO: 7265 - DNA, 20 bp, synthetic construct
  misc_feature 1..20: note = Description of Artificial Sequence: Synthetic oligonucleotide
  source 1..20: mol_type = other DNA
ggccaggctggtctcaaagt

SEQ ID NO: 7266 - DNA, 20 bp, synthetic construct
  misc_feature 1..20: note = Description of Artificial Sequence: Synthetic oligonucleotide
  source 1..20: mol_type = other DNA
gccaggctggtctcaaagtc

SEQ ID NO: 7267 - DNA, 20 bp, synthetic construct
  misc_feature 1..20: note = Description of Artificial Sequence: Synthetic oligonucleotide
  source 1..20: mol_type = other DNA
ccaggctggtctcaaagtcc

SEQ ID NO: 7268 - DNA, 20 bp, synthetic construct
  misc_feature 1..20: note = Description of Artificial Sequence: Synthetic oligonucleotide
  source 1..20: mol_type = other DNA
caggctggtctcaaagtcct

SEQ ID NO: 7269 - DNA, 20 bp, synthetic construct
  misc_feature 1..20: note = Description of Artificial Sequence: Synthetic oligonucleotide
  source 1..20: mol_type = other DNA
aggctggtctcaaagtcctg

SEQ ID NO: 7270 - DNA, 20 bp, synthetic construct
  misc_feature 1..20: note = Description of Artificial Sequence: Synthetic oligonucleotide
  source 1..20: mol_type = other DNA
ggctggtctcaaagtcctga

SEQ ID NO: 7271 - DNA, 20 bp, synthetic construct
  misc_feature 1..20: note = Description of Artificial Sequence: Synthetic oligonucleotide
  source 1..20: mol_type = other DNA
gctggtctcaaagtcctgac

SEQ ID NO: 7272 - DNA, 20 bp, synthetic construct
  misc_feature 1..20: note = Description of Artificial Sequence: Synthetic oligonucleotide
  source 1..20: mol_type = other DNA
ctggtctcaaagtcctgacc

SEQ ID NO: 7273 - DNA, 20 bp, synthetic construct
  misc_feature 1..20: note = Description of Artificial Sequence: Synthetic oligonucleotide
  source 1..20: mol_type = other DNA
tggtctcaaagtcctgacct

SEQ ID NO: 7274 - DNA, 20 bp, synthetic construct
  misc_feature 1..20: note = Description of Artificial Sequence: Synthetic oligonucleotide
  source 1..20: mol_type = other DNA
ggtctcaaagtcctgacctc

SEQ ID NO: 7275 - DNA, 20 bp, synthetic construct
  misc_feature 1..20: note = Description of Artificial Sequence: Synthetic oligonucleotide
  source 1..20: mol_type = other DNA
gtctcaaagtcctgacctca

SEQ ID NO: 7276 - DNA, 20 bp, synthetic construct
  misc_feature 1..20: note = Description of Artificial Sequence: Synthetic oligonucleotide
  source 1..20: mol_type = other DNA
tctcaaagtcctgacctcag

SEQ ID NO: 7277 - DNA, 20 bp, synthetic construct
  misc_feature 1..20: note = Description of Artificial Sequence: Synthetic oligonucleotide
  source 1..20: mol_type = other DNA
ctcaaagtcctgacctcagg

SEQ ID NO: 7278 - DNA, 20 bp, synthetic construct
  misc_feature 1..20: note = Description of Artificial Sequence: Synthetic oligonucleotide
  source 1..20: mol_type = other DNA
tcaaagtcctgacctcaggt

SEQ ID NO: 7279 - DNA, 20 bp, synthetic construct
  misc_feature 1..20: note = Description of Artificial Sequence: Synthetic oligonucleotide
  source 1..20: mol_type = other DNA
caaagtcctgacctcaggtg

SEQ ID NO: 7280 - DNA, 20 bp, synthetic construct
  misc_feature 1..20: note = Description of Artificial Sequence: Synthetic oligonucleotide
  source 1..20: mol_type = other DNA
aaagtcctgacctcaggtga

SEQ ID NO: 7281 - DNA, 20 bp, synthetic construct
  misc_feature 1..20: note = Description of Artificial Sequence: Synthetic oligonucleotide
  source 1..20: mol_type = other DNA
aagtcctgacctcaggtgat

SEQ ID NO: 7282 - DNA, 20 bp, synthetic construct
  misc_feature 1..20: note = Description of Artificial Sequence: Synthetic oligonucleotide
  source 1..20: mol_type = other DNA
agtcctgacctcaggtgatt

SEQ ID NO: 7283 - DNA, 20 bp, synthetic construct
  misc_feature 1..20: note = Description of Artificial Sequence: Synthetic oligonucleotide
  source 1..20: mol_type = other DNA
gtcctgacctcaggtgattg

SEQ ID NO: 7284 - DNA, 20 bp, synthetic construct
  misc_feature 1..20: note = Description of Artificial Sequence: Synthetic oligonucleotide
  source 1..20: mol_type = other DNA
tcctgacctcaggtgattgt

SEQ ID NO: 7285 - DNA, 20 bp, synthetic construct
  misc_feature 1..20: note = Description of Artificial Sequence: Synthetic oligonucleotide
  source 1..20: mol_type = other DNA
cctgacctcaggtgattgtt

SEQ ID NO: 7286 - DNA, 20 bp, synthetic construct
  misc_feature 1..20: note = Description of Artificial Sequence: Synthetic oligonucleotide
  source 1..20: mol_type = other DNA
ctgacctcaggtgattgttc

SEQ ID NO: 7287 - DNA, 20 bp, synthetic construct
  misc_feature 1..20: note = Description of Artificial Sequence: Synthetic oligonucleotide
  source 1..20: mol_type = other DNA
tgacctcaggtgattgttcc

SEQ ID NO: 7288 - DNA, 20 bp, synthetic construct
  misc_feature 1..20: note = Description of Artificial Sequence: Synthetic oligonucleotide
  source 1..20: mol_type = other DNA
gacctcaggtgattgttccg

SEQ ID NO: 7289 - DNA, 20 bp, synthetic construct
  misc_feature 1..20: note = Description of Artificial Sequence: Synthetic oligonucleotide
  source 1..20: mol_type = other DNA
acctcaggtgattgttccgc

SEQ ID NO: 7290 - DNA, 20 bp, synthetic construct
  misc_feature 1..20: note = Description of Artificial Sequence: Synthetic oligonucleotide
  source 1..20: mol_type = other DNA
cctcaggtgattgttccgcc

SEQ ID NO: 7291 - DNA, 20 bp, synthetic construct
  misc_feature 1..20: note = Description of Artificial Sequence: Synthetic oligonucleotide
  source 1..20: mol_type = other DNA
ctcaggtgattgttccgccc

SEQ ID NO: 7292 - DNA, 20 bp, synthetic construct
  misc_feature 1..20: note = Description of Artificial Sequence: Synthetic oligonucleotide
  source 1..20: mol_type = other DNA
tcaggtgattgttccgccca

SEQ ID NO: 7293 - DNA, 20 bp, synthetic construct
  misc_feature 1..20: note = Description of Artificial Sequence: Synthetic oligonucleotide
  source 1..20: mol_type = other DNA
caggtgattgttccgcccac

SEQ ID NO: 7294 - DNA, 20 bp, synthetic construct
  misc_feature 1..20: note = Description of Artificial Sequence: Synthetic oligonucleotide
  source 1..20: mol_type = other DNA
aggtgattgttccgcccacc

SEQ ID NO: 7295 - DNA, 20 bp, synthetic construct
  misc_feature 1..20: note = Description of Artificial Sequence: Synthetic oligonucleotide
  source 1..20: mol_type = other DNA
ggtgattgttccgcccacct

SEQ ID NO: 7296 - DNA, 20 bp, synthetic construct
  misc_feature 1..20: note = Description of Artificial Sequence: Synthetic oligonucleotide
  source 1..20: mol_type = other DNA
gtgattgttccgcccacctc

SEQ ID NO: 7297 - DNA, 20 bp, synthetic construct
  misc_feature 1..20: note = Description of Artificial Sequence: Synthetic oligonucleotide
  source 1..20: mol_type = other DNA
tgattgttccgcccacctca

SEQ ID NO: 7298 - DNA, 20 bp, synthetic construct
  misc_feature 1..20: note = Description of Artificial Sequence: Synthetic oligonucleotide
  source 1..20: mol_type = other DNA
gattgttccgcccacctcac

SEQ ID NO: 7299 - DNA, 20 bp, synthetic construct
  misc_feature 1..20: note = Description of Artificial Sequence: Synthetic oligonucleotide
  source 1..20: mol_type = other DNA
attgttccgcccacctcacc

SEQ ID NO: 7300 - DNA, 20 bp, synthetic construct
  misc_feature 1..20: note = Description of Artificial Sequence: Synthetic oligonucleotide
  source 1..20: mol_type = other DNA
ttgttccgcccacctcacct

SEQ ID NO: 7301 - DNA, 20 bp, synthetic construct
  misc_feature 1..20: note = Description of Artificial Sequence: Synthetic oligonucleotide
  source 1..20: mol_type = other DNA
tgttccgcccacctcacctc

SEQ ID NO: 7302 - DNA, 20 bp, synthetic construct
  misc_feature 1..20: note = Description of Artificial Sequence: Synthetic oligonucleotide
  source 1..20: mol_type = other DNA
gttccgcccacctcacctcc

SEQ ID NO: 7303 - DNA, 20 bp, synthetic construct
  misc_feature 1..20: note = Description of Artificial Sequence: Synthetic oligonucleotide
  source 1..20: mol_type = other DNA
ttccgcccacctcacctccc

SEQ ID NO: 7304 - DNA, 20 bp, synthetic construct
  misc_feature 1..20: note = Description of Artificial Sequence: Synthetic oligonucleotide
  source 1..20: mol_type = other DNA
tccgcccacctcacctccca

SEQ ID NO: 7305 - DNA, 20 bp, synthetic construct
  misc_feature 1..20: note = Description of Artificial Sequence: Synthetic oligonucleotide
  source 1..20: mol_type = other DNA
ccgcccacctcacctcccaa

SEQ ID NO: 7306 - DNA, 20 bp, synthetic construct
  misc_feature 1..20: note = Description of Artificial Sequence: Synthetic oligonucleotide
  source 1..20: mol_type = other DNA
cgcccacctcacctcccaaa

SEQ ID NO: 7307 - DNA, 20 bp, synthetic construct
  misc_feature 1..20: note = Description of Artificial Sequence: Synthetic oligonucleotide
  source 1..20: mol_type = other DNA
gcccacctcacctcccaaaa

SEQ ID NO: 7308 - DNA, 20 bp, synthetic construct
  misc_feature 1..20: note = Description of Artificial Sequence: Synthetic oligonucleotide
  source 1..20: mol_type = other DNA
cccacctcacctcccaaaaa

SEQ ID NO: 7309 - DNA, 20 bp, synthetic construct
  misc_feature 1..20: note = Description of Artificial Sequence: Synthetic oligonucleotide
  source 1..20: mol_type = other DNA
ccacctcacctcccaaaaaa

SEQ ID NO: 7310 - DNA, 20 bp, synthetic construct
  misc_feature 1..20: note = Description of Artificial Sequence: Synthetic oligonucleotide
  source 1..20: mol_type = other DNA
cacctcacctcccaaaaaac

SEQ ID NO: 7311 - DNA, 20 bp, synthetic construct
  misc_feature 1..20: note = Description of Artificial Sequence: Synthetic oligonucleotide
  source 1..20: mol_type = other DNA
acctcacctcccaaaaaact

SEQ ID NO: 7312 - DNA, 20 bp, synthetic construct
  misc_feature 1..20: note = Description of Artificial Sequence: Synthetic oligonucleotide
  source 1..20: mol_type = other DNA
cctcacctcccaaaaaactt

SEQ ID NO: 7313 - DNA, 20 bp, synthetic construct
  misc_feature 1..20: note = Description of Artificial Sequence: Synthetic oligonucleotide
  source 1..20: mol_type = other DNA
ctcacctcccaaaaaacttg

SEQ ID NO: 7314 - DNA, 20 bp, synthetic construct
  misc_feature 1..20: note = Description of Artificial Sequence: Synthetic oligonucleotide
  source 1..20: mol_type = other DNA
tcacctcccaaaaaacttgg

SEQ ID NO: 7315 - DNA, 20 bp, synthetic construct
  misc_feature 1..20: note = Description of Artificial Sequence: Synthetic oligonucleotide
  source 1..20: mol_type = other DNA
cacctcccaaaaaacttggg

SEQ ID NO: 7316 - DNA, 20 bp, synthetic construct
  misc_feature 1..20: note = Description of Artificial Sequence: Synthetic oligonucleotide
  source 1..20: mol_type = other DNA
acctcccaaaaaacttggga

SEQ ID NO: 7317 - DNA, 20 bp, synthetic construct
  misc_feature 1..20: note = Description of Artificial Sequence: Synthetic oligonucleotide
  source 1..20: mol_type = other DNA
cctcccaaaaaacttgggat

SEQ ID NO: 7318 - DNA, 20 bp, synthetic construct
  misc_feature 1..20: note = Description of Artificial Sequence: Synthetic oligonucleotide
  source 1..20: mol_type = other DNA
ctcccaaaaaacttgggatt

SEQ ID NO: 7319 - DNA, 20 bp, synthetic construct
  misc_feature 1..20: note = Description of Artificial Sequence: Synthetic oligonucleotide
  source 1..20: mol_type = other DNA
tcccaaaaaacttgggatta

SEQ ID NO: 7320 - DNA, 20 bp, synthetic construct
  misc_feature 1..20: note = Description of Artificial Sequence: Synthetic oligonucleotide
  source 1..20: mol_type = other DNA
cccaaaaaacttgggattac

SEQ ID NO: 7321 - DNA, 20 bp, synthetic construct
  misc_feature 1..20: note = Description of Artificial Sequence: Synthetic oligonucleotide
  source 1..20: mol_type = other DNA
ccaaaaaacttgggattaca

SEQ ID NO: 7322 - DNA, 20 bp, synthetic construct
  misc_feature 1..20: note = Description of Artificial Sequence: Synthetic oligonucleotide
  source 1..20: mol_type = other DNA
caaaaaacttgggattacag

SEQ ID NO: 7323 - DNA, 20 bp, synthetic construct
  misc_feature 1..20: note = Description of Artificial Sequence: Synthetic oligonucleotide
  source 1..20: mol_type = other DNA
aaaaaacttgggattacagg

SEQ ID NO: 7324 - DNA, 20 bp, synthetic construct
  misc_feature 1..20: note = Description of Artificial Sequence: Synthetic oligonucleotide
  source 1..20: mol_type = other DNA
aaaaacttgggattacaggt

SEQ ID NO: 7325 - DNA, 20 bp, synthetic construct
  misc_feature 1..20: note = Description of Artificial Sequence: Synthetic oligonucleotide
  source 1..20: mol_type = other DNA
aaaacttgggattacaggtg

SEQ ID NO: 7326 - DNA, 20 bp, synthetic construct
  misc_feature 1..20: note = Description of Artificial Sequence: Synthetic oligonucleotide
  source 1..20: mol_type = other DNA
aaacttgggattacaggtgt

SEQ ID NO: 7327 - DNA, 20 bp, synthetic construct
  misc_feature 1..20: note = Description of Artificial Sequence: Synthetic oligonucleotide
  source 1..20: mol_type = other DNA
aacttgggattacaggtgtg

SEQ ID NO: 7328 - DNA, 20 bp, synthetic construct
  misc_feature 1..20: note = Description of Artificial Sequence: Synthetic oligonucleotide
  source 1..20: mol_type = other DNA
acttgggattacaggtgtga

SEQ ID NO: 7329 - DNA, 20 bp, synthetic construct
  misc_feature 1..20: note = Description of Artificial Sequence: Synthetic oligonucleotide
  source 1..20: mol_type = other DNA
cttgggattacaggtgtgag

SEQ ID NO: 7330 - DNA, 20 bp, synthetic construct
  misc_feature 1..20: note = Description of Artificial Sequence: Synthetic oligonucleotide
  source 1..20: mol_type = other DNA
ttgggattacaggtgtgagc

SEQ ID NO: 7331 - DNA, 20 bp, synthetic construct
  misc_feature 1..20: note = Description of Artificial Sequence: Synthetic oligonucleotide
  source 1..20: mol_type = other DNA
tgggattacaggtgtgagcc

SEQ ID NO: 7332 - DNA, 20 bp, synthetic construct
  misc_feature 1..20: note = Description of Artificial Sequence: Synthetic oligonucleotide
  source 1..20: mol_type = other DNA
gggattacaggtgtgagcca

SEQ ID NO: 7333 - DNA, 20 bp, synthetic construct
  misc_feature 1..20: note = Description of Artificial Sequence: Synthetic oligonucleotide
  source 1..20: mol_type = other DNA
ggattacaggtgtgagccac

SEQ ID NO: 7334 - DNA, 20 bp, synthetic construct
  misc_feature 1..20: note = Description of Artificial Sequence: Synthetic oligonucleotide
  source 1..20: mol_type = other DNA
gattacaggtgtgagccacc

SEQ ID NO: 7335 - DNA, 20 bp, synthetic construct
  misc_feature 1..20: note = Description of Artificial Sequence: Synthetic oligonucleotide
  source 1..20: mol_type = other DNA
attacaggtgtgagccacca

SEQ ID NO: 7336 - DNA, 20 bp, synthetic construct
  misc_feature 1..20: note = Description of Artificial Sequence: Synthetic oligonucleotide
  source 1..20: mol_type = other DNA
ttacaggtgtgagccaccat

SEQ ID NO: 7337 - DNA, 20 bp, synthetic construct
  misc_feature 1..20: note = Description of Artificial Sequence: Synthetic oligonucleotide
  source 1..20: mol_type = other DNA
tacaggtgtgagccaccatg

SEQ ID NO: 7338 - DNA, 20 bp, synthetic construct
  misc_feature 1..20: note = Description of Artificial Sequence: Synthetic oligonucleotide
  source 1..20: mol_type = other DNA
acaggtgtgagccaccatgc

SEQ ID NO: 7339 - DNA, 20 bp, synthetic construct
  misc_feature 1..20: note = Description of Artificial Sequence: Synthetic oligonucleotide
  source 1..20: mol_type = other DNA
caggtgtgagccaccatgcc

SEQ ID NO: 7340 - DNA, 20 bp, synthetic construct
  misc_feature 1..20: note = Description of Artificial Sequence: Synthetic oligonucleotide
  source 1..20: mol_type = other DNA
aggtgtgagccaccatgcct

SEQ ID NO: 7341 - DNA, 20 bp, synthetic construct
  misc_feature 1..20: note = Description of Artificial Sequence: Synthetic oligonucleotide
  source 1..20: mol_type = other DNA
ggtgtgagccaccatgcctg

SEQ ID NO: 7342 - DNA, 20 bp, synthetic construct
  misc_feature 1..20: note = Description of Artificial Sequence: Synthetic oligonucleotide
  source 1..20: mol_type = other DNA
gtgtgagccaccatgcctgg

SEQ ID NO: 7343 - DNA, 20 bp, synthetic construct
  misc_feature 1..20: note = Description of Artificial Sequence: Synthetic oligonucleotide
  source 1..20: mol_type = other DNA
tgtgagccaccatgcctggg

SEQ ID NO: 7344 - DNA, 20 bp, synthetic construct
  misc_feature 1..20: note = Description of Artificial Sequence: Synthetic oligonucleotide
  source 1..20: mol_type = other DNA
gtgagccaccatgcctgggt

SEQ ID NO: 7345 - DNA, 20 bp, synthetic construct
  misc_feature 1..20: note = Description of Artificial Sequence: Synthetic oligonucleotide
  source 1..20: mol_type = other DNA
tgagccaccatgcctgggtg

SEQ ID NO: 7346 - DNA, 20 bp, synthetic construct
  misc_feature 1..20: note = Description of Artificial Sequence: Synthetic oligonucleotide
  source 1..20: mol_type = other DNA
gagccaccatgcctgggtga

SEQ ID NO: 7347 - DNA, 20 bp, synthetic construct
  misc_feature 1..20: note = Description of Artificial Sequence: Synthetic oligonucleotide
  source 1..20: mol_type = other DNA
agccaccatgcctgggtgaa

SEQ ID NO: 7348 - DNA, 20 bp, synthetic construct
  misc_feature 1..20: note = Description of Artificial Sequence: Synthetic oligonucleotide
  source 1..20: mol_type = other DNA
gccaccatgcctgggtgaaa

SEQ ID NO: 7349 - DNA, 20 bp, synthetic construct
  misc_feature 1..20: note = Description of Artificial Sequence: Synthetic oligonucleotide
  source 1..20: mol_type = other DNA
ccaccatgcctgggtgaaaa

SEQ ID NO: 7350 - DNA, 20 bp, synthetic construct
  misc_feature 1..20: note = Description of Artificial Sequence: Synthetic oligonucleotide
  source 1..20: mol_type = other DNA
caccatgcctgggtgaaaat

SEQ ID NO: 7351 - DNA, 20 bp, synthetic construct
  misc_feature 1..20: note = Description of Artificial Sequence: Synthetic oligonucleotide
  source 1..20: mol_type = other DNA
accatgcctgggtgaaaatc

SEQ ID NO: 7352 - DNA, 20 bp, synthetic construct
  misc_feature 1..20: note = Description of Artificial Sequence: Synthetic oligonucleotide
  source 1..20: mol_type = other DNA
ccatgcctgggtgaaaatcc

SEQ ID NO: 7353 - DNA, 20 bp, synthetic construct
  misc_feature 1..20: note = Description of Artificial Sequence: Synthetic oligonucleotide
  source 1..20: mol_type = other DNA
catgcctgggtgaaaatcca

SEQ ID NO: 7354 - DNA, 20 bp, synthetic construct
  misc_feature 1..20: note = Description of Artificial Sequence: Synthetic oligonucleotide
  source 1..20: mol_type = other DNA
atgcctgggtgaaaatccag

SEQ ID NO: 7355 - DNA, 20 bp, synthetic construct
  misc_feature 1..20: note = Description of Artificial Sequence: Synthetic oligonucleotide
  source 1..20: mol_type = other DNA
tgcctgggtgaaaatccaga

SEQ ID NO: 7356 - DNA, 20 bp, synthetic construct
  misc_feature 1..20: note = Description of Artificial Sequence: Synthetic oligonucleotide
  source 1..20: mol_type = other DNA
gcctgggtgaaaatccagat

SEQ ID NO: 7357 - DNA, 20 bp, synthetic construct
  misc_feature 1..20: note = Description of Artificial Sequence: Synthetic oligonucleotide
  source 1..20: mol_type = other DNA
cctgggtgaaaatccagata

SEQ ID NO: 7358 - DNA, 20 bp, synthetic construct
  misc_feature 1..20: note = Description of Artificial Sequence: Synthetic oligonucleotide
  source 1..20: mol_type = other DNA
ctgggtgaaaatccagataa

SEQ ID NO: 7359 - DNA, 20 bp, synthetic construct
  misc_feature 1..20: note = Description of Artificial Sequence: Synthetic oligonucleotide
  source 1..20: mol_type = other DNA
tgggtgaaaatccagataat

SEQ ID NO: 7360 - DNA, 20 bp, synthetic construct
  misc_feature 1..20: note = Description of Artificial Sequence: Synthetic oligonucleotide
  source 1..20: mol_type = other DNA
gggtgaaaatccagataatt

SEQ ID NO: 7361 - DNA, 20 bp, synthetic construct
  misc_feature 1..20: note = Description of Artificial Sequence: Synthetic oligonucleotide
  source 1..20: mol_type = other DNA
ggtgaaaatccagataattt

SEQ ID NO: 7362 - DNA, 20 bp, synthetic construct
  misc_feature 1..20: note = Description of Artificial Sequence: Synthetic oligonucleotide
  source 1..20: mol_type = other DNA
gtgaaaatccagataatttg

SEQ ID NO: 7363 - DNA, 20 bp, synthetic construct
  misc_feature 1..20: note = Description of Artificial Sequence: Synthetic oligonucleotide
  source 1..20: mol_type = other DNA
tgaaaatccagataatttga

SEQ ID NO: 7364 - DNA, 20 bp, synthetic construct
  misc_feature 1..20: note = Description of Artificial Sequence: Synthetic oligonucleotide
  source 1..20: mol_type = other DNA
gaaaatccagataatttgat

SEQ ID NO: 7365 - DNA, 20 bp, synthetic construct
  misc_feature 1..20: note = Description of Artificial Sequence: Synthetic oligonucleotide
  source 1..20: mol_type = other DNA
aaaatccagataatttgatg

SEQ ID NO: 7366 - DNA, 20 bp, synthetic construct
  misc_feature 1..20: note = Description of Artificial Sequence: Synthetic oligonucleotide
  source 1..20: mol_type = other DNA
aaatccagataatttgatgc

SEQ ID NO: 7367 - DNA, 20 bp, synthetic construct
  misc_feature 1..20: note = Description of Artificial Sequence: Synthetic oligonucleotide
  source 1..20: mol_type = other DNA
aatccagataatttgatgct

SEQ ID NO: 7368 - DNA, 20 bp, synthetic construct
  misc_feature 1..20: note = Description of Artificial Sequence: Synthetic oligonucleotide
  source 1..20: mol_type = other DNA
atccagataatttgatgctg

SEQ ID NO: 7369 - DNA, 20 bp, synthetic construct
  misc_feature 1..20: note = Description of Artificial Sequence: Synthetic oligonucleotide
  source 1..20: mol_type = other DNA
tccagataatttgatgctgc

SEQ ID NO: 7370 - DNA, 20 bp, synthetic construct
  misc_feature 1..20: note = Description of Artificial Sequence: Synthetic oligonucleotide
  source 1..20: mol_type = other DNA
ccagataatttgatgctgcc

SEQ ID NO: 7371 - DNA, 20 bp, synthetic construct
  misc_feature 1..20: note = Description of Artificial Sequence: Synthetic oligonucleotide
  source 1..20: mol_type = other DNA
cagataatttgatgctgcct

SEQ ID NO: 7372 - DNA, 20 bp, synthetic construct
  misc_feature 1..20: note = Description of Artificial Sequence: Synthetic oligonucleotide
  source 1..20: mol_type = other DNA
agataatttgatgctgcctt

SEQ ID NO: 7373 - DNA, 20 bp, synthetic construct
  misc_feature 1..20: note = Description of Artificial Sequence: Synthetic oligonucleotide
  source 1..20: mol_type = other DNA
gataatttgatgctgccttc

SEQ ID NO: 7374 - DNA, 20 bp, synthetic construct
  misc_feature 1..20: note = Description of Artificial Sequence: Synthetic oligonucleotide
  source 1..20: mol_type = other DNA
ataatttgatgctgccttcg

SEQ ID NO: 7375 - DNA, 20 bp, synthetic construct
  misc_feature 1..20: note = Description of Artificial Sequence: Synthetic oligonucleotide
  source 1..20: mol_type = other DNA
taatttgatgctgccttcgt

SEQ ID NO: 7376 - DNA, 20 bp, synthetic construct
  misc_feature 1..20: note = Description of Artificial Sequence: Synthetic oligonucleotide
  source 1..20: mol_type = other DNA
aatttgatgctgccttcgtg

SEQ ID NO: 7377 - DNA, 20 bp, synthetic construct
  misc_feature 1..20: note = Description of Artificial Sequence: Synthetic oligonucleotide
  source 1..20: mol_type = other DNA
atttgatgctgccttcgtgt

SEQ ID NO: 7378 - DNA, 20 bp, synthetic construct
  misc_feature 1..20: note = Description of Artificial Sequence: Synthetic oligonucleotide
  source 1..20: mol_type = other DNA
tttgatgctgccttcgtgtt

SEQ ID NO: 7379 - DNA, 20 bp, synthetic construct
  misc_feature 1..20: note = Description of Artificial Sequence: Synthetic oligonucleotide
  source 1..20: mol_type = other DNA
ttgatgctgccttcgtgttt

SEQ ID NO: 7380 - DNA, 20 bp, synthetic construct
  misc_feature 1..20: note = Description of Artificial Sequence: Synthetic oligonucleotide
  source 1..20: mol_type = other DNA
tgatgctgccttcgtgtttt

SEQ ID NO: 7381 - DNA, 20 bp, synthetic construct
  misc_feature 1..20: note = Description of Artificial Sequence: Synthetic oligonucleotide
  source 1..20: mol_type = other DNA
gatgctgccttcgtgttttc

SEQ ID NO: 7382 - DNA, 20 bp, synthetic construct
  misc_feature 1..20: note = Description of Artificial Sequence: Synthetic oligonucleotide
  source 1..20: mol_type = other DNA
atgctgccttcgtgttttct

SEQ ID NO: 7383 - DNA, 20 bp, synthetic construct
  misc_feature 1..20: note = Description of Artificial Sequence: Synthetic oligonucleotide
  source 1..20: mol_type = other DNA
tgctgccttcgtgttttctt

SEQ ID NO: 7384 - DNA, 20 bp, synthetic construct
  misc_feature 1..20: note = Description of Artificial Sequence: Synthetic oligonucleotide
  source 1..20: mol_type = other DNA
gctgccttcgtgttttcttt

SEQ ID NO: 7385 - DNA, 20 bp, synthetic construct
  misc_feature 1..20: note = Description of Artificial Sequence: Synthetic oligonucleotide
  source 1..20: mol_type = other DNA
ctgccttcgtgttttctttt

SEQ ID NO: 7386 - DNA, 20 bp, synthetic construct
  misc_feature 1..20: note = Description of Artificial Sequence: Synthetic oligonucleotide
  source 1..20: mol_type = other DNA
tgccttcgtgttttcttttc

SEQ ID NO: 7387 - DNA, 20 bp, synthetic construct
  misc_feature 1..20: note = Description of Artificial Sequence: Synthetic oligonucleotide
  source 1..20: mol_type = other DNA
gccttcgtgttttcttttct

SEQ ID NO: 7388 - DNA, 20 bp, synthetic construct
  misc_feature 1..20: note = Description of Artificial Sequence: Synthetic oligonucleotide
  source 1..20: mol_type = other DNA
ccttcgtgttttcttttctc

SEQ ID NO: 7389 - DNA, 20 bp, synthetic construct
  misc_feature 1..20: note = Description of Artificial Sequence: Synthetic oligonucleotide
  source 1..20: mol_type = other DNA
cttcgtgttttcttttctcc

SEQ ID NO: 7390 - DNA, 20 bp, synthetic construct
  misc_feature 1..20: note = Description of Artificial Sequence: Synthetic oligonucleotide
  source 1..20: mol_type = other DNA
ttcgtgttttcttttctcct

SEQ ID NO: 7391 - DNA, 20 bp, synthetic construct
  misc_feature 1..20: note = Description of Artificial Sequence: Synthetic oligonucleotide
  source 1..20: mol_type = other DNA
tcgtgttttcttttctcctc

SEQ ID NO: 7392 - DNA, 20 bp, synthetic construct
  misc_feature 1..20: note = Description of Artificial Sequence: Synthetic oligonucleotide
  source 1..20: mol_type = other DNA
cgtgttttcttttctcctcc

SEQ ID NO: 7393 - DNA, 20 bp, synthetic construct
  misc_feature 1..20: note = Description of Artificial Sequence: Synthetic oligonucleotide
  source 1..20: mol_type = other DNA
gtgttttcttttctcctccc

SEQ ID NO: 7394 - DNA, 20 bp, synthetic construct
  misc_feature 1..20: note = Description of Artificial Sequence: Synthetic oligonucleotide
  source 1..20: mol_type = other DNA
tgttttcttttctcctcccc

SEQ ID NO: 7395 - DNA, 20 bp, synthetic construct
  misc_feature 1..20: note = Description of Artificial Sequence: Synthetic oligonucleotide
  source 1..20: mol_type = other DNA
gttttcttttctcctccccc

SEQ ID NO: 7396 - DNA, 20 bp, synthetic construct
  misc_feature 1..20: note = Description of Artificial Sequence: Synthetic oligonucleotide
  source 1..20: mol_type = other DNA
ttttcttttctcctccccca

SEQ ID NO: 7397 - DNA, 20 bp, synthetic construct
  misc_feature 1..20: note = Description of Artificial Sequence: Synthetic oligonucleotide
  source 1..20: mol_type = other DNA
tttcttttctcctcccccaa

SEQ ID NO: 7398 - DNA, 20 bp, synthetic construct
  misc_feature 1..20: note = Description of Artificial Sequence: Synthetic oligonucleotide
  source 1..20: mol_type = other DNA
ttcttttctcctcccccaag

SEQ ID NO: 7399 - DNA, 20 bp, synthetic construct
  misc_feature 1..20: note = Description of Artificial Sequence: Synthetic oligonucleotide
  source 1..20: mol_type = other DNA
tcttttctcctcccccaagg

SEQ ID NO: 7400 - DNA, 20 bp, synthetic construct
  misc_feature 1..20: note = Description of Artificial Sequence: Synthetic oligonucleotide
  source 1..20: mol_type = other DNA
cttttctcctcccccaagga

SEQ ID NO: 7401 - DNA, 20 bp, synthetic construct
  misc_feature 1..20: note = Description of Artificial Sequence: Synthetic oligonucleotide
  source 1..20: mol_type = other DNA
ttttctcctcccccaaggaa

SEQ ID NO: 7402 - DNA, 20 bp, synthetic construct
  misc_feature 1..20: note = Description of Artificial Sequence: Synthetic oligonucleotide
  source 1..20: mol_type = other DNA
tttctcctcccccaaggaat

SEQ ID NO: 7403 - DNA, 20 bp, synthetic construct
  misc_feature 1..20: note = Description of Artificial Sequence: Synthetic oligonucleotide
  source 1..20: mol_type = other DNA
ttctcctcccccaaggaata

SEQ ID NO: 7404 - DNA, 20 bp, synthetic construct
  misc_feature 1..20: note = Description of Artificial Sequence: Synthetic oligonucleotide
  source 1..20: mol_type = other DNA
tctcctcccccaaggaatag

SEQ ID NO: 7405 - DNA, 20 bp, synthetic construct
  misc_feature 1..20: note = Description of Artificial Sequence: Synthetic oligonucleotide
  source 1..20: mol_type = other DNA
ctcctcccccaaggaatagc

SEQ ID NO: 7406 - DNA, 20 bp, synthetic construct
  misc_feature 1..20: note = Description of Artificial Sequence: Synthetic oligonucleotide
  source 1..20: mol_type = other DNA
tcctcccccaaggaatagct

SEQ ID NO: 7407 - DNA, 20 bp, synthetic construct
  misc_feature 1..20: note = Description of Artificial Sequence: Synthetic oligonucleotide
  source 1..20: mol_type = other DNA
cctcccccaaggaatagctg

SEQ ID NO: 7408 - DNA, 20 bp, synthetic construct
  misc_feature 1..20: note = Description of Artificial Sequence: Synthetic oligonucleotide
  source 1..20: mol_type = other DNA
ctcccccaaggaatagctgt

SEQ ID NO: 7409 - DNA, 20 bp, synthetic construct
  misc_feature 1..20: note = Description of Artificial Sequence: Synthetic oligonucleotide
  source 1..20: mol_type = other DNA
tcccccaaggaatagctgtt

SEQ ID NO: 7410 - DNA, 20 bp, synthetic construct
  misc_feature 1..20: note = Description of Artificial Sequence: Synthetic oligonucleotide
  source 1..20: mol_type = other DNA
cccccaaggaatagctgttc

SEQ ID NO: 7411 - DNA, 20 bp, synthetic construct
  misc_feature 1..20: note = Description of Artificial Sequence: Synthetic oligonucleotide
  source 1..20: mol_type = other DNA
ccccaaggaatagctgttct

SEQ ID NO: 7412 - DNA, 20 bp, synthetic construct
  misc_feature 1..20: note = Description of Artificial Sequence: Synthetic oligonucleotide
  source 1..20: mol_type = other DNA
cccaaggaatagctgttcta

SEQ ID NO: 7413 - DNA, 20 bp, synthetic construct
  misc_feature 1..20: note = Description of Artificial Sequence: Synthetic oligonucleotide
  source 1..20: mol_type = other DNA
ccaaggaatagctgttctag

SEQ ID NO: 7414 - DNA, 20 bp, synthetic construct
  misc_feature 1..20: note = Description of Artificial Sequence: Synthetic oligonucleotide
  source 1..20: mol_type = other DNA
caaggaatagctgttctagg

SEQ ID NO: 7415 - DNA, 20 bp, synthetic construct
  misc_feature 1..20: note = Description of Artificial Sequence: Synthetic oligonucleotide
  source 1..20: mol_type = other DNA
aaggaatagctgttctagga

SEQ ID NO: 7416 - DNA, 20 bp, synthetic construct
  misc_feature 1..20: note = Description of Artificial Sequence: Synthetic oligonucleotide
  source 1..20: mol_type = other DNA
aggaatagctgttctaggac

SEQ ID NO: 7417 - DNA, 20 bp, synthetic construct
  misc_feature 1..20: note = Description of Artificial Sequence: Synthetic oligonucleotide
  source 1..20: mol_type = other DNA
ggaatagctgttctaggaca

SEQ ID NO: 7418 - DNA, 20 bp, synthetic construct
  misc_feature 1..20: note = Description of Artificial Sequence: Synthetic oligonucleotide
  source 1..20: mol_type = other DNA
gaatagctgttctaggacat

SEQ ID NO: 7419 - DNA, 20 bp, synthetic construct
  misc_feature 1..20: note = Description of Artificial Sequence: Synthetic oligonucleotide
  source 1..20: mol_type = other DNA
aatagctgttctaggacatg

SEQ ID NO: 7420 - DNA, 20 bp, synthetic construct
  misc_feature 1..20: note = Description of Artificial Sequence: Synthetic oligonucleotide
  source 1..20: mol_type = other DNA
atagctgttctaggacatgg

SEQ ID NO: 7421 - DNA, 20 bp, synthetic construct
  misc_feature 1..20: note = Description of Artificial Sequence: Synthetic oligonucleotide
  source 1..20: mol_type = other DNA
tagctgttctaggacatggc

SEQ ID NO: 7422 - DNA, 20 bp, synthetic construct
  misc_feature 1..20: note = Description of Artificial Sequence: Synthetic oligonucleotide
  source 1..20: mol_type = other DNA
agctgttctaggacatggca

SEQ ID NO: 7423 - DNA, 20 bp, synthetic construct
  misc_feature 1..20: note = Description of Artificial Sequence: Synthetic oligonucleotide
  source 1..20: mol_type = other DNA
gctgttctaggacatggcaa

SEQ ID NO: 7424 - DNA, 20 bp, synthetic construct
  misc_feature 1..20: note = Description of Artificial Sequence: Synthetic oligonucleotide
  source 1..20: mol_type = other DNA
ctgttctaggacatggcaag

SEQ ID NO: 7425 - DNA, 20 bp, synthetic construct
  misc_feature 1..20: note = Description of Artificial Sequence: Synthetic oligonucleotide
  source 1..20: mol_type = other DNA
tgttctaggacatggcaaga

SEQ ID NO: 7426 - DNA, 20 bp, synthetic construct
  misc_feature 1..20: note = Description of Artificial Sequence: Synthetic oligonucleotide
  source 1..20: mol_type = other DNA
gttctaggacatggcaagag

SEQ ID NO: 7427 - DNA, 20 bp, synthetic construct
  misc_feature 1..20: note = Description of Artificial Sequence: Synthetic oligonucleotide
  source 1..20: mol_type = other DNA
ttctaggacatggcaagaga

SEQ ID NO: 7428 - DNA, 20 bp, synthetic construct
  misc_feature 1..20: note = Description of Artificial Sequence: Synthetic oligonucleotide
  source 1..20: mol_type = other DNA
tctaggacatggcaagagat

SEQ ID NO: 7429 - DNA, 20 bp, synthetic construct
  misc_feature 1..20: note = Description of Artificial Sequence: Synthetic oligonucleotide
  source 1..20: mol_type = other DNA
ctaggacatggcaagagatt

SEQ ID NO: 7430 - DNA, 20 bp, synthetic construct
  misc_feature 1..20: note = Description of Artificial Sequence: Synthetic oligonucleotide
  source 1..20: mol_type = other DNA
taggacatggcaagagattt

SEQ ID NO: 7431 - DNA, 20 bp, synthetic construct
  misc_feature 1..20: note = Description of Artificial Sequence: Synthetic oligonucleotide
  source 1..20: mol_type = other DNA
aggacatggcaagagattta

SEQ ID NO: 7432 - DNA, 20 bp, synthetic construct
  misc_feature 1..20: note = Description of Artificial Sequence: Synthetic oligonucleotide
  source 1..20: mol_type = other DNA
ggacatggcaagagatttaa

SEQ ID NO: 7433 - DNA, 20 bp, synthetic construct
  misc_feature 1..20: note = Description of Artificial Sequence: Synthetic oligonucleotide
  source 1..20: mol_type = other DNA
gacatggcaagagatttaaa

SEQ ID NO: 7434 - DNA, 20 bp, synthetic construct
  misc_feature 1..20: note = Description of Artificial Sequence: Synthetic oligonucleotide
  source 1..20: mol_type = other DNA
acatggcaagagatttaaac

SEQ ID NO: 7435 - DNA, 20 bp, synthetic construct
  misc_feature 1..20: note = Description of Artificial Sequence: Synthetic oligonucleotide
  source 1..20: mol_type = other DNA
catggcaagagatttaaact

SEQ ID NO: 7436 - DNA, 20 bp, synthetic construct
  misc_feature 1..20: note = Description of Artificial Sequence: Synthetic oligonucleotide
  source 1..20: mol_type = other DNA
atggcaagagatttaaacta

SEQ ID NO: 7437 - DNA, 20 bp, synthetic construct
  misc_feature 1..20: note = Description of Artificial Sequence: Synthetic oligonucleotide
  source 1..20: mol_type = other DNA
tggcaagagatttaaactaa

SEQ ID NO: 7438 - DNA, 20 bp, synthetic construct
  misc_feature 1..20: note = Description of Artificial Sequence: Synthetic oligonucleotide
  source 1..20: mol_type = other DNA
ggcaagagatttaaactaag

SEQ ID NO: 7439 - DNA, 20 bp, synthetic construct
  misc_feature 1..20: note = Description of Artificial Sequence: Synthetic oligonucleotide
  source 1..20: mol_type = other DNA
gcaagagatttaaactaagt

SEQ ID NO: 7440 - DNA, 20 bp, synthetic construct
  misc_feature 1..20: note = Description of Artificial Sequence: Synthetic oligonucleotide
  source 1..20: mol_type = other DNA
caagagatttaaactaagtt

SEQ ID NO: 7441 - DNA, 20 bp, synthetic construct
  misc_feature 1..20: note = Description of Artificial Sequence: Synthetic oligonucleotide
  source 1..20: mol_type = other DNA
aagagatttaaactaagtta

SEQ ID NO: 7442 - DNA, 20 bp, synthetic construct
  misc_feature 1..20: note = Description of Artificial Sequence: Synthetic oligonucleotide
  source 1..20: mol_type = other DNA
agagatttaaactaagttat

SEQ ID NO: 7443 - DNA, 20 bp, synthetic construct
  misc_feature 1..20: note = Description of Artificial Sequence: Synthetic oligonucleotide
  source 1..20: mol_type = other DNA
gagatttaaactaagttatg

SEQ ID NO: 7444 - DNA, 20 bp, synthetic construct
  misc_feature 1..20: note = Description of Artificial Sequence: Synthetic oligonucleotide
  source 1..20: mol_type = other DNA
agatttaaactaagttatgt

SEQ ID NO: 7445 - DNA, 20 bp, synthetic construct
  misc_feature 1..20: note = Description of Artificial Sequence: Synthetic oligonucleotide
  source 1..20: mol_type = other DNA
gatttaaactaagttatgtg

SEQ ID NO: 7446 - DNA, 20 bp, synthetic construct
  misc_feature 1..20: note = Description of Artificial Sequence: Synthetic oligonucleotide
  source 1..20: mol_type = other DNA
atttaaactaagttatgtgg

SEQ ID NO: 7447 - DNA, 20 bp, synthetic construct
  misc_feature 1..20: note = Description of Artificial Sequence: Synthetic oligonucleotide
  source 1..20: mol_type = other DNA
tttaaactaagttatgtggt

SEQ ID NO: 7448 - DNA, 20 bp, synthetic construct
  misc_feature 1..20: note = Description of Artificial Sequence: Synthetic oligonucleotide
  source 1..20: mol_type = other DNA
ttaaactaagttatgtggtg

SEQ ID NO: 7449 - DNA, 20 bp, synthetic construct
  misc_feature 1..20: note = Description of Artificial Sequence: Synthetic oligonucleotide
  source 1..20: mol_type = other DNA
taaactaagttatgtggtgg

SEQ ID NO: 7450 - DNA, 20 bp, synthetic construct
  misc_feature 1..20: note = Description of Artificial Sequence: Synthetic oligonucleotide
  source 1..20: mol_type = other DNA
aaactaagttatgtggtggt

SEQ ID NO: 7451 - DNA, 20 bp, synthetic construct
  misc_feature 1..20: note = Description of Artificial Sequence: Synthetic oligonucleotide
  source 1..20: mol_type = other DNA
aactaagttatgtggtggtt

SEQ ID NO: 7452 - DNA, 20 bp, synthetic construct
  misc_feature 1..20: note = Description of Artificial Sequence: Synthetic oligonucleotide
  source 1..20: mol_type = other DNA
actaagttatgtggtggtta

SEQ ID NO: 7453 - DNA, 20 bp, synthetic construct
  misc_feature 1..20: note = Description of Artificial Sequence: Synthetic oligonucleotide
  source 1..20: mol_type = other DNA
ctaagttatgtggtggttat

SEQ ID NO: 7454 - DNA, 20 bp, synthetic construct
  misc_feature 1..20: note = Description of Artificial Sequence: Synthetic oligonucleotide
  source 1..20: mol_type = other DNA
taagttatgtggtggttata

SEQ ID NO: 7455 - DNA, 20 bp, synthetic construct
  misc_feature 1..20: note = Description of Artificial Sequence: Synthetic oligonucleotide
  source 1..20: mol_type = other DNA
aagttatgtggtggttataa

SEQ ID NO: 7456 - DNA, 20 bp, synthetic construct
  misc_feature 1..20: note = Description of Artificial Sequence: Synthetic oligonucleotide
  source 1..20: mol_type = other DNA
agttatgtggtggttataag

SEQ ID NO: 7457 - DNA, 20 bp, synthetic construct
  misc_feature 1..20: note = Description of Artificial Sequence: Synthetic oligonucleotide
  source 1..20: mol_type = other DNA
gttatgtggtggttataaga

SEQ ID NO: 7458 - DNA, 20 bp, synthetic construct
  misc_feature 1..20: note = Description of Artificial Sequence: Synthetic oligonucleotide
  source 1..20: mol_type = other DNA
ttatgtggtggttataagaa

SEQ ID NO: 7459 - DNA, 20 bp, synthetic construct
  misc_feature 1..20: note = Description of Artificial Sequence: Synthetic oligonucleotide
  source 1..20: mol_type = other DNA
tatgtggtggttataagaat

SEQ ID NO: 7460 - DNA, 20 bp, synthetic construct
  misc_feature 1..20: note = Description of Artificial Sequence: Synthetic oligonucleotide
  source 1..20: mol_type = other DNA
atgtggtggttataagaatg

SEQ ID NO: 7461 - DNA, 20 bp, synthetic construct
  misc_feature 1..20: note = Description of Artificial Sequence: Synthetic oligonucleotide
  source 1..20: mol_type = other DNA
tgtggtggttataagaatga

SEQ ID NO: 7462 - DNA, 20 bp, synthetic construct
  misc_feature 1..20: note = Description of Artificial Sequence: Synthetic oligonucleotide
  source 1..20: mol_type = other DNA
gtggtggttataagaatgat

SEQ ID NO: 7463 - DNA, 20 bp, synthetic construct
  misc_feature 1..20: note = Description of Artificial Sequence: Synthetic oligonucleotide
  source 1..20: mol_type = other DNA
tggtggttataagaatgatc

SEQ ID NO: 7464 - DNA, 20 bp, synthetic construct
  misc_feature 1..20: note = Description of Artificial Sequence: Synthetic oligonucleotide
  source 1..20: mol_type = other DNA
ggtggttataagaatgatct

SEQ ID NO: 7465 - DNA, 20 bp, synthetic construct
  misc_feature 1..20: note = Description of Artificial Sequence: Synthetic oligonucleotide
  source 1..20: mol_type = other DNA
gtggttataagaatgatctg

SEQ ID NO: 7466 - DNA, 20 bp, synthetic construct
  misc_feature 1..20: note = Description of Artificial Sequence: Synthetic oligonucleotide
  source 1..20: mol_type = other DNA
tggttataagaatgatctga

SEQ ID NO: 7467 - DNA, 20 bp, synthetic construct
  misc_feature 1..20: note = Description of Artificial Sequence: Synthetic oligonucleotide
  source 1..20: mol_type = other DNA
ggttataagaatgatctgat

SEQ ID NO: 7468 - DNA, 20 bp, synthetic construct
  misc_feature 1..20: note = Description of Artificial Sequence: Synthetic oligonucleotide
  source 1..20: mol_type = other DNA
gttataagaatgatctgatc

SEQ ID NO: 7469 - DNA, 20 bp, synthetic construct
  misc_feature 1..20: note = Description of Artificial Sequence: Synthetic oligonucleotide
  source 1..20: mol_type = other DNA
ttataagaatgatctgatct

SEQ ID NO: 7470 - DNA, 20 bp, synthetic construct
  misc_feature 1..20: note = Description of Artificial Sequence: Synthetic oligonucleotide
  source 1..20: mol_type = other DNA
tataagaatgatctgatcta

SEQ ID NO: 7471 - DNA, 20 bp, synthetic construct
  misc_feature 1..20: note = Description of Artificial Sequence: Synthetic oligonucleotide
  source 1..20: mol_type = other DNA
ataagaatgatctgatctat

SEQ ID NO: 7472 - DNA, 20 bp, synthetic construct
  misc_feature 1..20: note = Description of Artificial Sequence: Synthetic oligonucleotide
  source 1..20: mol_type = other DNA
taagaatgatctgatctatg

SEQ ID NO: 7473 - DNA, 20 bp, synthetic construct
  misc_feature 1..20: note = Description of Artificial Sequence: Synthetic oligonucleotide
  source 1..20: mol_type = other DNA
aagaatgatctgatctatgt

SEQ ID NO: 7474 - DNA, 20 bp, synthetic construct
  misc_feature 1..20: note = Description of Artificial Sequence: Synthetic oligonucleotide
  source 1..20: mol_type = other DNA
agaatgatctgatctatgtt

SEQ ID NO: 7475 - DNA, 20 bp, synthetic construct
  misc_feature 1..20: note = Description of Artificial Sequence: Synthetic oligonucleotide
  source 1..20: mol_type = other DNA
gaatgatctgatctatgtta

SEQ ID NO: 7476 - DNA, 20 bp, synthetic construct
  misc_feature 1..20: note = Description of Artificial Sequence: Synthetic oligonucleotide
  source 1..20: mol_type = other DNA
aatgatctgatctatgttag

SEQ ID NO: 7477 - DNA, 20 bp, synthetic construct
  misc_feature 1..20: note = Description of Artificial Sequence: Synthetic oligonucleotide
  source 1..20: mol_type = other DNA
atgatctgatctatgttaga

SEQ ID NO: 7478 - DNA, 20 bp, synthetic construct
  misc_feature 1..20: note = Description of Artificial Sequence: Synthetic oligonucleotide
  source 1..20: mol_type = other DNA
tgatctgatctatgttagaa

SEQ ID NO: 7479 - DNA, 20 bp, synthetic construct
  misc_feature 1..20: note = Description of Artificial Sequence: Synthetic oligonucleotide
  source 1..20: mol_type = other DNA
gatctgatctatgttagaag

SEQ ID NO: 7480 - DNA, 20 bp, synthetic construct
  misc_feature 1..20: note = Description of Artificial Sequence: Synthetic oligonucleotide
  source 1..20: mol_type = other DNA
atctgatctatgttagaagg

SEQ ID NO: 7481 - DNA, 20 bp, synthetic construct
  misc_feature 1..20: note = Description of Artificial Sequence: Synthetic oligonucleotide
  source 1..20: mol_type = other DNA
tctgatctatgttagaaggc

SEQ ID NO: 7482 - DNA, 20 bp, synthetic construct
  misc_feature 1..20: note = Description of Artificial Sequence: Synthetic oligonucleotide
  source 1..20: mol_type = other DNA
ctgatctatgttagaaggct

SEQ ID NO: 7483 - DNA, 20 bp, synthetic construct
  misc_feature 1..20: note = Description of Artificial Sequence: Synthetic oligonucleotide
  source 1..20: mol_type = other DNA
tgatctatgttagaaggctt

SEQ ID NO: 7484 - DNA, 20 bp, synthetic construct
  misc_feature 1..20: note = Description of Artificial Sequence: Synthetic oligonucleotide
  source 1..20: mol_type = other DNA
gatctatgttagaaggcttg

SEQ ID NO: 7485 - DNA, 20 bp, synthetic construct
  misc_feature 1..20: note = Description of Artificial Sequence: Synthetic oligonucleotide
  source 1..20: mol_type = other DNA
atctatgttagaaggcttgt

SEQ ID NO: 7486 - DNA, 20 bp, synthetic construct
  misc_feature 1..20: note = Description of Artificial Sequence: Synthetic oligonucleotide
  source 1..20: mol_type = other DNA
tctatgttagaaggcttgtt

SEQ ID NO: 7487 - DNA, 20 bp, synthetic construct
  misc_feature 1..20: note = Description of Artificial Sequence: Synthetic oligonucleotide
  source 1..20: mol_type = other DNA
ctatgttagaaggcttgttg

SEQ ID NO: 7488 - DNA, 20 bp, synthetic construct
  misc_feature 1..20: note = Description of Artificial Sequence: Synthetic oligonucleotide
  source 1..20: mol_type = other DNA
tatgttagaaggcttgttgt

SEQ ID NO: 7489 - DNA, 20 bp, synthetic construct
  misc_feature 1..20: note = Description of Artificial Sequence: Synthetic oligonucleotide
  source 1..20: mol_type = other DNA
atgttagaaggcttgttgtt

SEQ ID NO: 7490 - DNA, 20 bp, synthetic construct
  misc_feature 1..20: note = Description of Artificial Sequence: Synthetic oligonucleotide
  source 1..20: mol_type = other DNA
tgttagaaggcttgttgttt

SEQ ID NO: 7491 - DNA, 20 bp, synthetic construct
  misc_feature 1..20: note = Description of Artificial Sequence: Synthetic oligonucleotide
  source 1..20: mol_type = other DNA
gttagaaggcttgttgtttg

SEQ ID NO: 7492 - DNA, 20 bp, synthetic construct
  misc_feature 1..20: note = Description of Artificial Sequence: Synthetic oligonucleotide
  source 1..20: mol_type = other DNA
ttagaaggcttgttgtttga

SEQ ID NO: 7493 - DNA, 20 bp, synthetic construct
  misc_feature 1..20: note = Description of Artificial Sequence: Synthetic oligonucleotide
  source 1..20: mol_type = other DNA
tagaaggcttgttgtttgac

SEQ ID NO: 7494 - DNA, 20 bp, synthetic construct
  misc_feature 1..20: note = Description of Artificial Sequence: Synthetic oligonucleotide
  source 1..20: mol_type = other DNA
agaaggcttgttgtttgact

SEQ ID NO: 7495 - DNA, 20 bp, synthetic construct
  misc_feature 1..20: note = Description of Artificial Sequence: Synthetic oligonucleotide
  source 1..20: mol_type = other DNA
gaaggcttgttgtttgactg

SEQ ID NO: 7496 - DNA, 20 bp, synthetic construct
  misc_feature 1..20: note = Description of Artificial Sequence: Synthetic oligonucleotide
  source 1..20: mol_type = other DNA
aaggcttgttgtttgactga

SEQ ID NO: 7497 - DNA, 20 bp, synthetic construct
  misc_feature 1..20: note = Description of Artificial Sequence: Synthetic oligonucleotide
  source 1..20: mol_type = other DNA
aggcttgttgtttgactgat

SEQ ID NO: 7498 - DNA, 20 bp, synthetic construct
  misc_feature 1..20: note = Description of Artificial Sequence: Synthetic oligonucleotide
  source 1..20: mol_type = other DNA
ggcttgttgtttgactgata

SEQ ID NO: 7499 - DNA, 20 bp, synthetic construct
  misc_feature 1..20: note = Description of Artificial Sequence: Synthetic oligonucleotide
  source 1..20: mol_type = other DNA
gcttgttgtttgactgataa

SEQ ID NO: 7500 - DNA, 20 bp, synthetic construct
  misc_feature 1..20: note = Description of Artificial Sequence: Synthetic oligonucleotide
  source 1..20: mol_type = other DNA
cttgttgtttgactgataat

SEQ ID NO: 7501 - DNA, 20 bp, synthetic construct
  misc_feature 1..20: note = Description of Artificial Sequence: Synthetic oligonucleotide
  source 1..20: mol_type = other DNA
ttgttgtttgactgataatg

SEQ ID NO: 7502 - DNA, 20 bp, synthetic construct
  misc_feature 1..20: note = Description of Artificial Sequence: Synthetic oligonucleotide
  source 1..20: mol_type = other DNA
tgttgtttgactgataatga

SEQ ID NO: 7503 - DNA, 20 bp, synthetic construct
  misc_feature 1..20: note = Description of Artificial Sequence: Synthetic oligonucleotide
  source 1..20: mol_type = other DNA
gttgtttgactgataatgat

SEQ ID NO: 7504 - DNA, 20 bp, synthetic construct
  misc_feature 1..20: note = Description of Artificial Sequence: Synthetic oligonucleotide
  source 1..20: mol_type = other DNA
ttgtttgactgataatgatt

SEQ ID NO: 7505 - DNA, 20 bp, synthetic construct
  misc_feature 1..20: note = Description of Artificial Sequence: Synthetic oligonucleotide
  source 1..20: mol_type = other DNA
tgtttgactgataatgattt

SEQ ID NO: 7506 - DNA, 20 bp, synthetic construct
  misc_feature 1..20: note = Description of Artificial Sequence: Synthetic oligonucleotide
  source 1..20: mol_type = other DNA
gtttgactgataatgatttg

SEQ ID NO: 7507 - DNA, 20 bp, synthetic construct
  misc_feature 1..20: note = Description of Artificial Sequence: Synthetic oligonucleotide
  source 1..20: mol_type = other DNA
tttgactgataatgatttga

SEQ ID NO: 7508 - DNA, 20 bp, synthetic construct
  misc_feature 1..20: note = Description of Artificial Sequence: Synthetic oligonucleotide
  source 1..20: mol_type = other DNA
ttgactgataatgatttgaa

SEQ ID NO: 7509 - DNA, 20 bp, synthetic construct
  misc_feature 1..20: note = Description of Artificial Sequence: Synthetic oligonucleotide
  source 1..20: mol_type = other DNA
tgactgataatgatttgaag

SEQ ID NO: 7510 - DNA, 20 bp, synthetic construct
  misc_feature 1..20: note = Description of Artificial Sequence: Synthetic oligonucleotide
  source 1..20: mol_type = other DNA
gactgataatgatttgaagg

SEQ ID NO: 7511 - DNA, 20 bp, synthetic construct
  misc_feature 1..20: note = Description of Artificial Sequence: Synthetic oligonucleotide
  source 1..20: mol_type = other DNA
actgataatgatttgaaggg

SEQ ID NO: 7512 - DNA, 20 bp, synthetic construct
  misc_feature 1..20: note = Description of Artificial Sequence: Synthetic oligonucleotide
  source 1..20: mol_type = other DNA
ctgataatgatttgaagggg

SEQ ID NO: 7513 - DNA, 20 bp, synthetic construct
  misc_feature 1..20: note = Description of Artificial Sequence: Synthetic oligonucleotide
  source 1..20: mol_type = other DNA
tgataatgatttgaaggggc

SEQ ID NO: 7514 - DNA, 20 bp, synthetic construct
  misc_feature 1..20: note = Description of Artificial Sequence: Synthetic oligonucleotide
  source 1..20: mol_type = other DNA
gataatgatttgaaggggcc

SEQ ID NO: 7515 - DNA, 20 bp, synthetic construct
  misc_feature 1..20: note = Description of Artificial Sequence: Synthetic oligonucleotide
  source 1..20: mol_type = other DNA
ataatgatttgaaggggcca

SEQ ID NO: 7516 - DNA, 20 bp, synthetic construct
  misc_feature 1..20: note = Description of Artificial Sequence: Synthetic oligonucleotide
  source 1..20: mol_type = other DNA
taatgatttgaaggggccaa

SEQ ID NO: 7517 - DNA, 20 bp, synthetic construct
  misc_feature 1..20: note = Description of Artificial Sequence: Synthetic oligonucleotide
  source 1..20: mol_type = other DNA
aatgatttgaaggggccaaa

SEQ ID NO: 7518 - DNA, 20 bp, synthetic construct
  misc_feature 1..20: note = Description of Artificial Sequence: Synthetic oligonucleotide
  source 1..20: mol_type = other DNA
atgatttgaaggggccaaac

SEQ ID NO: 7519 - DNA, 20 bp, synthetic construct
  misc_feature 1..20: note = Description of Artificial Sequence: Synthetic oligonucleotide
  source 1..20: mol_type = other DNA
tgatttgaaggggccaaaca

SEQ ID NO: 7520 - DNA, 20 bp, synthetic construct
  misc_feature 1..20: note = Description of Artificial Sequence: Synthetic oligonucleotide
  source 1..20: mol_type = other DNA
gatttgaaggggccaaacag

SEQ ID NO: 7521 - DNA, 20 bp, synthetic construct
  misc_feature 1..20: note = Description of Artificial Sequence: Synthetic oligonucleotide
  source 1..20: mol_type = other DNA
atttgaaggggccaaacaga

SEQ ID NO: 7522 - DNA, 20 bp, synthetic construct
  misc_feature 1..20: note = Description of Artificial Sequence: Synthetic oligonucleotide
  source 1..20: mol_type = other DNA
tttgaaggggccaaacagat

SEQ ID NO: 7523 - DNA, 20 bp, synthetic construct
  misc_feature 1..20: note = Description of Artificial Sequence: Synthetic oligonucleotide
  source 1..20: mol_type = other DNA
ttgaaggggccaaacagatg

SEQ ID NO: 7524 - DNA, 20 bp, synthetic construct
  misc_feature 1..20: note = Description of Artificial Sequence: Synthetic oligonucleotide
  source 1..20: mol_type = other DNA
tgaaggggccaaacagatgc

SEQ ID NO: 7525 - DNA, 20 bp, synthetic construct
  misc_feature 1..20: note = Description of Artificial Sequence: Synthetic oligonucleotide
  source 1..20: mol_type = other DNA
gaaggggccaaacagatgcc

SEQ ID NO: 7526 - DNA, 20 bp, synthetic construct
  misc_feature 1..20: note = Description of Artificial Sequence: Synthetic oligonucleotide
  source 1..20: mol_type = other DNA
aaggggccaaacagatgcct

SEQ ID NO: 7527 - DNA, 20 bp, synthetic construct
  misc_feature 1..20: note = Description of Artificial Sequence: Synthetic oligonucleotide
  source 1..20: mol_type = other DNA
aggggccaaacagatgcctg

SEQ ID NO: 7528 - DNA, 20 bp, synthetic construct
  misc_feature 1..20: note = Description of Artificial Sequence: Synthetic oligonucleotide
  source 1..20: mol_type = other DNA
ggggccaaacagatgcctgg

SEQ ID NO: 7529 - DNA, 20 bp, synthetic construct
  misc_feature 1..20: note = Description of Artificial Sequence: Synthetic oligonucleotide
  source 1..20: mol_type = other DNA
gggccaaacagatgcctggg

SEQ ID NO: 7530 - DNA, 20 bp, synthetic construct
  misc_feature 1..20: note = Description of Artificial Sequence: Synthetic oligonucleotide
  source 1..20: mol_type = other DNA
ggccaaacagatgcctgggt

SEQ ID NO: 7531 - DNA, 20 bp, synthetic construct
  misc_feature 1..20: note = Description of Artificial Sequence: Synthetic oligonucleotide
  source 1..20: mol_type = other DNA
gccaaacagatgcctgggtt

SEQ ID NO: 7532 - DNA, 20 bp, synthetic construct
  misc_feature 1..20: note = Description of Artificial Sequence: Synthetic oligonucleotide
  source 1..20: mol_type = other DNA
ccaaacagatgcctgggttt

SEQ ID NO: 7533 - DNA, 20 bp, synthetic construct
  misc_feature 1..20: note = Description of Artificial Sequence: Synthetic oligonucleotide
  source 1..20: mol_type = other DNA
caaacagatgcctgggtttg

SEQ ID NO: 7534 - DNA, 20 bp, synthetic construct
  misc_feature 1..20: note = Description of Artificial Sequence: Synthetic oligonucleotide
  source 1..20: mol_type = other DNA
aaacagatgcctgggtttgg

SEQ ID NO: 7535 - DNA, 20 bp, synthetic construct
  misc_feature 1..20: note = Description of Artificial Sequence: Synthetic oligonucleotide
  source 1..20: mol_type = other DNA
aacagatgcctgggtttgga

SEQ ID NO: 7536 - DNA, 20 bp, synthetic construct
  misc_feature 1..20: note = Description of Artificial Sequence: Synthetic oligonucleotide
  source 1..20: mol_type = other DNA
acagatgcctgggtttggag

SEQ ID NO: 7537 - DNA, 20 bp, synthetic construct
  misc_feature 1..20: note = Description of Artificial Sequence: Synthetic oligonucleotide
  source 1..20: mol_type = other DNA
cagatgcctgggtttggagt

SEQ ID NO: 7538 - DNA, 20 bp, synthetic construct
  misc_feature 1..20: note = Description of Artificial Sequence: Synthetic oligonucleotide
  source 1..20: mol_type = other DNA
agatgcctgggtttggagtg

SEQ ID NO: 7539 - DNA, 20 bp, synthetic construct
  misc_feature 1..20: note = Description of Artificial Sequence: Synthetic oligonucleotide
  source 1..20: mol_type = other DNA
gatgcctgggtttggagtgc

SEQ ID NO: 7540 - DNA, 20 bp, synthetic construct
  misc_feature 1..20: note = Description of Artificial Sequence: Synthetic oligonucleotide
  source 1..20: mol_type = other DNA
atgcctgggtttggagtgca

SEQ ID NO: 7541 - DNA, 20 bp, synthetic construct
  misc_feature 1..20: note = Description of Artificial Sequence: Synthetic oligonucleotide
  source 1..20: mol_type = other DNA
tgcctgggtttggagtgcag

SEQ ID NO: 7542 - DNA, 20 bp, synthetic construct
  misc_feature 1..20: note = Description of Artificial Sequence: Synthetic oligonucleotide
  source 1..20: mol_type = other DNA
gcctgggtttggagtgcagg

SEQ ID NO: 7543 - DNA, 20 bp, synthetic construct
  misc_feature 1..20: note = Description of Artificial Sequence: Synthetic oligonucleotide
  source 1..20: mol_type = other DNA
cctgggtttggagtgcaggg

SEQ ID NO: 7544 - DNA, 20 bp, synthetic construct
  misc_feature 1..20: note = Description of Artificial Sequence: Synthetic oligonucleotide
  source 1..20: mol_type = other DNA
ctgggtttggagtgcagggc

SEQ ID NO: 7545 - DNA, 20 bp, synthetic construct
  misc_feature 1..20: note = Description of Artificial Sequence: Synthetic oligonucleotide
  source 1..20: mol_type = other DNA
tgggtttggagtgcagggca

SEQ ID NO: 7546 - DNA, 20 bp, synthetic construct
  misc_feature 1..20: note = Description of Artificial Sequence: Synthetic oligonucleotide
  source 1..20: mol_type = other DNA
gggtttggagtgcagggcat

SEQ ID NO: 7547 - DNA, 20 bp, synthetic construct
  misc_feature 1..20: note = Description of Artificial Sequence: Synthetic oligonucleotide
  source 1..20: mol_type = other DNA
ggtttggagtgcagggcata

SEQ ID NO: 7548 - DNA, 20 bp, synthetic construct
  misc_feature 1..20: note = Description of Artificial Sequence: Synthetic oligonucleotide
  source 1..20: mol_type = other DNA
gtttggagtgcagggcataa

SEQ ID NO: 7549 - DNA, 20 bp, synthetic construct
  misc_feature 1..20: note = Description of Artificial Sequence: Synthetic oligonucleotide
  source 1..20: mol_type = other DNA
tttggagtgcagggcataaa

SEQ ID NO: 7550 - DNA, 20 bp, synthetic construct
  misc_feature 1..20: note = Description of Artificial Sequence: Synthetic oligonucleotide
  source 1..20: mol_type = other DNA
ttggagtgcagggcataaac

SEQ ID NO: 7551 - DNA, 20 bp, synthetic construct
  misc_feature 1..20: note = Description of Artificial Sequence: Synthetic oligonucleotide
  source 1..20: mol_type = other DNA
tggagtgcagggcataaact

SEQ ID NO: 7552 - DNA, 20 bp, synthetic construct
  misc_feature 1..20: note = Description of Artificial Sequence: Synthetic oligonucleotide
  source 1..20: mol_type = other DNA
ggagtgcagggcataaactg

SEQ ID NO: 7553 - DNA, 20 bp, synthetic construct
  misc_feature 1..20: note = Description of Artificial Sequence: Synthetic oligonucleotide
  source 1..20: mol_type = other DNA
gagtgcagggcataaactga

SEQ ID NO: 7554 - DNA, 20 bp, synthetic construct
  misc_feature 1..20: note = Description of Artificial Sequence: Synthetic oligonucleotide
  source 1..20: mol_type = other DNA
agtgcagggcataaactgag

SEQ ID NO: 7555 - DNA, 20 bp, synthetic construct
  misc_feature 1..20: note = Description of Artificial Sequence: Synthetic oligonucleotide
  source 1..20: mol_type = other DNA
gtgcagggcataaactgagt

SEQ ID NO: 7556 - DNA, 20 bp, synthetic construct
  misc_feature 1..20: note = Description of Artificial Sequence: Synthetic oligonucleotide
  source 1..20: mol_type = other DNA
tgcagggcataaactgagtg

SEQ ID NO: 7557 - DNA, 20 bp, synthetic construct
  misc_feature 1..20: note = Description of Artificial Sequence: Synthetic oligonucleotide
  source 1..20: mol_type = other DNA
gcagggcataaactgagtgt

SEQ ID NO: 7558 - DNA, 20 bp, synthetic construct
  misc_feature 1..20: note = Description of Artificial Sequence: Synthetic oligonucleotide
  source 1..20: mol_type = other DNA
cagggcataaactgagtgtt

SEQ ID NO: 7559 - DNA, 20 bp, synthetic construct
  misc_feature 1..20: note = Description of Artificial Sequence: Synthetic oligonucleotide
  source 1..20: mol_type = other DNA
agggcataaactgagtgttt

SEQ ID NO: 7560 - DNA, 20 bp, synthetic construct
  misc_feature 1..20: note = Description of Artificial Sequence: Synthetic oligonucleotide
  source 1..20: mol_type = other DNA
gggcataaactgagtgtttg

SEQ ID NO: 7561 - DNA, 20 bp, synthetic construct
  misc_feature 1..20: note = Description of Artificial Sequence: Synthetic oligonucleotide
  source 1..20: mol_type = other DNA
ggcataaactgagtgtttgc

SEQ ID NO: 7562 - DNA, 20 bp, synthetic construct
  misc_feature 1..20: note = Description of Artificial Sequence: Synthetic oligonucleotide
  source 1..20: mol_type = other DNA
gcataaactgagtgtttgca

SEQ ID NO: 7563 - DNA, 20 bp, synthetic construct
  misc_feature 1..20: note = Description of Artificial Sequence: Synthetic oligonucleotide
  source 1..20: mol_type = other DNA
cataaactgagtgtttgcat

SEQ ID NO: 7564 - DNA, 20 bp, synthetic construct
  misc_feature 1..20: note = Description of Artificial Sequence: Synthetic oligonucleotide
  source 1..20: mol_type = other DNA
ataaactgagtgtttgcata

SEQ ID NO: 7565 - DNA, 20 bp, synthetic construct
  misc_feature 1..20: note = Description of Artificial Sequence: Synthetic oligonucleotide
  source 1..20: mol_type = other DNA
taaactgagtgtttgcatag

SEQ ID NO: 7566 - DNA, 20 bp, synthetic construct
  misc_feature 1..20: note = Description of Artificial Sequence: Synthetic oligonucleotide
  source 1..20: mol_type = other DNA
aaactgagtgtttgcatagc

SEQ ID NO: 7567 - DNA, 20 bp, synthetic construct
  misc_feature 1..20: note = Description of Artificial Sequence: Synthetic oligonucleotide
  source 1..20: mol_type = other DNA
aactgagtgtttgcatagct

SEQ ID NO: 7568 - DNA, 20 bp, synthetic construct
  misc_feature 1..20: note = Description of Artificial Sequence: Synthetic oligonucleotide
  source 1..20: mol_type = other DNA
actgagtgtttgcatagctc

SEQ ID NO: 7569 - DNA, 20 bp, synthetic construct
  misc_feature 1..20: note = Description of Artificial Sequence: Synthetic oligonucleotide
  source 1..20: mol_type = other DNA
ctgagtgtttgcatagctct

SEQ ID NO: 7570 - DNA, 20 bp, synthetic construct
  misc_feature 1..20: note = Description of Artificial Sequence: Synthetic oligonucleotide
  source 1..20: mol_type = other DNA
tgagtgtttgcatagctctg

SEQ ID NO: 7571 - DNA, 20 bp, synthetic construct
  misc_feature 1..20: note = Description of Artificial Sequence: Synthetic oligonucleotide
  source 1..20: mol_type = other DNA
gagtgtttgcatagctctgt

SEQ ID NO: 7572 - DNA, 20 bp, synthetic construct
  misc_feature 1..20: note = Description of Artificial Sequence: Synthetic oligonucleotide
  source 1..20: mol_type = other DNA
agtgtttgcatagctctgtg

SEQ ID NO: 7573 - DNA, 20 bp, synthetic construct
  misc_feature 1..20: note = Description of Artificial Sequence: Synthetic oligonucleotide
  source 1..20: mol_type = other DNA
gtgtttgcatagctctgtgg

SEQ ID NO: 7574 - DNA, 20 bp, synthetic construct
  misc_feature 1..20: note = Description of Artificial Sequence: Synthetic oligonucleotide
  source 1..20: mol_type = other DNA
tgtttgcatagctctgtggt

SEQ ID NO: 7575 - DNA, 20 bp, synthetic construct
  misc_feature 1..20: note = Description of Artificial Sequence: Synthetic oligonucleotide
  source 1..20: mol_type = other DNA
gtttgcatagctctgtggtg

SEQ ID NO: 7576 - DNA, 20 bp, synthetic construct
  misc_feature 1..20: note = Description of Artificial Sequence: Synthetic oligonucleotide
  source 1..20: mol_type = other DNA
tttgcatagctctgtggtgt

SEQ ID NO: 7577 - DNA, 20 bp, synthetic construct
  misc_feature 1..20: note = Description of Artificial Sequence: Synthetic oligonucleotide
  source 1..20: mol_type = other DNA
ttgcatagctctgtggtgtt

SEQ ID NO: 7578 - DNA, 20 bp, synthetic construct
  misc_feature 1..20: note = Description of Artificial Sequence: Synthetic oligonucleotide
  source 1..20: mol_type = other DNA
tgcatagctctgtggtgttt

SEQ ID NO: 7579 - DNA, 20 bp, synthetic construct
  misc_feature 1..20: note = Description of Artificial Sequence: Synthetic oligonucleotide
  source 1..20: mol_type = other DNA
gcatagctctgtggtgtttg

SEQ ID NO: 7580 - DNA, 20 bp, synthetic construct
  misc_feature 1..20: note = Description of Artificial Sequence: Synthetic oligonucleotide
  source 1..20: mol_type = other DNA
catagctctgtggtgtttgg

SEQ ID NO: 7581 - DNA, 20 bp, synthetic construct
  misc_feature 1..20: note = Description of Artificial Sequence: Synthetic oligonucleotide
  source 1..20: mol_type = other DNA
atagctctgtggtgtttggt

SEQ ID NO: 7582 - DNA, 20 bp, synthetic construct
  misc_feature 1..20: note = Description of Artificial Sequence: Synthetic oligonucleotide
  source 1..20: mol_type = other DNA
tagctctgtggtgtttggtg

SEQ ID NO: 7583 - DNA, 20 bp, synthetic construct
  misc_feature 1..20: note = Description of Artificial Sequence: Synthetic oligonucleotide
  source 1..20: mol_type = other DNA
agctctgtggtgtttggtgt

SEQ ID NO: 7584 - DNA, 20 bp, synthetic construct
  misc_feature 1..20: note = Description of Artificial Sequence: Synthetic oligonucleotide
  source 1..20: mol_type = other DNA
gctctgtggtgtttggtgtg

SEQ ID NO: 7585 - DNA, 20 bp, synthetic construct
  misc_feature 1..20: note = Description of Artificial Sequence: Synthetic oligonucleotide
  source 1..20: mol_type = other DNA
ctctgtggtgtttggtgtgt

SEQ ID NO: 7586 - DNA, 20 bp, synthetic construct
  misc_feature 1..20: note = Description of Artificial Sequence: Synthetic oligonucleotide
  source 1..20: mol_type = other DNA
tctgtggtgtttggtgtgtt

SEQ ID NO: 7587 - DNA, 20 bp, synthetic construct
  misc_feature 1..20: note = Description of Artificial Sequence: Synthetic oligonucleotide
  source 1..20: mol_type = other DNA
ctgtggtgtttggtgtgttt

SEQ ID NO: 7588 - DNA, 20 bp, synthetic construct
  misc_feature 1..20: note = Description of Artificial Sequence: Synthetic oligonucleotide
  source 1..20: mol_type = other DNA
tgtggtgtttggtgtgtttg

SEQ ID NO: 7589 - DNA, 20 bp, synthetic construct
  misc_feature 1..20: note = Description of Artificial Sequence: Synthetic oligonucleotide
  source 1..20: mol_type = other DNA
gtggtgtttggtgtgtttgc

SEQ ID NO: 7590 - DNA, 20 bp, synthetic construct
  misc_feature 1..20: note = Description of Artificial Sequence: Synthetic oligonucleotide
  source 1..20: mol_type = other DNA
tggtgtttggtgtgtttgct

SEQ ID NO: 7591 - DNA, 20 bp, synthetic construct
  misc_feature 1..20: note = Description of Artificial Sequence: Synthetic oligonucleotide
  source 1..20: mol_type = other DNA
ggtgtttggtgtgtttgctt

SEQ ID NO: 7592 - DNA, 20 bp, synthetic construct
  misc_feature 1..20: note = Description of Artificial Sequence: Synthetic oligonucleotide
  source 1..20: mol_type = other DNA
gtgtttggtgtgtttgcttg

SEQ ID NO: 7593 - DNA, 20 bp, synthetic construct
  misc_feature 1..20: note = Description of Artificial Sequence: Synthetic oligonucleotide
  source 1..20: mol_type = other DNA
tgtttggtgtgtttgcttgt

SEQ ID NO: 7594 - DNA, 20 bp, synthetic construct
  misc_feature 1..20: note = Description of Artificial Sequence: Synthetic oligonucleotide
  source 1..20: mol_type = other DNA
gtttggtgtgtttgcttgtg

SEQ ID NO: 7595 - DNA, 20 bp, synthetic construct
  misc_feature 1..20: note = Description of Artificial Sequence: Synthetic oligonucleotide
  source 1..20: mol_type = other DNA
tttggtgtgtttgcttgtgt

SEQ ID NO: 7596 - DNA, 20 bp, synthetic construct
  misc_feature 1..20: note = Description of Artificial Sequence: Synthetic oligonucleotide
  source 1..20: mol_type = other DNA
ttggtgtgtttgcttgtgtt

SEQ ID NO: 7597 - DNA, 20 bp, synthetic construct
  misc_feature 1..20: note = Description of Artificial Sequence: Synthetic oligonucleotide
  source 1..20: mol_type = other DNA
tggtgtgtttgcttgtgttt

SEQ ID NO: 7598 - DNA, 20 bp, synthetic construct
  misc_feature 1..20: note = Description of Artificial Sequence: Synthetic oligonucleotide
  source 1..20: mol_type = other DNA
ggtgtgtttgcttgtgtttg

SEQ ID NO: 7599 - DNA, 20 bp, synthetic construct
  misc_feature 1..20: note = Description of Artificial Sequence: Synthetic oligonucleotide
  source 1..20: mol_type = other DNA
gtgtgtttgcttgtgtttga

SEQ ID NO: 7600 - DNA, 20 bp, synthetic construct
  misc_feature 1..20: note = Description of Artificial Sequence: Synthetic oligonucleotide
  source 1..20: mol_type = other DNA
tgtgtttgcttgtgtttgag

SEQ ID NO: 7601 - DNA, 20 bp, synthetic construct
  misc_feature 1..20: note = Description of Artificial Sequence: Synthetic oligonucleotide
  source 1..20: mol_type = other DNA
gtgtttgcttgtgtttgagt

SEQ ID NO: 7602 - DNA, 20 bp, synthetic construct
  misc_feature 1..20: note = Description of Artificial Sequence: Synthetic oligonucleotide
  source 1..20: mol_type = other DNA
tgtttgcttgtgtttgagtt

SEQ ID NO: 7603 - DNA, 20 bp, synthetic construct
  misc_feature 1..20: note = Description of Artificial Sequence: Synthetic oligonucleotide
  source 1..20: mol_type = other DNA
gtttgcttgtgtttgagttt

SEQ ID NO: 7604 - DNA, 20 bp, synthetic construct
  misc_feature 1..20: note = Description of Artificial Sequence: Synthetic oligonucleotide
  source 1..20: mol_type = other DNA
tttgcttgtgtttgagtttt

SEQ ID NO: 7605 - DNA, 20 bp, synthetic construct
  misc_feature 1..20: note = Description of Artificial Sequence: Synthetic oligonucleotide
  source 1..20: mol_type = other DNA
ttgcttgtgtttgagttttc

SEQ ID NO: 7606 - DNA, 20 bp, synthetic construct
  misc_feature 1..20: note = Description of Artificial Sequence: Synthetic oligonucleotide
  source 1..20: mol_type = other DNA
tgcttgtgtttgagttttcc

SEQ ID NO: 7607 - DNA, 20 bp, synthetic construct
  misc_feature 1..20: note = Description of Artificial Sequence: Synthetic oligonucleotide
  source 1..20: mol_type = other DNA
gcttgtgtttgagttttcct

SEQ ID NO: 7608 - DNA, 20 bp, synthetic construct
  misc_feature 1..20: note = Description of Artificial Sequence: Synthetic oligonucleotide
  source 1..20: mol_type = other DNA
cttgtgtttgagttttcctt

SEQ ID NO: 7609 - DNA, 20 bp, synthetic construct
  misc_feature 1..20: note = Description of Artificial Sequence: Synthetic oligonucleotide
  source 1..20: mol_type = other DNA
ttgtgtttgagttttccttt

SEQ ID NO: 7610 - DNA, 20 bp, synthetic construct
  misc_feature 1..20: note = Description of Artificial Sequence: Synthetic oligonucleotide
  source 1..20: mol_type = other DNA
tgtgtttgagttttcctttt

SEQ ID NO: 7611 - DNA, 20 bp, synthetic construct
  misc_feature 1..20: note = Description of Artificial Sequence: Synthetic oligonucleotide
  source 1..20: mol_type = other DNA
gtgtttgagttttccttttt

SEQ ID NO: 7612 - DNA, 20 bp, synthetic construct
  misc_feature 1..20: note = Description of Artificial Sequence: Synthetic oligonucleotide
  source 1..20: mol_type = other DNA
tgtttgagttttcctttttt

SEQ ID NO: 7613 - DNA, 20 bp, synthetic construct
  misc_feature 1..20: note = Description of Artificial Sequence: Synthetic oligonucleotide
  source 1..20: mol_type = other DNA
gtttgagttttccttttttt

SEQ ID NO: 7614 - DNA, 20 bp, synthetic construct
  misc_feature 1..20: note = Description of Artificial Sequence: Synthetic oligonucleotide
  source 1..20: mol_type = other DNA
tttgagttttcctttttttt

SEQ ID NO: 7615 - DNA, 20 bp, synthetic construct
  misc_feature 1..20: note = Description of Artificial Sequence: Synthetic oligonucleotide
  source 1..20: mol_type = other DNA
ttgagttttccttttttttt

SEQ ID NO: 7616 - DNA, 20 bp, synthetic construct
  misc_feature 1..20: note = Description of Artificial Sequence: Synthetic oligonucleotide
  source 1..20: mol_type = other DNA
tgagttttcctttttttttt

SEQ ID NO: 7617 - DNA, 20 bp, synthetic construct
  misc_feature 1..20: note = Description of Artificial Sequence: Synthetic oligonucleotide
  source 1..20: mol_type = other DNA
gagttttccttttttttttt

SEQ ID NO: 7618 - DNA, 20 bp, synthetic construct
  misc_feature 1..20: note = Description of Artificial Sequence: Synthetic oligonucleotide
  source 1..20: mol_type = other DNA
agttttcctttttttttttt

SEQ ID NO: 7619 - DNA, 20 bp, synthetic construct
  misc_feature 1..20: note = Description of Artificial Sequence: Synthetic oligonucleotide
  source 1..20: mol_type = other DNA
gttttccttttttttttttt

SEQ ID NO: 7620 - DNA, 20 bp, synthetic construct
  misc_feature 1..20: note = Description of Artificial Sequence: Synthetic oligonucleotide
  source 1..20: mol_type = other DNA
ttttcctttttttttttttt

SEQ ID NO: 7621 - DNA, 20 bp, synthetic construct
  misc_feature 1..20: note = Description of Artificial Sequence: Synthetic oligonucleotide
  source 1..20: mol_type = other DNA
tttccttttttttttttttt

SEQ ID NO: 7622 - DNA, 20 bp, synthetic construct
  misc_feature 1..20: note = Description of Artificial Sequence: Synthetic oligonucleotide
  source 1..20: mol_type = other DNA
ttcctttttttttttttttt

SEQ ID NO: 7623 - DNA, 20 bp, synthetic construct
  misc_feature 1..20: note = Description of Artificial Sequence: Synthetic oligonucleotide
  source 1..20: mol_type = other DNA
tccttttttttttttttttt

SEQ ID NO: 7624 - DNA, 20 bp, synthetic construct
  misc_feature 1..20: note = Description of Artificial Sequence: Synthetic oligonucleotide
  source 1..20: mol_type = other DNA
cctttttttttttttttttt

SEQ ID NO: 7625 - DNA, 20 bp, synthetic construct
  misc_feature 1..20: note = Description of Artificial Sequence: Synthetic oligonucleotide
  source 1..20: mol_type = other DNA
cttttttttttttttttttt

SEQ ID NO: 7626 - DNA, 20 bp, synthetic construct
  misc_feature 1..20: note = Description of Artificial Sequence: Synthetic oligonucleotide
  source 1..20: mol_type = other DNA
tttttttttttttttttttt

SEQ ID NO: 7627 - DNA, 20 bp, synthetic construct
  misc_feature 1..20: note = Description of Artificial Sequence: Synthetic oligonucleotide
  source 1..20: mol_type = other DNA
ttttttttttttttttttta

SEQ ID NO: 7628 - DNA, 20 bp, synthetic construct
  misc_feature 1..20: note = Description of Artificial Sequence: Synthetic oligonucleotide
  source 1..20: mol_type = other DNA
ttttttttttttttttttaa

SEQ ID NO: 7629 - DNA, 20 bp, synthetic construct
  misc_feature 1..20: note = Description of Artificial Sequence: Synthetic oligonucleotide
  source 1..20: mol_type = other DNA
tttttttttttttttttaat

SEQ ID NO: 7630 - DNA, 20 bp, synthetic construct
  misc_feature 1..20: note = Description of Artificial Sequence: Synthetic oligonucleotide
  source 1..20: mol_type = other DNA
ttttttttttttttttaatt

SEQ ID NO: 7631 - DNA, 20 bp, synthetic construct
  misc_feature 1..20: note = Description of Artificial Sequence: Synthetic oligonucleotide
  source 1..20: mol_type = other DNA
tttttttttttttttaattg

SEQ ID NO: 7632 - DNA, 20 bp, synthetic construct
  misc_feature 1..20: note = Description of Artificial Sequence: Synthetic oligonucleotide
  source 1..20: mol_type = other DNA
ttttttttttttttaattga

SEQ ID NO: 7633 - DNA, 20 bp, synthetic construct
  misc_feature 1..20: note = Description of Artificial Sequence: Synthetic oligonucleotide
  source 1..20: mol_type = other DNA
tttttttttttttaattgaa

SEQ ID NO: 7634 - DNA, 20 bp, synthetic construct
  misc_feature 1..20: note = Description of Artificial Sequence: Synthetic oligonucleotide
  source 1..20: mol_type = other DNA
ttttttttttttaattgaaa

SEQ ID NO: 7635 - DNA, 20 bp, synthetic construct
  misc_feature 1..20: note = Description of Artificial Sequence: Synthetic oligonucleotide
  source 1..20: mol_type = other DNA
tttttttttttaattgaaat

SEQ ID NO: 7636 - DNA, 20 bp, synthetic construct
  misc_feature 1..20: note = Description of Artificial Sequence: Synthetic oligonucleotide
  source 1..20: mol_type = other DNA
ttttttttttaattgaaatg

SEQ ID NO: 7637 - DNA, 20 bp, synthetic construct
  misc_feature 1..20: note = Description of Artificial Sequence: Synthetic oligonucleotide
  source 1..20: mol_type = other DNA
tttttttttaattgaaatgg

SEQ ID NO: 7638 - DNA, 20 bp, synthetic construct
  misc_feature 1..20: note = Description of Artificial Sequence: Synthetic oligonucleotide
  source 1..20: mol_type = other DNA
ttttttttaattgaaatgga

SEQ ID NO: 7639 - DNA, 20 bp, synthetic construct
  misc_feature 1..20: note = Description of Artificial Sequence: Synthetic oligonucleotide
  source 1..20: mol_type = other DNA
tttttttaattgaaatggag

SEQ ID NO: 7640 - DNA, 20 bp, synthetic construct
  misc_feature 1..20: note = Description of Artificial Sequence: Synthetic oligonucleotide
  source 1..20: mol_type = other DNA
ttttttaattgaaatggagt

SEQ ID NO: 7641 - DNA, 20 bp, synthetic construct
  misc_feature 1..20: note = Description of Artificial Sequence: Synthetic oligonucleotide
  source 1..20: mol_type = other DNA
tttttaattgaaatggagtc

SEQ ID NO: 7642 - DNA, 20 bp, synthetic construct
  misc_feature 1..20: note = Description of Artificial Sequence: Synthetic oligonucleotide
  source 1..20: mol_type = other DNA
ttttaattgaaatggagtct

SEQ ID NO: 7643 - DNA, 20 bp, synthetic construct
  misc_feature 1..20: note = Description of Artificial Sequence: Synthetic oligonucleotide
  source 1..20: mol_type = other DNA
tttaattgaaatggagtctc

SEQ ID NO: 7644 - DNA, 20 bp, synthetic construct
  misc_feature 1..20: note = Description of Artificial Sequence: Synthetic oligonucleotide
  source 1..20: mol_type = other DNA
ttaattgaaatggagtctca

SEQ ID NO: 7645 - DNA, 20 bp, synthetic construct
  misc_feature 1..20: note = Description of Artificial Sequence: Synthetic oligonucleotide
  source 1..20: mol_type = other DNA
taattgaaatggagtctcac

SEQ ID NO: 7646 - DNA, 20 bp, synthetic construct
  misc_feature 1..20: note = Description of Artificial Sequence: Synthetic oligonucleotide
  source 1..20: mol_type = other DNA
aattgaaatggagtctcact

SEQ ID NO: 7647 - DNA, 20 bp, synthetic construct
  misc_feature 1..20: note = Description of Artificial Sequence: Synthetic oligonucleotide
  source 1..20: mol_type = other DNA
attgaaatggagtctcactt

SEQ ID NO: 7648 - DNA, 20 bp, synthetic construct
  misc_feature 1..20: note = Description of Artificial Sequence: Synthetic oligonucleotide
  source 1..20: mol_type = other DNA
ttgaaatggagtctcacttt

SEQ ID NO: 7649 - DNA, 20 bp, synthetic construct
  misc_feature 1..20: note = Description of Artificial Sequence: Synthetic oligonucleotide
  source 1..20: mol_type = other DNA
tgaaatggagtctcactttg

SEQ ID NO: 7650 - DNA, 20 bp, synthetic construct
  misc_feature 1..20: note = Description of Artificial Sequence: Synthetic oligonucleotide
  source 1..20: mol_type = other DNA
gaaatggagtctcactttgt

SEQ ID NO: 7651 - DNA, 20 bp, synthetic construct
  misc_feature 1..20: note = Description of Artificial Sequence: Synthetic oligonucleotide
  source 1..20: mol_type = other DNA
aaatggagtctcactttgtc

SEQ ID NO: 7652 - DNA, 20 bp, synthetic construct
  misc_feature 1..20: note = Description of Artificial Sequence: Synthetic oligonucleotide
  source 1..20: mol_type = other DNA
aatggagtctcactttgtct

SEQ ID NO: 7653 - DNA, 20 bp, synthetic construct
  misc_feature 1..20: note = Description of Artificial Sequence: Synthetic oligonucleotide
  source 1..20: mol_type = other DNA
atggagtctcactttgtctc

SEQ ID NO: 7654 - DNA, 20 bp, synthetic construct
  misc_feature 1..20: note = Description of Artificial Sequence: Synthetic oligonucleotide
  source 1..20: mol_type = other DNA
tggagtctcactttgtctcc

SEQ ID NO: 7655 - DNA, 20 bp, synthetic construct
  misc_feature 1..20: note = Description of Artificial Sequence: Synthetic oligonucleotide
  source 1..20: mol_type = other DNA
ggagtctcactttgtctccc

SEQ ID NO: 7656 - DNA, 20 bp, synthetic construct
  misc_feature 1..20: note = Description of Artificial Sequence: Synthetic oligonucleotide
  source 1..20: mol_type = other DNA
gagtctcactttgtctccca

SEQ ID NO: 7657 - DNA, 20 bp, synthetic construct
  misc_feature 1..20: note = Description of Artificial Sequence: Synthetic oligonucleotide
  source 1..20: mol_type = other DNA
agtctcactttgtctcccag

SEQ ID NO: 7658 - DNA, 20 bp, synthetic construct
  misc_feature 1..20: note = Description of Artificial Sequence: Synthetic oligonucleotide
  source 1..20: mol_type = other DNA
gtctcactttgtctcccaga

SEQ ID NO: 7659 - DNA, 20 bp, synthetic construct
  misc_feature 1..20: note = Description of Artificial Sequence: Synthetic oligonucleotide
  source 1..20: mol_type = other DNA
tctcactttgtctcccagat

SEQ ID NO: 7660 - DNA, 20 bp, synthetic construct
  misc_feature 1..20: note = Description of Artificial Sequence: Synthetic oligonucleotide
  source 1..20: mol_type = other DNA
ctcactttgtctcccagatt

SEQ ID NO: 7661 - DNA, 20 bp, synthetic construct
  misc_feature 1..20: note = Description of Artificial Sequence: Synthetic oligonucleotide
  source 1..20: mol_type = other DNA
tcactttgtctcccagatta

SEQ ID NO: 7662 - DNA, 20 bp, synthetic construct
  misc_feature 1..20: note = Description of Artificial Sequence: Synthetic oligonucleotide
  source 1..20: mol_type = other DNA
cactttgtctcccagattat

SEQ ID NO: 7663 - DNA, 20 bp, synthetic construct
  misc_feature 1..20: note = Description of Artificial Sequence: Synthetic oligonucleotide
  source 1..20: mol_type = other DNA
actttgtctcccagattata

SEQ ID NO: 7664 - DNA, 20 bp, synthetic construct
  misc_feature 1..20: note = Description of Artificial Sequence: Synthetic oligonucleotide
  source 1..20: mol_type = other DNA
ctttgtctcccagattatag

SEQ ID NO: 7665 - DNA, 20 bp, synthetic construct
  misc_feature 1..20: note = Description of Artificial Sequence: Synthetic oligonucleotide
  source 1..20: mol_type = other DNA
tttgtctcccagattatagt

SEQ ID NO: 7666 - DNA, 20 bp, synthetic construct
  misc_feature 1..20: note = Description of Artificial Sequence: Synthetic oligonucleotide
  source 1..20: mol_type = other DNA
ttgtctcccagattatagtg

SEQ ID NO: 7667 - DNA, 20 bp, synthetic construct
  misc_feature 1..20: note = Description of Artificial Sequence: Synthetic oligonucleotide
  source 1..20: mol_type = other DNA
tgtctcccagattatagtgc

SEQ ID NO: 7668 - DNA, 20 bp, synthetic construct
  misc_feature 1..20: note = Description of Artificial Sequence: Synthetic oligonucleotide
  source 1..20: mol_type = other DNA
gtctcccagattatagtgca

SEQ ID NO: 7669 - DNA, 20 bp, synthetic construct
  misc_feature 1..20: note = Description of Artificial Sequence: Synthetic oligonucleotide
  source 1..20: mol_type = other DNA
tctcccagattatagtgcag

SEQ ID NO: 7670 - DNA, 20 bp, synthetic construct
  misc_feature 1..20: note = Description of Artificial Sequence: Synthetic oligonucleotide
  source 1..20: mol_type = other DNA
ctcccagattatagtgcagt

SEQ ID NO: 7671 - DNA, 20 bp, synthetic construct
  misc_feature 1..20: note = Description of Artificial Sequence: Synthetic oligonucleotide
  source 1..20: mol_type = other DNA
tcccagattatagtgcagtg

SEQ ID NO: 7672 - DNA, 20 bp, synthetic construct
  misc_feature 1..20: note = Description of Artificial Sequence: Synthetic oligonucleotide
  source 1..20: mol_type = other DNA
cccagattatagtgcagtgg

SEQ ID NO: 7673 - DNA, 20 bp, synthetic construct
  misc_feature 1..20: note = Description of Artificial Sequence: Synthetic oligonucleotide
  source 1..20: mol_type = other DNA
ccagattatagtgcagtggc

SEQ ID NO: 7674 - DNA, 20 bp, synthetic construct
  misc_feature 1..20: note = Description of Artificial Sequence: Synthetic oligonucleotide
  source 1..20: mol_type = other DNA
cagattatagtgcagtggcg

SEQ ID NO: 7675 - DNA, 20 bp, synthetic construct
  misc_feature 1..20: note = Description of Artificial Sequence: Synthetic oligonucleotide
  source 1..20: mol_type = other DNA
agattatagtgcagtggcgt

SEQ ID NO: 7676 - DNA, 20 bp, synthetic construct
  misc_feature 1..20: note = Description of Artificial Sequence: Synthetic oligonucleotide
  source 1..20: mol_type = other DNA
gattatagtgcagtggcgtg

SEQ ID NO: 7677 - DNA, 20 bp, synthetic construct
  misc_feature 1..20: note = Description of Artificial Sequence: Synthetic oligonucleotide
  source 1..20: mol_type = other DNA
attatagtgcagtggcgtga

SEQ ID NO: 7678 - DNA, 20 bp, synthetic construct
  misc_feature 1..20: note = Description of Artificial Sequence: Synthetic oligonucleotide
  source 1..20: mol_type = other DNA
ttatagtgcagtggcgtgat

SEQ ID NO: 7679 - DNA, 20 bp, synthetic construct
  misc_feature 1..20: note = Description of Artificial Sequence: Synthetic oligonucleotide
  source 1..20: mol_type = other DNA
tatagtgcagtggcgtgatc

SEQ ID NO: 7680 - DNA, 20 bp, synthetic construct
  misc_feature 1..20: note = Description of Artificial Sequence: Synthetic oligonucleotide
  source 1..20: mol_type = other DNA
atagtgcagtggcgtgatct

SEQ ID NO: 7681 - DNA, 20 bp, synthetic construct
  misc_feature 1..20: note = Description of Artificial Sequence: Synthetic oligonucleotide
  source 1..20: mol_type = other DNA
tagtgcagtggcgtgatctc

SEQ ID NO: 7682 - DNA, 20 bp, synthetic construct
  misc_feature 1..20: note = Description of Artificial Sequence: Synthetic oligonucleotide
  source 1..20: mol_type = other DNA
agtgcagtggcgtgatctcg

SEQ ID NO: 7683 - DNA, 20 bp, synthetic construct
  misc_feature 1..20: note = Description of Artificial Sequence: Synthetic oligonucleotide
  source 1..20: mol_type = other DNA
gtgcagtggcgtgatctcgg

SEQ ID NO: 7684 - DNA, 20 bp, synthetic construct
  misc_feature 1..20: note = Description of Artificial Sequence: Synthetic oligonucleotide
  source 1..20: mol_type = other DNA
tgcagtggcgtgatctcggc

SEQ ID NO: 7685 - DNA, 20 bp, synthetic construct
  misc_feature 1..20: note = Description of Artificial Sequence: Synthetic oligonucleotide
  source 1..20: mol_type = other DNA
gcagtggcgtgatctcggct

SEQ ID NO: 7686 - DNA, 20 bp, synthetic construct
  misc_feature 1..20: note = Description of Artificial Sequence: Synthetic oligonucleotide
  source 1..20: mol_type = other DNA
cagtggcgtgatctcggctc

SEQ ID NO: 7687 - DNA, 20 bp, synthetic construct
  misc_feature 1..20: note = Description of Artificial Sequence: Synthetic oligonucleotide
  source 1..20: mol_type = other DNA
agtggcgtgatctcggctca

SEQ ID NO: 7688 - DNA, 20 bp, synthetic construct
  misc_feature 1..20: note = Description of Artificial Sequence: Synthetic oligonucleotide
  source 1..20: mol_type = other DNA
gtggcgtgatctcggctcac

SEQ ID NO: 7689 - DNA, 20 bp, synthetic construct
  misc_feature 1..20: note = Description of Artificial Sequence: Synthetic oligonucleotide
  source 1..20: mol_type = other DNA
tggcgtgatctcggctcact

SEQ ID NO: 7690 - DNA, 20 bp, synthetic construct
  misc_feature 1..20: note = Description of Artificial Sequence: Synthetic oligonucleotide
  source 1..20: mol_type = other DNA
ggcgtgatctcggctcactg

SEQ ID NO: 7691 - DNA, 20 bp, synthetic construct
  misc_feature 1..20: note = Description of Artificial Sequence: Synthetic oligonucleotide
  source 1..20: mol_type = other DNA
gcgtgatctcggctcactgc

SEQ ID NO: 7692 - DNA, 20 bp, synthetic construct
  misc_feature 1..20: note = Description of Artificial Sequence: Synthetic oligonucleotide
  source 1..20: mol_type = other DNA
cgtgatctcggctcactgca

SEQ ID NO: 7693 - DNA, 20 bp, synthetic construct
  misc_feature 1..20: note = Description of Artificial Sequence: Synthetic oligonucleotide
  source 1..20: mol_type = other DNA
gtgatctcggctcactgcaa

SEQ ID NO: 7694 - DNA, 20 bp, synthetic construct
  misc_feature 1..20: note = Description of Artificial Sequence: Synthetic oligonucleotide
  source 1..20: mol_type = other DNA
tgatctcggctcactgcaac

SEQ ID NO: 7695 - DNA, 20 bp, synthetic construct
  misc_feature 1..20: note = Description of Artificial Sequence: Synthetic oligonucleotide
  source 1..20: mol_type = other DNA
gatctcggctcactgcaacc

SEQ ID NO: 7696 - DNA, 20 bp, synthetic construct
  misc_feature 1..20: note = Description of Artificial Sequence: Synthetic oligonucleotide
  source 1..20: mol_type = other DNA
atctcggctcactgcaacct

SEQ ID NO: 7697 - DNA, 20 bp, synthetic construct
  misc_feature 1..20: note = Description of Artificial Sequence: Synthetic oligonucleotide
  source 1..20: mol_type = other DNA
tctcggctcactgcaacctc

SEQ ID NO: 7698 - DNA, 20 bp, synthetic construct
  misc_feature 1..20: note = Description of Artificial Sequence: Synthetic oligonucleotide
  source 1..20: mol_type = other DNA
ctcggctcactgcaacctct

SEQ ID NO: 7699 - DNA, 20 bp, synthetic construct
  misc_feature 1..20: note = Description of Artificial Sequence: Synthetic oligonucleotide
  source 1..20: mol_type = other DNA
tcggctcactgcaacctctg

SEQ ID NO: 7700 - DNA, 20 bp, synthetic construct
  misc_feature 1..20: note = Description of Artificial Sequence: Synthetic oligonucleotide
  source 1..20: mol_type = other DNA
cggctcactgcaacctctgc

SEQ ID NO: 7701 - DNA, 20 bp, synthetic construct
  misc_feature 1..20: note = Description of Artificial Sequence: Synthetic oligonucleotide
  source 1..20: mol_type = other DNA
ggctcactgcaacctctgcc

SEQ ID NO: 7702 - DNA, 20 bp, synthetic construct
  misc_feature 1..20: note = Description of Artificial Sequence: Synthetic oligonucleotide
  source 1..20: mol_type = other DNA
gctcactgcaacctctgcct

SEQ ID NO: 7703 - DNA, 20 bp, synthetic construct
  misc_feature 1..20: note = Description of Artificial Sequence: Synthetic oligonucleotide
  source 1..20: mol_type = other DNA
ctcactgcaacctctgcctc

SEQ ID NO: 7704 - DNA, 20 bp, synthetic construct
  misc_feature 1..20: note = Description of Artificial Sequence: Synthetic oligonucleotide
  source 1..20: mol_type = other DNA
tcactgcaacctctgcctcc

SEQ ID NO: 7705 - DNA, 20 bp, synthetic construct
  misc_feature 1..20: note = Description of Artificial Sequence: Synthetic oligonucleotide
  source 1..20: mol_type = other DNA
cactgcaacctctgcctcct

SEQ ID NO: 7706 - DNA, 20 bp, synthetic construct
  misc_feature 1..20: note = Description of Artificial Sequence: Synthetic oligonucleotide
  source 1..20: mol_type = other DNA
actgcaacctctgcctcctg

SEQ ID NO: 7707 - DNA, 20 bp, synthetic construct
  misc_feature 1..20: note = Description of Artificial Sequence: Synthetic oligonucleotide
  source 1..20: mol_type = other DNA
ctgcaacctctgcctcctga

SEQ ID NO: 7708 - DNA, 20 bp, synthetic construct
  misc_feature 1..20: note = Description of Artificial Sequence: Synthetic oligonucleotide
  source 1..20: mol_type = other DNA
tgcaacctctgcctcctgag

SEQ ID NO: 7709 - DNA, 20 bp, synthetic construct
  misc_feature 1..20: note = Description of Artificial Sequence: Synthetic oligonucleotide
  source 1..20: mol_type = other DNA
gcaacctctgcctcctgagt

SEQ ID NO: 7710 - DNA, 20 bp, synthetic construct
  misc_feature 1..20: note = Description of Artificial Sequence: Synthetic oligonucleotide
  source 1..20: mol_type = other DNA
caacctctgcctcctgagtt

SEQ ID NO: 7711 - DNA, 20 bp, synthetic construct
  misc_feature 1..20: note = Description of Artificial Sequence: Synthetic oligonucleotide
  source 1..20: mol_type = other DNA
aacctctgcctcctgagttc

SEQ ID NO: 7712 - DNA, 20 bp, synthetic construct
  misc_feature 1..20: note = Description of Artificial Sequence: Synthetic oligonucleotide
  source 1..20: mol_type = other DNA
acctctgcctcctgagttca

SEQ ID NO: 7713 - DNA, 20 bp, synthetic construct
  misc_feature 1..20: note = Description of Artificial Sequence: Synthetic oligonucleotide
  source 1..20: mol_type = other DNA
cctctgcctcctgagttcaa

SEQ ID NO: 7714 - DNA, 20 bp, synthetic construct
  misc_feature 1..20: note = Description of Artificial Sequence: Synthetic oligonucleotide
  source 1..20: mol_type = other DNA
ctctgcctcctgagttcaag

SEQ ID NO: 7715 - DNA, 20 bp, synthetic construct
  misc_feature 1..20: note = Description of Artificial Sequence: Synthetic oligonucleotide
  source 1..20: mol_type = other DNA
tctgcctcctgagttcaagc

SEQ ID NO: 7716 - DNA, 20 bp, synthetic construct
  misc_feature 1..20: note = Description of Artificial Sequence: Synthetic oligonucleotide
  source 1..20: mol_type = other DNA
ctgcctcctgagttcaagca

SEQ ID NO: 7717 - DNA, 20 bp, synthetic construct
  misc_feature 1..20: note = Description of Artificial Sequence: Synthetic oligonucleotide
  source 1..20: mol_type = other DNA
tgcctcctgagttcaagcaa

SEQ ID NO: 7718 - DNA, 20 bp, synthetic construct
  misc_feature 1..20: note = Description of Artificial Sequence: Synthetic oligonucleotide
  source 1..20: mol_type = other DNA
gcctcctgagttcaagcaat

SEQ ID NO: 7719 - DNA, 20 bp, synthetic construct
  misc_feature 1..20: note = Description of Artificial Sequence: Synthetic oligonucleotide
  source 1..20: mol_type = other DNA
cctcctgagttcaagcaatc

SEQ ID NO: 7720 - DNA, 20 bp, synthetic construct
  misc_feature 1..20: note = Description of Artificial Sequence: Synthetic oligonucleotide
  source 1..20: mol_type = other DNA
ctcctgagttcaagcaatcc

SEQ ID NO: 7721 - DNA, 20 bp, synthetic construct
  misc_feature 1..20: note = Description of Artificial Sequence: Synthetic oligonucleotide
  source 1..20: mol_type = other DNA
tcctgagttcaagcaatcct

SEQ ID NO: 7722 - DNA, 20 bp, synthetic construct
  misc_feature 1..20: note = Description of Artificial Sequence: Synthetic oligonucleotide
  source 1..20: mol_type = other DNA
cctgagttcaagcaatcctc

SEQ ID NO: 7723 - DNA, 20 bp, synthetic construct
  misc_feature 1..20: note = Description of Artificial Sequence: Synthetic oligonucleotide
  source 1..20: mol_type = other DNA
ctgagttcaagcaatcctcc

SEQ ID NO: 7724 - DNA, 20 bp, synthetic construct
  misc_feature 1..20: note = Description of Artificial Sequence: Synthetic oligonucleotide
  source 1..20: mol_type = other DNA
tgagttcaagcaatcctcct

SEQ ID NO: 7725 - DNA, 20 bp, synthetic construct
  misc_feature 1..20: note = Description of Artificial Sequence: Synthetic oligonucleotide
  source 1..20: mol_type = other DNA
gagttcaagcaatcctcctg

SEQ ID NO: 7726 - DNA, 20 bp, synthetic construct
  misc_feature 1..20: note = Description of Artificial Sequence: Synthetic oligonucleotide
  source 1..20: mol_type = other DNA
agttcaagcaatcctcctgt

SEQ ID NO: 7727 - DNA, 20 bp, synthetic construct
  misc_feature 1..20: note = Description of Artificial Sequence: Synthetic oligonucleotide
  source 1..20: mol_type = other DNA
gttcaagcaatcctcctgtg

SEQ ID NO: 7728 - DNA, 20 bp, synthetic construct
  misc_feature 1..20: note = Description of Artificial Sequence: Synthetic oligonucleotide
  source 1..20: mol_type = other DNA
ttcaagcaatcctcctgtgt

SEQ ID NO: 7729 - DNA, 20 bp, synthetic construct
  misc_feature 1..20: note = Description of Artificial Sequence: Synthetic oligonucleotide
  source 1..20: mol_type = other DNA
tcaagcaatcctcctgtgta

SEQ ID NO: 7730 - DNA, 20 bp, synthetic construct
  misc_feature 1..20: note = Description of Artificial Sequence: Synthetic oligonucleotide
  source 1..20: mol_type = other DNA
caagcaatcctcctgtgtag

SEQ ID NO: 7731 - DNA, 20 bp, synthetic construct
  misc_feature 1..20: note = Description of Artificial Sequence: Synthetic oligonucleotide
  source 1..20: mol_type = other DNA
aagcaatcctcctgtgtagc

SEQ ID NO: 7732 - DNA, 20 bp, synthetic construct
  misc_feature 1..20: note = Description of Artificial Sequence: Synthetic oligonucleotide
  source 1..20: mol_type = other DNA
agcaatcctcctgtgtagca

SEQ ID NO: 7733 - DNA, 20 bp, synthetic construct
  misc_feature 1..20: note = Description of Artificial Sequence: Synthetic oligonucleotide
  source 1..20: mol_type = other DNA
gcaatcctcctgtgtagcag

SEQ ID NO: 7734 - DNA, 20 bp, synthetic construct
  misc_feature 1..20: note = Description of Artificial Sequence: Synthetic oligonucleotide
  source 1..20: mol_type = other DNA
caatcctcctgtgtagcagg

SEQ ID NO: 7735 - DNA, 20 bp, synthetic construct
  misc_feature 1..20: note = Description of Artificial Sequence: Synthetic oligonucleotide
  source 1..20: mol_type = other DNA
aatcctcctgtgtagcaggg

SEQ ID NO: 7736 - DNA, 20 bp, synthetic construct
  misc_feature 1..20: note = Description of Artificial Sequence: Synthetic oligonucleotide
  source 1..20: mol_type = other DNA
atcctcctgtgtagcaggga

SEQ ID NO: 7737 - DNA, 20 bp, synthetic construct
  misc_feature 1..20: note = Description of Artificial Sequence: Synthetic oligonucleotide
  source 1..20: mol_type = other DNA
tcctcctgtgtagcagggat

SEQ ID NO: 7738 - DNA, 20 bp, synthetic construct
  misc_feature 1..20: note = Description of Artificial Sequence: Synthetic oligonucleotide
  source 1..20: mol_type = other DNA
cctcctgtgtagcagggatt

SEQ ID NO: 7739 - DNA, 20 bp, synthetic construct
  misc_feature 1..20: note = Description of Artificial Sequence: Synthetic oligonucleotide
  source 1..20: mol_type = other DNA
ctcctgtgtagcagggatta

SEQ ID NO: 7740 - DNA, 20 bp, synthetic construct
  misc_feature 1..20: note = Description of Artificial Sequence: Synthetic oligonucleotide
  source 1..20: mol_type = other DNA
tcctgtgtagcagggattac

SEQ ID NO: 7741 - DNA, 20 bp, synthetic construct
  misc_feature 1..20: note = Description of Artificial Sequence: Synthetic oligonucleotide
  source 1..20: mol_type = other DNA
cctgtgtagcagggattaca

SEQ ID NO: 7742 - DNA, 20 bp, synthetic construct
  misc_feature 1..20: note = Description of Artificial Sequence: Synthetic oligonucleotide
  source 1..20: mol_type = other DNA
ctgtgtagcagggattacag

SEQ ID NO: 7743 - DNA, 20 bp, synthetic construct
  misc_feature 1..20: note = Description of Artificial Sequence: Synthetic oligonucleotide
  source 1..20: mol_type = other DNA
tgtgtagcagggattacagg

SEQ ID NO: 7744 - DNA, 20 bp, synthetic construct
  misc_feature 1..20: note = Description of Artificial Sequence: Synthetic oligonucleotide
  source 1..20: mol_type = other DNA
gtgtagcagggattacaggt

SEQ ID NO: 7745 - DNA, 20 bp, synthetic construct
  misc_feature 1..20: note = Description of Artificial Sequence: Synthetic oligonucleotide
  source 1..20: mol_type = other DNA
tgtagcagggattacaggtg

SEQ ID NO: 7746 - DNA, 20 bp, synthetic construct
  misc_feature 1..20: note = Description of Artificial Sequence: Synthetic oligonucleotide
  source 1..20: mol_type = other DNA
gtagcagggattacaggtgc

SEQ ID NO: 7747 - DNA, 20 bp, synthetic construct
  misc_feature 1..20: note = Description of Artificial Sequence: Synthetic oligonucleotide
  source 1..20: mol_type = other DNA
tagcagggattacaggtgcc

SEQ ID NO: 7748 - DNA, 20 bp, synthetic construct
  misc_feature 1..20: note = Description of Artificial Sequence: Synthetic oligonucleotide
  source 1..20: mol_type = other DNA
agcagggattacaggtgccc

SEQ ID NO: 7749 - DNA, 20 bp, synthetic construct
  misc_feature 1..20: note = Description of Artificial Sequence: Synthetic oligonucleotide
  source 1..20: mol_type = other DNA
gcagggattacaggtgccca

SEQ ID NO: 7750 - DNA, 20 bp, synthetic construct
  misc_feature 1..20: note = Description of Artificial Sequence: Synthetic oligonucleotide
  source 1..20: mol_type = other DNA
cagggattacaggtgcccac

SEQ ID NO: 7751 - DNA, 20 bp, synthetic construct
  misc_feature 1..20: note = Description of Artificial Sequence: Synthetic oligonucleotide
  source 1..20: mol_type = other DNA
agggattacaggtgcccacc

SEQ ID NO: 7752 - DNA, 20 bp, synthetic construct
  misc_feature 1..20: note = Description of Artificial Sequence: Synthetic oligonucleotide
  source 1..20: mol_type = other DNA
gggattacaggtgcccacca

SEQ ID NO: 7753 - DNA, 20 bp, synthetic construct
  misc_feature 1..20: note = Description of Artificial Sequence: Synthetic oligonucleotide
  source 1..20: mol_type = other DNA
ggattacaggtgcccaccac

SEQ ID NO: 7754 - DNA, 20 bp, synthetic construct
  misc_feature 1..20: note = Description of Artificial Sequence: Synthetic oligonucleotide
  source 1..20: mol_type = other DNA
gattacaggtgcccaccacc

SEQ ID NO: 7755 - DNA, 20 bp, synthetic construct
  misc_feature 1..20: note = Description of Artificial Sequence: Synthetic oligonucleotide
  source 1..20: mol_type = other DNA
attacaggtgcccaccacca

SEQ ID NO: 7756 - DNA, 20 bp, synthetic construct
  misc_feature 1..20: note = Description of Artificial Sequence: Synthetic oligonucleotide
  source 1..20: mol_type = other DNA
ttacaggtgcccaccaccat

SEQ ID NO: 7757 - DNA, 20 bp, synthetic construct
  misc_feature 1..20: note = Description of Artificial Sequence: Synthetic oligonucleotide
  source 1..20: mol_type = other DNA
tacaggtgcccaccaccatg

SEQ ID NO: 7758 - DNA, 20 bp, synthetic construct
  misc_feature 1..20: note = Description of Artificial Sequence: Synthetic oligonucleotide
  source 1..20: mol_type = other DNA
acaggtgcccaccaccatgc

SEQ ID NO: 7759 - DNA, 20 bp, synthetic construct
  misc_feature 1..20: note = Description of Artificial Sequence: Synthetic oligonucleotide
  source 1..20: mol_type = other DNA
caggtgcccaccaccatgcc

SEQ ID NO: 7760 - DNA, 20 bp, synthetic construct
  misc_feature 1..20: note = Description of Artificial Sequence: Synthetic oligonucleotide
  source 1..20: mol_type = other DNA
aggtgcccaccaccatgcct

SEQ ID NO: 7761 - DNA, 20 bp, synthetic construct
  misc_feature 1..20: note = Description of Artificial Sequence: Synthetic oligonucleotide
  source 1..20: mol_type = other DNA
ggtgcccaccaccatgcctg

SEQ ID NO: 7762 - DNA, 20 bp, synthetic construct
  misc_feature 1..20: note = Description of Artificial Sequence: Synthetic oligonucleotide
  source 1..20: mol_type = other DNA
gtgcccaccaccatgcctgg

SEQ ID NO: 7763 - DNA, 20 bp, synthetic construct
  misc_feature 1..20: note = Description of Artificial Sequence: Synthetic oligonucleotide
  source 1..20: mol_type = other DNA
tgcccaccaccatgcctggc

SEQ ID NO: 7764 - DNA, 20 bp, synthetic construct
  misc_feature 1..20: note = Description of Artificial Sequence: Synthetic oligonucleotide
  source 1..20: mol_type = other DNA
gcccaccaccatgcctggct

SEQ ID NO: 7765 - DNA, 20 bp, synthetic construct
  misc_feature 1..20: note = Description of Artificial Sequence: Synthetic oligonucleotide
  source 1..20: mol_type = other DNA
cccaccaccatgcctggcta

SEQ ID NO: 7766 - DNA, 20 bp, synthetic construct
  misc_feature 1..20: note = Description of Artificial Sequence: Synthetic oligonucleotide
  source 1..20: mol_type = other DNA
ccaccaccatgcctggctaa

SEQ ID NO: 7767 - DNA, 20 bp, synthetic construct
  misc_feature 1..20: note = Description of Artificial Sequence: Synthetic oligonucleotide
  source 1..20: mol_type = other DNA
caccaccatgcctggctaat

SEQ ID NO: 7768 - DNA, 20 bp, synthetic construct
  misc_feature 1..20: note = Description of Artificial Sequence: Synthetic oligonucleotide
  source 1..20: mol_type = other DNA
accaccatgcctggctaatt

SEQ ID NO: 7769 - DNA, 20 bp, synthetic construct
  misc_feature 1..20: note = Description of Artificial Sequence: Synthetic oligonucleotide
  source 1..20: mol_type = other DNA
ccaccatgcctggctaattt

SEQ ID NO: 7770 - DNA, 20 bp, synthetic construct
  misc_feature 1..20: note = Description of Artificial Sequence: Synthetic oligonucleotide
  source 1..20: mol_type = other DNA
caccatgcctggctaatttt

SEQ ID NO: 7771 - DNA, 20 bp, synthetic construct
  misc_feature 1..20: note = Description of Artificial Sequence: Synthetic oligonucleotide
  source 1..20: mol_type = other DNA
accatgcctggctaattttt

SEQ ID NO: 7772 - DNA, 20 bp, synthetic construct
  misc_feature 1..20: note = Description of Artificial Sequence: Synthetic oligonucleotide
  source 1..20: mol_type = other DNA
ccatgcctggctaatttttt

SEQ ID NO: 7773 - DNA, 20 bp, synthetic construct
  misc_feature 1..20: note = Description of Artificial Sequence: Synthetic oligonucleotide
  source 1..20: mol_type = other DNA
catgcctggctaattttttt

SEQ ID NO: 7774 - DNA, 20 bp, synthetic construct
  misc_feature 1..20: note = Description of Artificial Sequence: Synthetic oligonucleotide
  source 1..20: mol_type = other DNA
atgcctggctaatttttttg

SEQ ID NO: 7775 - DNA, 20 bp, synthetic construct
  misc_feature 1..20: note = Description of Artificial Sequence: Synthetic oligonucleotide
  source 1..20: mol_type = other DNA
tgcctggctaatttttttgt

SEQ ID NO: 7776 - DNA, 20 bp, synthetic construct
  misc_feature 1..20: note = Description of Artificial Sequence: Synthetic oligonucleotide
  source 1..20: mol_type = other DNA
gcctggctaatttttttgta

SEQ ID NO: 7777 - DNA, 20 bp, synthetic construct
  misc_feature 1..20: note = Description of Artificial Sequence: Synthetic oligonucleotide
  source 1..20: mol_type = other DNA
cctggctaatttttttgtat

SEQ ID NO: 7778 - DNA, 20 bp, synthetic construct
  misc_feature 1..20: note = Description of Artificial Sequence: Synthetic oligonucleotide
  source 1..20: mol_type = other DNA
ctggctaatttttttgtatt

SEQ ID NO: 7779 - DNA, 20 bp, synthetic construct
  misc_feature 1..20: note = Description of Artificial Sequence: Synthetic oligonucleotide
  source 1..20: mol_type = other DNA
tggctaatttttttgtattt

SEQ ID NO: 7780 - DNA, 20 bp, synthetic construct
  misc_feature 1..20: note = Description of Artificial Sequence: Synthetic oligonucleotide
  source 1..20: mol_type = other DNA
ggctaatttttttgtatttt

SEQ ID NO: 7781 - DNA, 20 bp, synthetic construct
  misc_feature 1..20: note = Description of Artificial Sequence: Synthetic oligonucleotide
  source 1..20: mol_type = other DNA
gctaatttttttgtattttt

SEQ ID NO: 7782 - DNA, 20 bp, synthetic construct
  misc_feature 1..20: note = Description of Artificial Sequence: Synthetic oligonucleotide
  source 1..20: mol_type = other DNA
ctaatttttttgtattttta

SEQ ID NO: 7783 - DNA, 20 bp, synthetic construct
  misc_feature 1..20: note = Description of Artificial Sequence: Synthetic oligonucleotide
  source 1..20: mol_type = other DNA
taatttttttgtatttttag

SEQ ID NO: 7784 - DNA, 20 bp, synthetic construct
  misc_feature 1..20: note = Description of Artificial Sequence: Synthetic oligonucleotide
  source 1..20: mol_type = other DNA
aatttttttgtatttttagt

SEQ ID NO: 7785 - DNA, 20 bp, synthetic construct
  misc_feature 1..20: note = Description of Artificial Sequence: Synthetic oligonucleotide
  source 1..20: mol_type = other DNA
atttttttgtatttttagta

SEQ ID NO: 7786 - DNA, 20 bp, synthetic construct
  misc_feature 1..20: note = Description of Artificial Sequence: Synthetic oligonucleotide
  source 1..20: mol_type = other DNA
tttttttgtatttttagtag

SEQ ID NO: 7787 - DNA, 20 bp, synthetic construct
  misc_feature 1..20: note = Description of Artificial Sequence: Synthetic oligonucleotide
  source 1..20: mol_type = other DNA
ttttttgtatttttagtaga

SEQ ID NO: 7788 - DNA, 20 bp, synthetic construct
  misc_feature 1..20: note = Description of Artificial Sequence: Synthetic oligonucleotide
  source 1..20: mol_type = other DNA
tttttgtatttttagtagag

SEQ ID NO: 7789 - DNA, 20 bp, synthetic construct
  misc_feature 1..20: note = Description of Artificial Sequence: Synthetic oligonucleotide
  source 1..20: mol_type = other DNA
ttttgtatttttagtagaga

SEQ ID NO: 7790 - DNA, 20 bp, synthetic construct
  misc_feature 1..20: note = Description of Artificial Sequence: Synthetic oligonucleotide
  source 1..20: mol_type = other DNA
tttgtatttttagtagagac

SEQ ID NO: 7791 - DNA, 20 bp, synthetic construct
  misc_feature 1..20: note = Description of Artificial Sequence: Synthetic oligonucleotide
  source 1..20: mol_type = other DNA
ttgtatttttagtagagaca

SEQ ID NO: 7792 - DNA, 20 bp, synthetic construct
  misc_feature 1..20: note = Description of Artificial Sequence: Synthetic oligonucleotide
  source 1..20: mol_type = other DNA
tgtatttttagtagagacag

SEQ ID NO: 7793 - DNA, 20 bp, synthetic construct
  misc_feature 1..20: note = Description of Artificial Sequence: Synthetic oligonucleotide
  source 1..20: mol_type = other DNA
gtatttttagtagagacagg

SEQ ID NO: 7794 - DNA, 20 bp, synthetic construct
  misc_feature 1..20: note = Description of Artificial Sequence: Synthetic oligonucleotide
  source 1..20: mol_type = other DNA
tatttttagtagagacaggg

SEQ ID NO: 7795 - DNA, 20 bp, synthetic construct
  misc_feature 1..20: note = Description of Artificial Sequence: Synthetic oligonucleotide
  source 1..20: mol_type = other DNA
atttttagtagagacagggt

SEQ ID NO: 7796 - DNA, 20 bp, synthetic construct
  misc_feature 1..20: note = Description of Artificial Sequence: Synthetic oligonucleotide
  source 1..20: mol_type = other DNA
tttttagtagagacagggtt

SEQ ID NO: 7797 - DNA, 20 bp, synthetic construct
  misc_feature 1..20: note = Description of Artificial Sequence: Synthetic oligonucleotide
  source 1..20: mol_type = other DNA
ttttagtagagacagggttt

SEQ ID NO: 7798 - DNA, 20 bp, synthetic construct
  misc_feature 1..20: note = Description of Artificial Sequence: Synthetic oligonucleotide
  source 1..20: mol_type = other DNA
tttagtagagacagggtttc

SEQ ID NO: 7799 - DNA, 20 bp, synthetic construct
  misc_feature 1..20: note = Description of Artificial Sequence: Synthetic oligonucleotide
  source 1..20: mol_type = other DNA
ttagtagagacagggtttca

SEQ ID NO: 7800 - DNA, 20 bp, synthetic construct
  misc_feature 1..20: note = Description of Artificial Sequence: Synthetic oligonucleotide
  source 1..20: mol_type = other DNA
tagtagagacagggtttcac

SEQ ID NO: 7801 - DNA, 20 bp, synthetic construct
  misc_feature 1..20: note = Description of Artificial Sequence: Synthetic oligonucleotide
  source 1..20: mol_type = other DNA
agtagagacagggtttcacc

SEQ ID NO: 7802 - DNA, 20 bp, synthetic construct
  misc_feature 1..20: note = Description of Artificial Sequence: Synthetic oligonucleotide
  source 1..20: mol_type = other DNA
gtagagacagggtttcacca

SEQ ID NO: 7803 - DNA, 20 bp, synthetic construct
  misc_feature 1..20: note = Description of Artificial Sequence: Synthetic oligonucleotide
  source 1..20: mol_type = other DNA
tagagacagggtttcaccat

SEQ ID NO: 7804 - DNA, 20 bp, synthetic construct
  misc_feature 1..20: note = Description of Artificial Sequence: Synthetic oligonucleotide
  source 1..20: mol_type = other DNA
agagacagggtttcaccatg

SEQ ID NO: 7805 - DNA, 20 bp, synthetic construct
  misc_feature 1..20: note = Description of Artificial Sequence: Synthetic oligonucleotide
  source 1..20: mol_type = other DNA
gagacagggtttcaccatgt

SEQ ID NO: 7806 - DNA, 20 bp, synthetic construct
  misc_feature 1..20: note = Description of Artificial Sequence: Synthetic oligonucleotide
  source 1..20: mol_type = other DNA
agacagggtttcaccatgtt

SEQ ID NO: 7807 - DNA, 20 bp, synthetic construct
  misc_feature 1..20: note = Description of Artificial Sequence: Synthetic oligonucleotide
  source 1..20: mol_type = other DNA
gacagggtttcaccatgttg

SEQ ID NO: 7808 - DNA, 20 bp, synthetic construct
  misc_feature 1..20: note = Description of Artificial Sequence: Synthetic oligonucleotide
  source 1..20: mol_type = other DNA
acagggtttcaccatgttgg

SEQ ID NO: 7809 - DNA, 20 bp, synthetic construct
  misc_feature 1..20: note = Description of Artificial Sequence: Synthetic oligonucleotide
  source 1..20: mol_type = other DNA
cagggtttcaccatgttggc

SEQ ID NO: 7810 - DNA, 20 bp, synthetic construct
  misc_feature 1..20: note = Description of Artificial Sequence: Synthetic oligonucleotide
  source 1..20: mol_type = other DNA
agggtttcaccatgttggcc

SEQ ID NO: 7811 - DNA, 20 bp, synthetic construct
  misc_feature 1..20: note = Description of Artificial Sequence: Synthetic oligonucleotide
  source 1..20: mol_type = other DNA
gggtttcaccatgttggcca

SEQ ID NO: 7812 - DNA, 20 bp, synthetic construct
  misc_feature 1..20: note = Description of Artificial Sequence: Synthetic oligonucleotide
  source 1..20: mol_type = other DNA
ggtttcaccatgttggccag

SEQ ID NO: 7813 - DNA, 20 bp, synthetic construct
  misc_feature 1..20: note = Description of Artificial Sequence: Synthetic oligonucleotide
  source 1..20: mol_type = other DNA
gtttcaccatgttggccagg

SEQ ID NO: 7814 - DNA, 20 bp, synthetic construct
  misc_feature 1..20: note = Description of Artificial Sequence: Synthetic oligonucleotide
  source 1..20: mol_type = other DNA
tttcaccatgttggccaggc

SEQ ID NO: 7815 - DNA, 20 bp, synthetic construct
  misc_feature 1..20: note = Description of Artificial Sequence: Synthetic oligonucleotide
  source 1..20: mol_type = other DNA
ttcaccatgttggccaggct

SEQ ID NO: 7816 - DNA, 20 bp, synthetic construct
  misc_feature 1..20: note = Description of Artificial Sequence: Synthetic oligonucleotide
  source 1..20: mol_type = other DNA
tcaccatgttggccaggctg

SEQ ID NO: 7817 - DNA, 20 bp, synthetic construct
  misc_feature 1..20: note = Description of Artificial Sequence: Synthetic oligonucleotide
  source 1..20: mol_type = other DNA
caccatgttggccaggctgg

SEQ ID NO: 7818 - DNA, 20 bp, synthetic construct
  misc_feature 1..20: note = Description of Artificial Sequence: Synthetic oligonucleotide
  source 1..20: mol_type = other DNA
accatgttggccaggctggt

SEQ ID NO: 7819 - DNA, 20 bp, synthetic construct
  misc_feature 1..20: note = Description of Artificial Sequence: Synthetic oligonucleotide
  source 1..20: mol_type = other DNA
ccatgttggccaggctggtc

SEQ ID NO: 7820 - DNA, 20 bp, synthetic construct
  misc_feature 1..20: note = Description of Artificial Sequence: Synthetic oligonucleotide
  source 1..20: mol_type = other DNA
catgttggccaggctggtct

SEQ ID NO: 7821 - DNA, 20 bp, synthetic construct
  misc_feature 1..20: note = Description of Artificial Sequence: Synthetic oligonucleotide
  source 1..20: mol_type = other DNA
atgttggccaggctggtctt

SEQ ID NO: 7822 - DNA, 20 bp, synthetic construct
  misc_feature 1..20: note = Description of Artificial Sequence: Synthetic oligonucleotide
  source 1..20: mol_type = other DNA
tgttggccaggctggtctta

SEQ ID NO: 7823 - DNA, 20 bp, synthetic construct
  misc_feature 1..20: note = Description of Artificial Sequence: Synthetic oligonucleotide
  source 1..20: mol_type = other DNA
gttggccaggctggtcttaa

SEQ ID NO: 7824 - DNA, 20 bp, synthetic construct
  misc_feature 1..20: note = Description of Artificial Sequence: Synthetic oligonucleotide
  source 1..20: mol_type = other DNA
ttggccaggctggtcttaaa

SEQ ID NO: 7825 - DNA, 20 bp, synthetic construct
  misc_feature 1..20: note = Description of Artificial Sequence: Synthetic oligonucleotide
  source 1..20: mol_type = other DNA
tggccaggctggtcttaaac

SEQ ID NO: 7826 - DNA, 20 bp, synthetic construct
  misc_feature 1..20: note = Description of Artificial Sequence: Synthetic oligonucleotide
  source 1..20: mol_type = other DNA
ggccaggctggtcttaaact

SEQ ID NO: 7827 - DNA, 20 bp, synthetic construct
  misc_feature 1..20: note = Description of Artificial Sequence: Synthetic oligonucleotide
  source 1..20: mol_type = other DNA
gccaggctggtcttaaactc

SEQ ID NO: 7828 - DNA, 20 bp, synthetic construct
  misc_feature 1..20: note = Description of Artificial Sequence: Synthetic oligonucleotide
  source 1..20: mol_type = other DNA
ccaggctggtcttaaactcc

SEQ ID NO: 7829 - DNA, 20 bp, synthetic construct
  misc_feature 1..20: note = Description of Artificial Sequence: Synthetic oligonucleotide
  source 1..20: mol_type = other DNA
caggctggtcttaaactcct

SEQ ID NO: 7830 - DNA, 20 bp, synthetic construct
  misc_feature 1..20: note = Description of Artificial Sequence: Synthetic oligonucleotide
  source 1..20: mol_type = other DNA
aggctggtcttaaactcctg

SEQ ID NO: 7831 - DNA, 20 bp, synthetic construct
  misc_feature 1..20: note = Description of Artificial Sequence: Synthetic oligonucleotide
  source 1..20: mol_type = other DNA
ggctggtcttaaactcctga

SEQ ID NO: 7832 - DNA, 20 bp, synthetic construct
  misc_feature 1..20: note = Description of Artificial Sequence: Synthetic oligonucleotide
  source 1..20: mol_type = other DNA
gctggtcttaaactcctgac

SEQ ID NO: 7833 - DNA, 20 bp, synthetic construct
  misc_feature 1..20: note = Description of Artificial Sequence: Synthetic oligonucleotide
  source 1..20: mol_type = other DNA
ctggtcttaaactcctgacc

SEQ ID NO: 7834 - DNA, 20 bp, synthetic construct
  misc_feature 1..20: note = Description of Artificial Sequence: Synthetic oligonucleotide
  source 1..20: mol_type = other DNA
tggtcttaaactcctgacct

SEQ ID NO: 7835 - DNA, 20 bp, synthetic construct
  misc_feature 1..20: note = Description of Artificial Sequence: Synthetic oligonucleotide
  source 1..20: mol_type = other DNA
ggtcttaaactcctgacctg

SEQ ID NO: 7836 - DNA, 20 bp, synthetic construct
  misc_feature 1..20: note = Description of Artificial Sequence: Synthetic oligonucleotide
  source 1..20: mol_type = other DNA
gtcttaaactcctgacctga

SEQ ID NO: 7837 - DNA, 20 bp, synthetic construct
  misc_feature 1..20: note = Description of Artificial Sequence: Synthetic oligonucleotide
  source 1..20: mol_type = other DNA
tcttaaactcctgacctgaa

SEQ ID NO: 7838 - DNA, 20 bp, synthetic construct
  misc_feature 1..20: note = Description of Artificial Sequence: Synthetic oligonucleotide
  source 1..20: mol_type = other DNA
cttaaactcctgacctgaag

SEQ ID NO: 7839 - DNA, 20 bp, synthetic construct
  misc_feature 1..20: note = Description of Artificial Sequence: Synthetic oligonucleotide
  source 1..20: mol_type = other DNA
ttaaactcctgacctgaagt

SEQ ID NO: 7840 - DNA, 20 bp, synthetic construct
  misc_feature 1..20: note = Description of Artificial Sequence: Synthetic oligonucleotide
  source 1..20: mol_type = other DNA
taaactcctgacctgaagtg

SEQ ID NO: 7841 - DNA, 20 bp, synthetic construct
  misc_feature 1..20: note = Description of Artificial Sequence: Synthetic oligonucleotide
  source 1..20: mol_type = other DNA
aaactcctgacctgaagtga

SEQ ID NO: 7842 - DNA, 20 bp, synthetic construct
  misc_feature 1..20: note = Description of Artificial Sequence: Synthetic oligonucleotide
  source 1..20: mol_type = other DNA
aactcctgacctgaagtgat

SEQ ID NO: 7843 - DNA, 20 bp, synthetic construct
  misc_feature 1..20: note = Description of Artificial Sequence: Synthetic oligonucleotide
  source 1..20: mol_type = other DNA
actcctgacctgaagtgatc

SEQ ID NO: 7844 - DNA, 20 bp, synthetic construct
  misc_feature 1..20: note = Description of Artificial Sequence: Synthetic oligonucleotide
  source 1..20: mol_type = other DNA
ctcctgacctgaagtgatcc

SEQ ID NO: 7845 - DNA, 20 bp, synthetic construct
  misc_feature 1..20: note = Description of Artificial Sequence: Synthetic oligonucleotide
  source 1..20: mol_type = other DNA
tcctgacctgaagtgatcca

SEQ ID NO: 7846 - DNA, 20 bp, synthetic construct
  misc_feature 1..20: note = Description of Artificial Sequence: Synthetic oligonucleotide
  source 1..20: mol_type = other DNA
cctgacctgaagtgatccac

SEQ ID NO: 7847 - DNA, 20 bp, synthetic construct
  misc_feature 1..20: note = Description of Artificial Sequence: Synthetic oligonucleotide
  source 1..20: mol_type = other DNA
ctgacctgaagtgatccacc

SEQ ID NO: 7848 - DNA, 20 bp, synthetic construct
  misc_feature 1..20: note = Description of Artificial Sequence: Synthetic oligonucleotide
  source 1..20: mol_type = other DNA
tgacctgaagtgatccacct

SEQ ID NO: 7849 - DNA, 20 bp, synthetic construct
  misc_feature 1..20: note = Description of Artificial Sequence: Synthetic oligonucleotide
  source 1..20: mol_type = other DNA
gacctgaagtgatccacctg

SEQ ID NO: 7850 - DNA, 20 bp, synthetic construct
  misc_feature 1..20: note = Description of Artificial Sequence: Synthetic oligonucleotide
  source 1..20: mol_type = other DNA
acctgaagtgatccacctgc

SEQ ID NO: 7851 - DNA, 20 bp, synthetic construct
  misc_feature 1..20: note = Description of Artificial Sequence: Synthetic oligonucleotide
  source 1..20: mol_type = other DNA
cctgaagtgatccacctgcc

SEQ ID NO: 7852 - DNA, 20 bp, synthetic construct
  misc_feature 1..20: note = Description of Artificial Sequence: Synthetic oligonucleotide
  source 1..20: mol_type = other DNA
ctgaagtgatccacctgcct

SEQ ID NO: 7853 - DNA, 20 bp, synthetic construct
  misc_feature 1..20: note = Description of Artificial Sequence: Synthetic oligonucleotide
  source 1..20: mol_type = other DNA
tgaagtgatccacctgcctc

SEQ ID NO: 7854 - DNA, 20 bp, synthetic construct
  misc_feature 1..20: note = Description of Artificial Sequence: Synthetic oligonucleotide
  source 1..20: mol_type = other DNA
gaagtgatccacctgcctcg

SEQ ID NO: 7855 - DNA, 20 bp, synthetic construct
  misc_feature 1..20: note = Description of Artificial Sequence: Synthetic oligonucleotide
  source 1..20: mol_type = other DNA
aagtgatccacctgcctcgg

SEQ ID NO: 7856 - DNA, 20 bp, synthetic construct
  misc_feature 1..20: note = Description of Artificial Sequence: Synthetic oligonucleotide
  source 1..20: mol_type = other DNA
agtgatccacctgcctcggc

SEQ ID NO: 7857 - DNA, 20 bp, synthetic construct
  misc_feature 1..20: note = Description of Artificial Sequence: Synthetic oligonucleotide
  source 1..20: mol_type = other DNA
gtgatccacctgcctcggcc

SEQ ID NO: 7858 - DNA, 20 bp, synthetic construct
  misc_feature 1..20: note = Description of Artificial Sequence: Synthetic oligonucleotide
  source 1..20: mol_type = other DNA
tgatccacctgcctcggcct

SEQ ID NO: 7859 - DNA, 20 bp, synthetic construct
  misc_feature 1..20: note = Description of Artificial Sequence: Synthetic oligonucleotide
  source 1..20: mol_type = other DNA
gatccacctgcctcggcctc

SEQ ID NO: 7860 - DNA, 20 bp, synthetic construct
  misc_feature 1..20: note = Description of Artificial Sequence: Synthetic oligonucleotide
  source 1..20: mol_type = other DNA
atccacctgcctcggcctcc

SEQ ID NO: 7861 - DNA, 20 bp, synthetic construct
  misc_feature 1..20: note = Description of Artificial Sequence: Synthetic oligonucleotide
  source 1..20: mol_type = other DNA
tccacctgcctcggcctccc

SEQ ID NO: 7862 - DNA, 20 bp, synthetic construct
  misc_feature 1..20: note = Description of Artificial Sequence: Synthetic oligonucleotide
  source 1..20: mol_type = other DNA
ccacctgcctcggcctccca

SEQ ID NO: 7863 - DNA, 20 bp, synthetic construct
  misc_feature 1..20: note = Description of Artificial Sequence: Synthetic oligonucleotide
  source 1..20: mol_type = other DNA
cacctgcctcggcctcccat

SEQ ID NO: 7864 - DNA, 20 bp, synthetic construct
  misc_feature 1..20: note = Description of Artificial Sequence: Synthetic oligonucleotide
  source 1..20: mol_type = other DNA
acctgcctcggcctcccata

SEQ ID NO: 7865 - DNA, 20 bp, synthetic construct
  misc_feature 1..20: note = Description of Artificial Sequence: Synthetic oligonucleotide
  source 1..20: mol_type = other DNA
cctgcctcggcctcccatag

SEQ ID NO: 7866 - DNA, 20 bp, synthetic construct
  misc_feature 1..20: note = Description of Artificial Sequence: Synthetic oligonucleotide
  source 1..20: mol_type = other DNA
ctgcctcggcctcccatagt

SEQ ID NO: 7867 - DNA, 20 bp, synthetic construct
  misc_feature 1..20: note = Description of Artificial Sequence: Synthetic oligonucleotide
  source 1..20: mol_type = other DNA
tgcctcggcctcccatagtg

SEQ ID NO: 7868 - DNA, 20 bp, synthetic construct
  misc_feature 1..20: note = Description of Artificial Sequence: Synthetic oligonucleotide
  source 1..20: mol_type = other DNA
gcctcggcctcccatagtgc

SEQ ID NO: 7869 - DNA, 20 bp, synthetic construct
  misc_feature 1..20: note = Description of Artificial Sequence: Synthetic oligonucleotide
  source 1..20: mol_type = other DNA
cctcggcctcccatagtgct

SEQ ID NO: 7870 - DNA, 20 bp, synthetic construct
  misc_feature 1..20: note = Description of Artificial Sequence: Synthetic oligonucleotide
  source 1..20: mol_type = other DNA
ctcggcctcccatagtgctg

SEQ ID NO: 7871 - DNA, 20 bp, synthetic construct
  misc_feature 1..20: note = Description of Artificial Sequence: Synthetic oligonucleotide
  source 1..20: mol_type = other DNA
tcggcctcccatagtgctgg

SEQ ID NO: 7872 - DNA, 20 bp, synthetic construct
  misc_feature 1..20: note = Description of Artificial Sequence: Synthetic oligonucleotide
  source 1..20: mol_type = other DNA
cggcctcccatagtgctggg

SEQ ID NO: 7873 - DNA, 20 bp, synthetic construct
  misc_feature 1..20: note = Description of Artificial Sequence: Synthetic oligonucleotide
  source 1..20: mol_type = other DNA
ggcctcccatagtgctggga

SEQ ID NO: 7874 - DNA, 20 bp, synthetic construct
  misc_feature 1..20: note = Description of Artificial Sequence: Synthetic oligonucleotide
  source 1..20: mol_type = other DNA
gcctcccatagtgctgggat

SEQ ID NO: 7875 - DNA, 20 bp, synthetic construct
  misc_feature 1..20: note = Description of Artificial Sequence: Synthetic oligonucleotide
  source 1..20: mol_type = other DNA
cctcccatagtgctgggatt

SEQ ID NO: 7876 - DNA, 20 bp, synthetic construct
  misc_feature 1..20: note = Description of Artificial Sequence: Synthetic oligonucleotide
  source 1..20: mol_type = other DNA
ctcccatagtgctgggatta

SEQ ID NO: 7877 - DNA, 20 bp, synthetic construct
  misc_feature 1..20: note = Description of Artificial Sequence: Synthetic oligonucleotide
  source 1..20: mol_type = other DNA
tcccatagtgctgggattac

SEQ ID NO: 7878 - DNA, 20 bp, synthetic construct
  misc_feature 1..20: note = Description of Artificial Sequence: Synthetic oligonucleotide
  source 1..20: mol_type = other DNA
cccatagtgctgggattaca

SEQ ID NO: 7879 - DNA, 20 bp, synthetic construct
  misc_feature 1..20: note = Description of Artificial Sequence: Synthetic oligonucleotide
  source 1..20: mol_type = other DNA
ccatagtgctgggattacag

SEQ ID NO: 7880 - DNA, 20 bp, synthetic construct
  misc_feature 1..20: note = Description of Artificial Sequence: Synthetic oligonucleotide
  source 1..20: mol_type = other DNA
catagtgctgggattacagg

SEQ ID NO: 7881 - DNA, 20 bp, synthetic construct
  misc_feature 1..20: note = Description of Artificial Sequence: Synthetic oligonucleotide
  source 1..20: mol_type = other DNA
atagtgctgggattacaggt

SEQ ID NO: 7882 - DNA, 20 bp, synthetic construct
  misc_feature 1..20: note = Description of Artificial Sequence: Synthetic oligonucleotide
  source 1..20: mol_type = other DNA
tagtgctgggattacaggtg

SEQ ID NO: 7883 - DNA, 20 bp, synthetic construct
  misc_feature 1..20: note = Description of Artificial Sequence: Synthetic oligonucleotide
  source 1..20: mol_type = other DNA
agtgctgggattacaggtgt

SEQ ID NO: 7884 - DNA, 20 bp, synthetic construct
  misc_feature 1..20: note = Description of Artificial Sequence: Synthetic oligonucleotide
  source 1..20: mol_type = other DNA
gtgctgggattacaggtgtg

SEQ ID NO: 7885 - DNA, 20 bp, synthetic construct
  misc_feature 1..20: note = Description of Artificial Sequence: Synthetic oligonucleotide
  source 1..20: mol_type = other DNA
tgctgggattacaggtgtga

SEQ ID NO: 7886 - DNA, 20 bp, synthetic construct
  misc_feature 1..20: note = Description of Artificial Sequence: Synthetic oligonucleotide
  source 1..20: mol_type = other DNA
gctgggattacaggtgtgag

SEQ ID NO: 7887 - DNA, 20 bp, synthetic construct
  misc_feature 1..20: note = Description of Artificial Sequence: Synthetic oligonucleotide
  source 1..20: mol_type = other DNA
ctgggattacaggtgtgagc

SEQ ID NO: 7888 - DNA, 20 bp, synthetic construct
  misc_feature 1..20: note = Description of Artificial Sequence: Synthetic oligonucleotide
  source 1..20: mol_type = other DNA
tgggattacaggtgtgagcc

SEQ ID NO: 7889 - DNA, 20 bp, synthetic construct
  misc_feature 1..20: note = Description of Artificial Sequence: Synthetic oligonucleotide
  source 1..20: mol_type = other DNA
gggattacaggtgtgagcca

SEQ ID NO: 7890 - DNA, 20 bp, synthetic construct
  misc_feature 1..20: note = Description of Artificial Sequence: Synthetic oligonucleotide
  source 1..20: mol_type = other DNA
ggattacaggtgtgagccac

SEQ ID NO: 7891 - DNA, 20 bp, synthetic construct
  misc_feature 1..20: note = Description of Artificial Sequence: Synthetic oligonucleotide
  source 1..20: mol_type = other DNA
gattacaggtgtgagccact

SEQ ID NO: 7892 - DNA, 20 bp, synthetic construct
  misc_feature 1..20: note = Description of Artificial Sequence: Synthetic oligonucleotide
  source 1..20: mol_type = other DNA
attacaggtgtgagccactg

SEQ ID NO: 7893 - DNA, 20 bp, synthetic construct
  misc_feature 1..20: note = Description of Artificial Sequence: Synthetic oligonucleotide
  source 1..20: mol_type = other DNA
ttacaggtgtgagccactgc

SEQ ID NO: 7894 - DNA, 20 bp, synthetic construct
  misc_feature 1..20: note = Description of Artificial Sequence: Synthetic oligonucleotide
  source 1..20: mol_type = other DNA
tacaggtgtgagccactgcg

SEQ ID NO: 7895 - DNA, 20 bp, synthetic construct
  misc_feature 1..20: note = Description of Artificial Sequence: Synthetic oligonucleotide
  source 1..20: mol_type = other DNA
acaggtgtgagccactgcgc

SEQ ID NO: 7896 - DNA, 20 bp, synthetic construct
  misc_feature 1..20: note = Description of Artificial Sequence: Synthetic oligonucleotide
  source 1..20: mol_type = other DNA
caggtgtgagccactgcgcc

SEQ ID NO: 7897 - DNA, 20 bp, synthetic construct
  misc_feature 1..20: note = Description of Artificial Sequence: Synthetic oligonucleotide
  source 1..20: mol_type = other DNA
aggtgtgagccactgcgccc

SEQ ID NO: 7898 - DNA, 20 bp, synthetic construct
  misc_feature 1..20: note = Description of Artificial Sequence: Synthetic oligonucleotide
  source 1..20: mol_type = other DNA
ggtgtgagccactgcgccca

SEQ ID NO: 7899 - DNA, 20 bp, synthetic construct
  misc_feature 1..20: note = Description of Artificial Sequence: Synthetic oligonucleotide
  source 1..20: mol_type = other DNA
gtgtgagccactgcgcccag

SEQ ID NO: 7900 - DNA, 20 bp, synthetic construct
  misc_feature 1..20: note = Description of Artificial Sequence: Synthetic oligonucleotide
  source 1..20: mol_type = other DNA
tgtgagccactgcgcccagc

SEQ ID NO: 7901 - DNA, 20 bp, synthetic construct
  misc_feature 1..20: note = Description of Artificial Sequence: Synthetic oligonucleotide
  source 1..20: mol_type = other DNA
gtgagccactgcgcccagcc

SEQ ID NO: 7902 - DNA, 20 bp, synthetic construct
  misc_feature 1..20: note = Description of Artificial Sequence: Synthetic oligonucleotide
  source 1..20: mol_type = other DNA
tgagccactgcgcccagccg

SEQ ID NO: 7903 - DNA, 20 bp, synthetic construct
  misc_feature 1..20: note = Description of Artificial Sequence: Synthetic oligonucleotide
  source 1..20: mol_type = other DNA
gagccactgcgcccagccga

SEQ ID NO: 7904 - DNA, 20 bp, synthetic construct
  misc_feature 1..20: note = Description of Artificial Sequence: Synthetic oligonucleotide
  source 1..20: mol_type = other DNA
agccactgcgcccagccgaa

SEQ ID NO: 7905 - DNA, 20 bp, synthetic construct
  misc_feature 1..20: note = Description of Artificial Sequence: Synthetic oligonucleotide
  source 1..20: mol_type = other DNA
gccactgcgcccagccgaat

SEQ ID NO: 7906 - DNA, 20 bp, synthetic construct
  misc_feature 1..20: note = Description of Artificial Sequence: Synthetic oligonucleotide
  source 1..20: mol_type = other DNA
ccactgcgcccagccgaatt

SEQ ID NO: 7907 - DNA, 20 bp, synthetic construct
  misc_feature 1..20: note = Description of Artificial Sequence: Synthetic oligonucleotide
  source 1..20: mol_type = other DNA
cactgcgcccagccgaattt

SEQ ID NO: 7908 - DNA, 20 bp, synthetic construct
  misc_feature 1..20: note = Description of Artificial Sequence: Synthetic oligonucleotide
  source 1..20: mol_type = other DNA
actgcgcccagccgaatttt

SEQ ID NO: 7909 - DNA, 20 bp, synthetic construct
  misc_feature 1..20: note = Description of Artificial Sequence: Synthetic oligonucleotide
  source 1..20: mol_type = other DNA
ctgcgcccagccgaattttc

SEQ ID NO: 7910 - DNA, 20 bp, synthetic construct
  misc_feature 1..20: note = Description of Artificial Sequence: Synthetic oligonucleotide
  source 1..20: mol_type = other DNA
tgcgcccagccgaattttcc

SEQ ID NO: 7911 - DNA, 20 bp, synthetic construct
  misc_feature 1..20: note = Description of Artificial Sequence: Synthetic oligonucleotide
  source 1..20: mol_type = other DNA
gcgcccagccgaattttcct

SEQ ID NO: 7912 - DNA, 20 bp, synthetic construct
  misc_feature 1..20: note = Description of Artificial Sequence: Synthetic oligonucleotide
  source 1..20: mol_type = other DNA
cgcccagccgaattttcctt

SEQ ID NO: 7913 - DNA, 20 bp, synthetic construct
  misc_feature 1..20: note = Description of Artificial Sequence: Synthetic oligonucleotide
  source 1..20: mol_type = other DNA
gcccagccgaattttccttt

SEQ ID NO: 7914 - DNA, 20 bp, synthetic construct
  misc_feature 1..20: note = Description of Artificial Sequence: Synthetic oligonucleotide
  source 1..20: mol_type = other DNA
cccagccgaattttcctttc

SEQ ID NO: 7915 - DNA, 20 bp, synthetic construct
  misc_feature 1..20: note = Description of Artificial Sequence: Synthetic oligonucleotide
  source 1..20: mol_type = other DNA
ccagccgaattttcctttct

SEQ ID NO: 7916 - DNA, 20 bp, synthetic construct
  misc_feature 1..20: note = Description of Artificial Sequence: Synthetic oligonucleotide
  source 1..20: mol_type = other DNA
cagccgaattttcctttctt

SEQ ID NO: 7917 - DNA, 20 bp, synthetic construct
  misc_feature 1..20: note = Description of Artificial Sequence: Synthetic oligonucleotide
  source 1..20: mol_type = other DNA
agccgaattttcctttcttt

SEQ ID NO: 7918 - DNA, 20 bp, synthetic construct
  misc_feature 1..20: note = Description of Artificial Sequence: Synthetic oligonucleotide
  source 1..20: mol_type = other DNA
gccgaattttcctttcttta

SEQ ID NO: 7919 - DNA, 20 bp, synthetic construct
  misc_feature 1..20: note = Description of Artificial Sequence: Synthetic oligonucleotide
  source 1..20: mol_type = other DNA
ccgaattttcctttctttaa

SEQ ID NO: 7920 - DNA, 20 bp, synthetic construct
  misc_feature 1..20: note = Description of Artificial Sequence: Synthetic oligonucleotide
  source 1..20: mol_type = other DNA
cgaattttcctttctttaaa

SEQ ID NO: 7921 - DNA, 20 bp, synthetic construct
  misc_feature 1..20: note = Description of Artificial Sequence: Synthetic oligonucleotide
  source 1..20: mol_type = other DNA
gaattttcctttctttaaac

SEQ ID NO: 7922 - DNA, 20 bp, synthetic construct
  misc_feature 1..20: note = Description of Artificial Sequence: Synthetic oligonucleotide
  source 1..20: mol_type = other DNA
aattttcctttctttaaact

SEQ ID NO: 7923 - DNA, 20 bp, synthetic construct
  misc_feature 1..20: note = Description of Artificial Sequence: Synthetic oligonucleotide
  source 1..20: mol_type = other DNA
attttcctttctttaaactg

SEQ ID NO: 7924 - DNA, 20 bp, synthetic construct
  misc_feature 1..20: note = Description of Artificial Sequence: Synthetic oligonucleotide
  source 1..20: mol_type = other DNA
ttttcctttctttaaactgt

SEQ ID NO: 7925 - DNA, 20 bp, synthetic construct
  misc_feature 1..20: note = Description of Artificial Sequence: Synthetic oligonucleotide
  source 1..20: mol_type = other DNA
tttcctttctttaaactgtg

SEQ ID NO: 7926 - DNA, 20 bp, synthetic construct
  misc_feature 1..20: note = Description of Artificial Sequence: Synthetic oligonucleotide
  source 1..20: mol_type = other DNA
ttcctttctttaaactgtga

SEQ ID NO: 7927 - DNA, 20 bp, synthetic construct
  misc_feature 1..20: note = Description of Artificial Sequence: Synthetic oligonucleotide
  source 1..20: mol_type = other DNA
tcctttctttaaactgtgaa

SEQ ID NO: 7928 - DNA, 20 bp, synthetic construct
  misc_feature 1..20: note = Description of Artificial Sequence: Synthetic oligonucleotide
  source 1..20: mol_type = other DNA
cctttctttaaactgtgaat

SEQ ID NO: 7929 - DNA, 20 bp, synthetic construct
  misc_feature 1..20: note = Description of Artificial Sequence: Synthetic oligonucleotide
  source 1..20: mol_type = other DNA
ctttctttaaactgtgaatg

SEQ ID NO: 7930 - DNA, 20 bp, synthetic construct
  misc_feature 1..20: note = Description of Artificial Sequence: Synthetic oligonucleotide
  source 1..20: mol_type = other DNA
tttctttaaactgtgaatgg

SEQ ID NO: 7931 - DNA, 20 bp, synthetic construct
  misc_feature 1..20: note = Description of Artificial Sequence: Synthetic oligonucleotide
  source 1..20: mol_type = other DNA
ttctttaaactgtgaatggc

SEQ ID NO: 7932 - DNA, 20 bp, synthetic construct
  misc_feature 1..20: note = Description of Artificial Sequence: Synthetic oligonucleotide
  source 1..20: mol_type = other DNA
tctttaaactgtgaatggcc

SEQ ID NO: 7933 - DNA, 20 bp, synthetic construct
  misc_feature 1..20: note = Description of Artificial Sequence: Synthetic oligonucleotide
  source 1..20: mol_type = other DNA
ctttaaactgtgaatggccc

SEQ ID NO: 7934 - DNA, 20 bp, synthetic construct
  misc_feature 1..20: note = Description of Artificial Sequence: Synthetic oligonucleotide
  source 1..20: mol_type = other DNA
tttaaactgtgaatggccct

SEQ ID NO: 7935 - DNA, 20 bp, synthetic construct
  misc_feature 1..20: note = Description of Artificial Sequence: Synthetic oligonucleotide
  source 1..20: mol_type = other DNA
ttaaactgtgaatggccctg

SEQ ID NO: 7936 - DNA, 20 bp, synthetic construct
  misc_feature 1..20: note = Description of Artificial Sequence: Synthetic oligonucleotide
  source 1..20: mol_type = other DNA
taaactgtgaatggccctgt

SEQ ID NO: 7937 - DNA, 20 bp, synthetic construct
  misc_feature 1..20: note = Description of Artificial Sequence: Synthetic oligonucleotide
  source 1..20: mol_type = other DNA
aaactgtgaatggccctgtt

SEQ ID NO: 7938 - DNA, 20 bp, synthetic construct
  misc_feature 1..20: note = Description of Artificial Sequence: Synthetic oligonucleotide
  source 1..20: mol_type = other DNA
aactgtgaatggccctgttg

SEQ ID NO: 7939 - DNA, 20 bp, synthetic construct
  misc_feature 1..20: note = Description of Artificial Sequence: Synthetic oligonucleotide
  source 1..20: mol_type = other DNA
actgtgaatggccctgttgt

SEQ ID NO: 7940 - DNA, 20 bp, synthetic construct
  misc_feature 1..20: note = Description of Artificial Sequence: Synthetic oligonucleotide
  source 1..20: mol_type = other DNA
ctgtgaatggccctgttgtt

SEQ ID NO: 7941 - DNA, 20 bp, synthetic construct
  misc_feature 1..20: note = Description of Artificial Sequence: Synthetic oligonucleotide
  source 1..20: mol_type = other DNA
tgtgaatggccctgttgttg

SEQ ID NO: 7942 - DNA, 20 bp, synthetic construct
  misc_feature 1..20: note = Description of Artificial Sequence: Synthetic oligonucleotide
  source 1..20: mol_type = other DNA
gtgaatggccctgttgttgt

SEQ ID NO: 7943 - DNA, 20 bp, synthetic construct
  misc_feature 1..20: note = Description of Artificial Sequence: Synthetic oligonucleotide
  source 1..20: mol_type = other DNA
tgaatggccctgttgttgta

SEQ ID NO: 7944 - DNA, 20 bp, synthetic construct
  misc_feature 1..20: note = Description of Artificial Sequence: Synthetic oligonucleotide
  source 1..20: mol_type = other DNA
gaatggccctgttgttgtag

SEQ ID NO: 7945 - DNA, 20 bp, synthetic construct
  misc_feature 1..20: note = Description of Artificial Sequence: Synthetic oligonucleotide
  source 1..20: mol_type = other DNA
aatggccctgttgttgtagt

SEQ ID NO: 7946 - DNA, 20 bp, synthetic construct
  misc_feature 1..20: note = Description of Artificial Sequence: Synthetic oligonucleotide
  source 1..20: mol_type = other DNA
atggccctgttgttgtagtc

SEQ ID NO: 7947 - DNA, 20 bp, synthetic construct
  misc_feature 1..20: note = Description of Artificial Sequence: Synthetic oligonucleotide
  source 1..20: mol_type = other DNA
tggccctgttgttgtagtcc

SEQ ID NO: 7948 - DNA, 20 bp, synthetic construct
  misc_feature 1..20: note = Description of Artificial Sequence: Synthetic oligonucleotide
  source 1..20: mol_type = other DNA
ggccctgttgttgtagtccc

SEQ ID NO: 7949 - DNA, 20 bp, synthetic construct
  misc_feature 1..20: note = Description of Artificial Sequence: Synthetic oligonucleotide
  source 1..20: mol_type = other DNA
gccctgttgttgtagtcccc

SEQ ID NO: 7950 - DNA, 20 bp, synthetic construct
  misc_feature 1..20: note = Description of Artificial Sequence: Synthetic oligonucleotide
  source 1..20: mol_type = other DNA
ccctgttgttgtagtcccct

SEQ ID NO: 7951 - DNA, 20 bp, synthetic construct
  misc_feature 1..20: note = Description of Artificial Sequence: Synthetic oligonucleotide
  source 1..20: mol_type = other DNA
cctgttgttgtagtcccctt

SEQ ID NO: 7952 - DNA, 20 bp, synthetic construct
  misc_feature 1..20: note = Description of Artificial Sequence: Synthetic oligonucleotide
  source 1..20: mol_type = other DNA
ctgttgttgtagtccccttg

SEQ ID NO: 7953 - DNA, 20 bp, synthetic construct
  misc_feature 1..20: note = Description of Artificial Sequence: Synthetic oligonucleotide
  source 1..20: mol_type = other DNA
tgttgttgtagtccccttga

SEQ ID NO: 7954 - DNA, 20 bp, synthetic construct
  misc_feature 1..20: note = Description of Artificial Sequence: Synthetic oligonucleotide
  source 1..20: mol_type = other DNA
gttgttgtagtccccttgag

SEQ ID NO: 7955 - DNA, 20 bp, synthetic construct
  misc_feature 1..20: note = Description of Artificial Sequence: Synthetic oligonucleotide
  source 1..20: mol_type = other DNA
ttgttgtagtccccttgagg

SEQ ID NO: 7956 - DNA, 20 bp, synthetic construct
  misc_feature 1..20: note = Description of Artificial Sequence: Synthetic oligonucleotide
  source 1..20: mol_type = other DNA
tgttgtagtccccttgaggg

SEQ ID NO: 7957 - DNA, 20 bp, synthetic construct
  misc_feature 1..20: note = Description of Artificial Sequence: Synthetic oligonucleotide
  source 1..20: mol_type = other DNA
gttgtagtccccttgagggg

SEQ ID NO: 7958 - DNA, 20 bp, synthetic construct
  misc_feature 1..20: note = Description of Artificial Sequence: Synthetic oligonucleotide
  source 1..20: mol_type = other DNA
ttgtagtccccttgaggggg

SEQ ID NO: 7959 - DNA, 20 bp, synthetic construct
  misc_feature 1..20: note = Description of Artificial Sequence: Synthetic oligonucleotide
  source 1..20: mol_type = other DNA
tgtagtccccttgagggggt

SEQ ID NO: 7960 - DNA, 20 bp, synthetic construct
  misc_feature 1..20: note = Description of Artificial Sequence: Synthetic oligonucleotide
  source 1..20: mol_type = other DNA
gtagtccccttgagggggtg

SEQ ID NO: 7961 - DNA, 20 bp, synthetic construct
  misc_feature 1..20: note = Description of Artificial Sequence: Synthetic oligonucleotide
  source 1..20: mol_type = other DNA
tagtccccttgagggggtga

SEQ ID NO: 7962 - DNA, 20 bp, synthetic construct
  misc_feature 1..20: note = Description of Artificial Sequence: Synthetic oligonucleotide
  source 1..20: mol_type = other DNA
agtccccttgagggggtgaa

SEQ ID NO: 7963 - DNA, 20 bp, synthetic construct
  misc_feature 1..20: note = Description of Artificial Sequence: Synthetic oligonucleotide
  source 1..20: mol_type = other DNA
gtccccttgagggggtgaag

SEQ ID NO: 7964 - DNA, 20 bp, synthetic construct
  misc_feature 1..20: note = Description of Artificial Sequence: Synthetic oligonucleotide
  source 1..20: mol_type = other DNA
tccccttgagggggtgaagg

SEQ ID NO: 7965 - DNA, 20 bp, synthetic construct
  misc_feature 1..20: note = Description of Artificial Sequence: Synthetic oligonucleotide
  source 1..20: mol_type = other DNA
ccccttgagggggtgaagga

SEQ ID NO: 7966 - DNA, 20 bp, synthetic construct
  misc_feature 1..20: note = Description of Artificial Sequence: Synthetic oligonucleotide
  source 1..20: mol_type = other DNA
cccttgagggggtgaaggac

SEQ ID NO: 7967 - DNA, 20 bp, synthetic construct
  misc_feature 1..20: note = Description of Artificial Sequence: Synthetic oligonucleotide
  source 1..20: mol_type = other DNA
ccttgagggggtgaaggaca

SEQ ID NO: 7968 - DNA, 20 bp, synthetic construct
  misc_feature 1..20: note = Description of Artificial Sequence: Synthetic oligonucleotide
  source 1..20: mol_type = other DNA
cttgagggggtgaaggacag

SEQ ID NO: 7969 - DNA, 20 bp, synthetic construct
  misc_feature 1..20: note = Description of Artificial Sequence: Synthetic oligonucleotide
  source 1..20: mol_type = other DNA
ttgagggggtgaaggacagg

SEQ ID NO: 7970 - DNA, 20 bp, synthetic construct
  misc_feature 1..20: note = Description of Artificial Sequence: Synthetic oligonucleotide
  source 1..20: mol_type = other DNA
tgagggggtgaaggacaggt

SEQ ID NO: 7971 - DNA, 20 bp, synthetic construct
  misc_feature 1..20: note = Description of Artificial Sequence: Synthetic oligonucleotide
  source 1..20: mol_type = other DNA
gagggggtgaaggacaggta

SEQ ID NO: 7972 - DNA, 20 bp, synthetic construct
  misc_feature 1..20: note = Description of Artificial Sequence: Synthetic oligonucleotide
  source 1..20: mol_type = other DNA
agggggtgaaggacaggtat

SEQ ID NO: 7973 - DNA, 20 bp, synthetic construct
  misc_feature 1..20: note = Description of Artificial Sequence: Synthetic oligonucleotide
  source 1..20: mol_type = other DNA
gggggtgaaggacaggtatt

SEQ ID NO: 7974 - DNA, 20 bp, synthetic construct
  misc_feature 1..20: note = Description of Artificial Sequence: Synthetic oligonucleotide
  source 1..20: mol_type = other DNA
ggggtgaaggacaggtatta

SEQ ID NO: 7975 - DNA, 20 bp, synthetic construct
  misc_feature 1..20: note = Description of Artificial Sequence: Synthetic oligonucleotide
  source 1..20: mol_type = other DNA
gggtgaaggacaggtattag

SEQ ID NO: 7976 - DNA, 20 bp, synthetic construct
  misc_feature 1..20: note = Description of Artificial Sequence: Synthetic oligonucleotide
  source 1..20: mol_type = other DNA
ggtgaaggacaggtattagg

SEQ ID NO: 7977 - DNA, 20 bp, synthetic construct
  misc_feature 1..20: note = Description of Artificial Sequence: Synthetic oligonucleotide
  source 1..20: mol_type = other DNA
gtgaaggacaggtattaggg

SEQ ID NO: 7978 - DNA, 20 bp, synthetic construct
  misc_feature 1..20: note = Description of Artificial Sequence: Synthetic oligonucleotide
  source 1..20: mol_type = other DNA
tgaaggacaggtattagggc

SEQ ID NO: 7979 - DNA, 20 bp, synthetic construct
  misc_feature 1..20: note = Description of Artificial Sequence: Synthetic oligonucleotide
  source 1..20: mol_type = other DNA
gaaggacaggtattagggca

SEQ ID NO: 7980 - DNA, 20 bp, synthetic construct
  misc_feature 1..20: note = Description of Artificial Sequence: Synthetic oligonucleotide
  source 1..20: mol_type = other DNA
aaggacaggtattagggcat

SEQ ID NO: 7981 - DNA, 20 bp, synthetic construct
  misc_feature 1..20: note = Description of Artificial Sequence: Synthetic oligonucleotide
  source 1..20: mol_type = other DNA
aggacaggtattagggcatg

SEQ ID NO: 7982 - DNA, 20 bp, synthetic construct
  misc_feature 1..20: note = Description of Artificial Sequence: Synthetic oligonucleotide
  source 1..20: mol_type = other DNA
ggacaggtattagggcatgg

SEQ ID NO: 7983 - DNA, 20 bp, synthetic construct
  misc_feature 1..20: note = Description of Artificial Sequence: Synthetic oligonucleotide
  source 1..20: mol_type = other DNA
gacaggtattagggcatggc

SEQ ID NO: 7984 - DNA, 20 bp, synthetic construct
  misc_feature 1..20: note = Description of Artificial Sequence: Synthetic oligonucleotide
  source 1..20: mol_type = other DNA
acaggtattagggcatggcc

SEQ ID NO: 7985 - DNA, 20 bp, synthetic construct
  misc_feature 1..20: note = Description of Artificial Sequence: Synthetic oligonucleotide
  source 1..20: mol_type = other DNA
caggtattagggcatggcca

SEQ ID NO: 7986 - DNA, 20 bp, synthetic construct
  misc_feature 1..20: note = Description of Artificial Sequence: Synthetic oligonucleotide
  source 1..20: mol_type = other DNA
aggtattagggcatggccag

SEQ ID NO: 7987 - DNA, 20 bp, synthetic construct
  misc_feature 1..20: note = Description of Artificial Sequence: Synthetic oligonucleotide
  source 1..20: mol_type = other DNA
ggtattagggcatggccagt

SEQ ID NO: 7988 - DNA, 20 bp, synthetic construct
  misc_feature 1..20: note = Description of Artificial Sequence: Synthetic oligonucleotide
  source 1..20: mol_type = other DNA
gtattagggcatggccagtg

SEQ ID NO: 7989 - DNA, 20 bp, synthetic construct
  misc_feature 1..20: note = Description of Artificial Sequence: Synthetic oligonucleotide
  source 1..20: mol_type = other DNA
tattagggcatggccagtga

SEQ ID NO: 7990 - DNA, 20 bp, synthetic construct
  misc_feature 1..20: note = Description of Artificial Sequence: Synthetic oligonucleotide
  source 1..20: mol_type = other DNA
attagggcatggccagtgac

SEQ ID NO: 7991 - DNA, 20 bp, synthetic construct
  misc_feature 1..20: note = Description of Artificial Sequence: Synthetic oligonucleotide
  source 1..20: mol_type = other DNA
ttagggcatggccagtgact

SEQ ID NO: 7992 - DNA, 20 bp, synthetic construct
  misc_feature 1..20: note = Description of Artificial Sequence: Synthetic oligonucleotide
  source 1..20: mol_type = other DNA
tagggcatggccagtgactg

SEQ ID NO: 7993 - DNA, 20 bp, synthetic construct
  misc_feature 1..20: note = Description of Artificial Sequence: Synthetic oligonucleotide
  source 1..20: mol_type = other DNA
agggcatggccagtgactgt

SEQ ID NO: 7994 - DNA, 20 bp, synthetic construct
  misc_feature 1..20: note = Description of Artificial Sequence: Synthetic oligonucleotide
  source 1..20: mol_type = other DNA
gggcatggccagtgactgta

SEQ ID NO: 7995 - DNA, 20 bp, synthetic construct
  misc_feature 1..20: note = Description of Artificial Sequence: Synthetic oligonucleotide
  source 1..20: mol_type = other DNA
ggcatggccagtgactgtaa

SEQ ID NO: 7996 - DNA, 20 bp, synthetic construct
  misc_feature 1..20: note = Description of Artificial Sequence: Synthetic oligonucleotide
  source 1..20: mol_type = other DNA
gcatggccagtgactgtaat

SEQ ID NO: 7997 - DNA, 20 bp, synthetic construct
  misc_feature 1..20: note = Description of Artificial Sequence: Synthetic oligonucleotide
  source 1..20: mol_type = other DNA
catggccagtgactgtaatg

SEQ ID NO: 7998 - DNA, 20 bp, synthetic construct
  misc_feature 1..20: note = Description of Artificial Sequence: Synthetic oligonucleotide
  source 1..20: mol_type = other DNA
atggccagtgactgtaatga

SEQ ID NO: 7999 - DNA, 20 bp, synthetic construct
  misc_feature 1..20: note = Description of Artificial Sequence: Synthetic oligonucleotide
  source 1..20: mol_type = other DNA
tggccagtgactgtaatgac

SEQ ID NO: 8000 - DNA, 20 bp, synthetic construct
  misc_feature 1..20: note = Description of Artificial Sequence: Synthetic oligonucleotide
  source 1..20: mol_type = other DNA
ggccagtgactgtaatgacc

SEQ ID NO: 8001 - DNA, 20 bp, synthetic construct
  misc_feature 1..20: note = Description of Artificial Sequence: Synthetic oligonucleotide
  source 1..20: mol_type = other DNA
gccagtgactgtaatgacct

SEQ ID NO: 8002 - DNA, 20 bp, synthetic construct
  misc_feature 1..20: note = Description of Artificial Sequence: Synthetic oligonucleotide
  source 1..20: mol_type = other DNA
ccagtgactgtaatgacctc

SEQ ID NO: 8003 - DNA, 20 bp, synthetic construct
  misc_feature 1..20: note = Description of Artificial Sequence: Synthetic oligonucleotide
  source 1..20: mol_type = other DNA
cagtgactgtaatgacctca

SEQ ID NO: 8004 - DNA, 20 bp, synthetic construct
  misc_feature 1..20: note = Description of Artificial Sequence: Synthetic oligonucleotide
  source 1..20: mol_type = other DNA
agtgactgtaatgacctcac

SEQ ID NO: 8005 - DNA, 20 bp, synthetic construct
  misc_feature 1..20: note = Description of Artificial Sequence: Synthetic oligonucleotide
  source 1..20: mol_type = other DNA
gtgactgtaatgacctcacc

SEQ ID NO: 8006 - DNA, 20 bp, synthetic construct
  misc_feature 1..20: note = Description of Artificial Sequence: Synthetic oligonucleotide
  source 1..20: mol_type = other DNA
tgactgtaatgacctcacct

SEQ ID NO: 8007 - DNA, 20 bp, synthetic construct
  misc_feature 1..20: note = Description of Artificial Sequence: Synthetic oligonucleotide
  source 1..20: mol_type = other DNA
gactgtaatgacctcacctc

SEQ ID NO: 8008 - DNA, 20 bp, synthetic construct
  misc_feature 1..20: note = Description of Artificial Sequence: Synthetic oligonucleotide
  source 1..20: mol_type = other DNA
actgtaatgacctcacctcc

SEQ ID NO: 8009 - DNA, 20 bp, synthetic construct
  misc_feature 1..20: note = Description of Artificial Sequence: Synthetic oligonucleotide
  source 1..20: mol_type = other DNA
ctgtaatgacctcacctcca

SEQ ID NO: 8010 - DNA, 20 bp, synthetic construct
  misc_feature 1..20: note = Description of Artificial Sequence: Synthetic oligonucleotide
  source 1..20: mol_type = other DNA
tgtaatgacctcacctccag

SEQ ID NO: 8011 - DNA, 20 bp, synthetic construct
  misc_feature 1..20: note = Description of Artificial Sequence: Synthetic oligonucleotide
  source 1..20: mol_type = other DNA
gtaatgacctcacctccagt

SEQ ID NO: 8012 - DNA, 20 bp, synthetic construct
  misc_feature 1..20: note = Description of Artificial Sequence: Synthetic oligonucleotide
  source 1..20: mol_type = other DNA
taatgacctcacctccagtt

SEQ ID NO: 8013 - DNA, 20 bp, synthetic construct
  misc_feature 1..20: note = Description of Artificial Sequence: Synthetic oligonucleotide
  source 1..20: mol_type = other DNA
aatgacctcacctccagttc

SEQ ID NO: 8014 - DNA, 20 bp, synthetic construct
  misc_feature 1..20: note = Description of Artificial Sequence: Synthetic oligonucleotide
  source 1..20: mol_type = other DNA
atgacctcacctccagttca

SEQ ID NO: 8015 - DNA, 20 bp, synthetic construct
  misc_feature 1..20: note = Description of Artificial Sequence: Synthetic oligonucleotide
  source 1..20: mol_type = other DNA
tgacctcacctccagttcag

SEQ ID NO: 8016 - DNA, 20 bp, synthetic construct
  misc_feature 1..20: note = Description of Artificial Sequence: Synthetic oligonucleotide
  source 1..20: mol_type = other DNA
gacctcacctccagttcagg

SEQ ID NO: 8017 - DNA, 20 bp, synthetic construct
  misc_feature 1..20: note = Description of Artificial Sequence: Synthetic oligonucleotide
  source 1..20: mol_type = other DNA
acctcacctccagttcaggg

SEQ ID NO: 8018 - DNA, 20 bp, synthetic construct
  misc_feature 1..20: note = Description of Artificial Sequence: Synthetic oligonucleotide
  source 1..20: mol_type = other DNA
cctcacctccagttcagggc

SEQ ID NO: 8019 - DNA, 20 bp, synthetic construct
  misc_feature 1..20: note = Description of Artificial Sequence: Synthetic oligonucleotide
  source 1..20: mol_type = other DNA
ctcacctccagttcagggct

SEQ ID NO: 8020 - DNA, 20 bp, synthetic construct
  misc_feature 1..20: note = Description of Artificial Sequence: Synthetic oligonucleotide
  source 1..20: mol_type = other DNA
tcacctccagttcagggctg

SEQ ID NO: 8021 - DNA, 20 bp, synthetic construct
  misc_feature 1..20: note = Description of Artificial Sequence: Synthetic oligonucleotide
  source 1..20: mol_type = other DNA
cacctccagttcagggctgc

SEQ ID NO: 8022 - DNA, 20 bp, synthetic construct
  misc_feature 1..20: note = Description of Artificial Sequence: Synthetic oligonucleotide
  source 1..20: mol_type = other DNA
acctccagttcagggctgcc

SEQ ID NO: 8023 - DNA, 20 bp, synthetic construct
  misc_feature 1..20: note = Description of Artificial Sequence: Synthetic oligonucleotide
  source 1..20: mol_type = other DNA
cctccagttcagggctgccc

SEQ ID NO: 8024 - DNA, 20 bp, synthetic construct
  misc_feature 1..20: note = Description of Artificial Sequence: Synthetic oligonucleotide
  source 1..20: mol_type = other DNA
ctccagttcagggctgccca

SEQ ID NO: 8025 - DNA, 20 bp, synthetic construct
  misc_feature 1..20: note = Description of Artificial Sequence: Synthetic oligonucleotide
  source 1..20: mol_type = other DNA
tccagttcagggctgcccag

SEQ ID NO: 8026 - DNA, 20 bp, synthetic construct
  misc_feature 1..20: note = Description of Artificial Sequence: Synthetic oligonucleotide
  source 1..20: mol_type = other DNA
ccagttcagggctgcccagg

SEQ ID NO: 8027 - DNA, 20 bp, synthetic construct
  misc_feature 1..20: note = Description of Artificial Sequence: Synthetic oligonucleotide
  source 1..20: mol_type = other DNA
cagttcagggctgcccagga

SEQ ID NO: 8028 - DNA, 20 bp, synthetic construct
  misc_feature 1..20: note = Description of Artificial Sequence: Synthetic oligonucleotide
  source 1..20: mol_type = other DNA
agttcagggctgcccaggaa

SEQ ID NO: 8029 - DNA, 20 bp, synthetic construct
  misc_feature 1..20: note = Description of Artificial Sequence: Synthetic oligonucleotide
  source 1..20: mol_type = other DNA
gttcagggctgcccaggaag

SEQ ID NO: 8030 - DNA, 20 bp, synthetic construct
  misc_feature 1..20: note = Description of Artificial Sequence: Synthetic oligonucleotide
  source 1..20: mol_type = other DNA
ttcagggctgcccaggaagt

SEQ ID NO: 8031 - DNA, 20 bp, synthetic construct
  misc_feature 1..20: note = Description of Artificial Sequence: Synthetic oligonucleotide
  source 1..20: mol_type = other DNA
tcagggctgcccaggaagtc

SEQ ID NO: 8032 - DNA, 20 bp, synthetic construct
  misc_feature 1..20: note = Description of Artificial Sequence: Synthetic oligonucleotide
  source 1..20: mol_type = other DNA
cagggctgcccaggaagtca

SEQ ID NO: 8033 - DNA, 20 bp, synthetic construct
  misc_feature 1..20: note = Description of Artificial Sequence: Synthetic oligonucleotide
  source 1..20: mol_type = other DNA
agggctgcccaggaagtcat

SEQ ID NO: 8034 - DNA, 20 bp, synthetic construct
  misc_feature 1..20: note = Description of Artificial Sequence: Synthetic oligonucleotide
  source 1..20: mol_type = other DNA
gggctgcccaggaagtcatc

SEQ ID NO: 8035 - DNA, 20 bp, synthetic construct
  misc_feature 1..20: note = Description of Artificial Sequence: Synthetic oligonucleotide
  source 1..20: mol_type = other DNA
ggctgcccaggaagtcatca

SEQ ID NO: 8036 - DNA, 20 bp, synthetic construct
  misc_feature 1..20: note = Description of Artificial Sequence: Synthetic oligonucleotide
  source 1..20: mol_type = other DNA
gctgcccaggaagtcatcag

SEQ ID NO: 8037 - DNA, 20 bp, synthetic construct
  misc_feature 1..20: note = Description of Artificial Sequence: Synthetic oligonucleotide
  source 1..20: mol_type = other DNA
ctgcccaggaagtcatcagg

SEQ ID NO: 8038 - DNA, 20 bp, synthetic construct
  misc_feature 1..20: note = Description of Artificial Sequence: Synthetic oligonucleotide
  source 1..20: mol_type = other DNA
tgcccaggaagtcatcagga

SEQ ID NO: 8039 - DNA, 20 bp, synthetic construct
  misc_feature 1..20: note = Description of Artificial Sequence: Synthetic oligonucleotide
  source 1..20: mol_type = other DNA
gcccaggaagtcatcaggag

SEQ ID NO: 8040 - DNA, 20 bp, synthetic construct
  misc_feature 1..20: note = Description of Artificial Sequence: Synthetic oligonucleotide
  source 1..20: mol_type = other DNA
cccaggaagtcatcaggagg

SEQ ID NO: 8041 - DNA, 20 bp, synthetic construct
  misc_feature 1..20: note = Description of Artificial Sequence: Synthetic oligonucleotide
  source 1..20: mol_type = other DNA
ccaggaagtcatcaggagga

SEQ ID NO: 8042 - DNA, 20 bp, synthetic construct
  misc_feature 1..20: note = Description of Artificial Sequence: Synthetic oligonucleotide
  source 1..20: mol_type = other DNA
caggaagtcatcaggaggaa

SEQ ID NO: 8043 - DNA, 20 bp, synthetic construct
  misc_feature 1..20: note = Description of Artificial Sequence: Synthetic oligonucleotide
  source 1..20: mol_type = other DNA
aggaagtcatcaggaggaag

SEQ ID NO: 8044 - DNA, 20 bp, synthetic construct
  misc_feature 1..20: note = Description of Artificial Sequence: Synthetic oligonucleotide
  source 1..20: mol_type = other DNA
ggaagtcatcaggaggaagc

SEQ ID NO: 8045 - DNA, 20 bp, synthetic construct
  misc_feature 1..20: note = Description of Artificial Sequence: Synthetic oligonucleotide
  source 1..20: mol_type = other DNA
gaagtcatcaggaggaagct

SEQ ID NO: 8046 - DNA, 20 bp, synthetic construct
  misc_feature 1..20: note = Description of Artificial Sequence: Synthetic oligonucleotide
  source 1..20: mol_type = other DNA
aagtcatcaggaggaagctt

SEQ ID NO: 8047 - DNA, 20 bp, synthetic construct
  misc_feature 1..20: note = Description of Artificial Sequence: Synthetic oligonucleotide
  source 1..20: mol_type = other DNA
agtcatcaggaggaagctta

SEQ ID NO: 8048 - DNA, 20 bp, synthetic construct
  misc_feature 1..20: note = Description of Artificial Sequence: Synthetic oligonucleotide
  source 1..20: mol_type = other DNA
gtcatcaggaggaagcttat

SEQ ID NO: 8049 - DNA, 20 bp, synthetic construct
  misc_feature 1..20: note = Description of Artificial Sequence: Synthetic oligonucleotide
  source 1..20: mol_type = other DNA
tcatcaggaggaagcttata

SEQ ID NO: 8050 - DNA, 20 bp, synthetic construct
  misc_feature 1..20: note = Description of Artificial Sequence: Synthetic oligonucleotide
  source 1..20: mol_type = other DNA
catcaggaggaagcttatac

SEQ ID NO: 8051 - DNA, 20 bp, synthetic construct
  misc_feature 1..20: note = Description of Artificial Sequence: Synthetic oligonucleotide
  source 1..20: mol_type = other DNA
atcaggaggaagcttataca

SEQ ID NO: 8052 - DNA, 20 bp, synthetic construct
  misc_feature 1..20: note = Description of Artificial Sequence: Synthetic oligonucleotide
  source 1..20: mol_type = other DNA
tcaggaggaagcttatacac

SEQ ID NO: 8053 - DNA, 20 bp, synthetic construct
  misc_feature 1..20: note = Description of Artificial Sequence: Synthetic oligonucleotide
  source 1..20: mol_type = other DNA
caggaggaagcttatacact

SEQ ID NO: 8054 - DNA, 20 bp, synthetic construct
  misc_feature 1..20: note = Description of Artificial Sequence: Synthetic oligonucleotide
  source 1..20: mol_type = other DNA
aggaggaagcttatacactc

SEQ ID NO: 8055 - DNA, 20 bp, synthetic construct
  misc_feature 1..20: note = Description of Artificial Sequence: Synthetic oligonucleotide
  source 1..20: mol_type = other DNA
ggaggaagcttatacactcc

SEQ ID NO: 8056 - DNA, 20 bp, synthetic construct
  misc_feature 1..20: note = Description of Artificial Sequence: Synthetic oligonucleotide
  source 1..20: mol_type = other DNA
gaggaagcttatacactcca

SEQ ID NO: 8057 - DNA, 20 bp, synthetic construct
  misc_feature 1..20: note = Description of Artificial Sequence: Synthetic oligonucleotide
  source 1..20: mol_type = other DNA
aggaagcttatacactccag

SEQ ID NO: 8058 - DNA, 20 bp, synthetic construct
  misc_feature 1..20: note = Description of Artificial Sequence: Synthetic oligonucleotide
  source 1..20: mol_type = other DNA
ggaagcttatacactccaga

SEQ ID NO: 8059 - DNA, 20 bp, synthetic construct
  misc_feature 1..20: note = Description of Artificial Sequence: Synthetic oligonucleotide
  source 1..20: mol_type = other DNA
gaagcttatacactccagag

SEQ ID NO: 8060 - DNA, 20 bp, synthetic construct
  misc_feature 1..20: note = Description of Artificial Sequence: Synthetic oligonucleotide
  source 1..20: mol_type = other DNA
aagcttatacactccagaga

SEQ ID NO: 8061 - DNA, 20 bp, synthetic construct
  misc_feature 1..20: note = Description of Artificial Sequence: Synthetic oligonucleotide
  source 1..20: mol_type = other DNA
agcttatacactccagagat

SEQ ID NO: 8062 - DNA, 20 bp, synthetic construct
  misc_feature 1..20: note = Description of Artificial Sequence: Synthetic oligonucleotide
  source 1..20: mol_type = other DNA
gcttatacactccagagatg

SEQ ID NO: 8063 - DNA, 20 bp, synthetic construct
  misc_feature 1..20: note = Description of Artificial Sequence: Synthetic oligonucleotide
  source 1..20: mol_type = other DNA
cttatacactccagagatgc

SEQ ID NO: 8064 - DNA, 20 bp, synthetic construct
  misc_feature 1..20: note = Description of Artificial Sequence: Synthetic oligonucleotide
  source 1..20: mol_type = other DNA
ttatacactccagagatgcg

SEQ ID NO: 8065 - DNA, 20 bp, synthetic construct
  misc_feature 1..20: note = Description of Artificial Sequence: Synthetic oligonucleotide
  source 1..20: mol_type = other DNA
tatacactccagagatgcgg

SEQ ID NO: 8066 - DNA, 20 bp, synthetic construct
  misc_feature 1..20: note = Description of Artificial Sequence: Synthetic oligonucleotide
  source 1..20: mol_type = other DNA
atacactccagagatgcggt

SEQ ID NO: 8067 - DNA, 20 bp, synthetic construct
  misc_feature 1..20: note = Description of Artificial Sequence: Synthetic oligonucleotide
  source 1..20: mol_type = other DNA
tacactccagagatgcggta

SEQ ID NO: 8068 - DNA, 20 bp, synthetic construct
  misc_feature 1..20: note = Description of Artificial Sequence: Synthetic oligonucleotide
  source 1..20: mol_type = other DNA
acactccagagatgcggtag

SEQ ID NO: 8069 - DNA, 20 bp, synthetic construct
  misc_feature 1..20: note = Description of Artificial Sequence: Synthetic oligonucleotide
  source 1..20: mol_type = other DNA
cactccagagatgcggtagt

SEQ ID NO: 8070 - DNA, 20 bp, synthetic construct
  misc_feature 1..20: note = Description of Artificial Sequence: Synthetic oligonucleotide
  source 1..20: mol_type = other DNA
actccagagatgcggtagtt

SEQ ID NO: 8071 - DNA, 20 bp, synthetic construct
  misc_feature 1..20: note = Description of Artificial Sequence: Synthetic oligonucleotide
  source 1..20: mol_type = other DNA
ctccagagatgcggtagttc

SEQ ID NO: 8072 - DNA, 20 bp, synthetic construct
  misc_feature 1..20: note = Description of Artificial Sequence: Synthetic oligonucleotide
  source 1..20: mol_type = other DNA
tccagagatgcggtagttct

SEQ ID NO: 8073 - DNA, 20 bp, synthetic construct
  misc_feature 1..20: note = Description of Artificial Sequence: Synthetic oligonucleotide
  source 1..20: mol_type = other DNA
ccagagatgcggtagttctt

SEQ ID NO: 8074 - DNA, 20 bp, synthetic construct
  misc_feature 1..20: note = Description of Artificial Sequence: Synthetic oligonucleotide
  source 1..20: mol_type = other DNA
cagagatgcggtagttcttc

SEQ ID NO: 8075 - DNA, 20 bp, synthetic construct
  misc_feature 1..20: note = Description of Artificial Sequence: Synthetic oligonucleotide
  source 1..20: mol_type = other DNA
agagatgcggtagttcttct

SEQ ID NO: 8076 - DNA, 20 bp, synthetic construct
  misc_feature 1..20: note = Description of Artificial Sequence: Synthetic oligonucleotide
  source 1..20: mol_type = other DNA
gagatgcggtagttcttctg

SEQ ID NO: 8077 - DNA, 20 bp, synthetic construct
  misc_feature 1..20: note = Description of Artificial Sequence: Synthetic oligonucleotide
  source 1..20: mol_type = other DNA
agatgcggtagttcttctgg

SEQ ID NO: 8078 - DNA, 20 bp, synthetic construct
  misc_feature 1..20: note = Description of Artificial Sequence: Synthetic oligonucleotide
  source 1..20: mol_type = other DNA
gatgcggtagttcttctggt

SEQ ID NO: 8079 - DNA, 20 bp, synthetic construct
  misc_feature 1..20: note = Description of Artificial Sequence: Synthetic oligonucleotide
  source 1..20: mol_type = other DNA
atgcggtagttcttctggta

SEQ ID NO: 8080 - DNA, 20 bp, synthetic construct
  misc_feature 1..20: note = Description of Artificial Sequence: Synthetic oligonucleotide
  source 1..20: mol_type = other DNA
tgcggtagttcttctggtag

SEQ ID NO: 8081 - DNA, 20 bp, synthetic construct
  misc_feature 1..20: note = Description of Artificial Sequence: Synthetic oligonucleotide
  source 1..20: mol_type = other DNA
gcggtagttcttctggtaga

SEQ ID NO: 8082 - DNA, 20 bp, synthetic construct
  misc_feature 1..20: note = Description of Artificial Sequence: Synthetic oligonucleotide
  source 1..20: mol_type = other DNA
cggtagttcttctggtagag

SEQ ID NO: 8083 - DNA, 20 bp, synthetic construct
  misc_feature 1..20: note = Description of Artificial Sequence: Synthetic oligonucleotide
  source 1..20: mol_type = other DNA
ggtagttcttctggtagagg

SEQ ID NO: 8084 - DNA, 20 bp, synthetic construct
  misc_feature 1..20: note = Description of Artificial Sequence: Synthetic oligonucleotide
  source 1..20: mol_type = other DNA
gtagttcttctggtagaggg

SEQ ID NO: 8085 - DNA, 20 bp, synthetic construct
  misc_feature 1..20: note = Description of Artificial Sequence: Synthetic oligonucleotide
  source 1..20: mol_type = other DNA
tagttcttctggtagaggga

SEQ ID NO: 8086 - DNA, 20 bp, synthetic construct
  misc_feature 1..20: note = Description of Artificial Sequence: Synthetic oligonucleotide
  source 1..20: mol_type = other DNA
agttcttctggtagagggaa

SEQ ID NO: 8087 - DNA, 20 bp, synthetic construct
  misc_feature 1..20: note = Description of Artificial Sequence: Synthetic oligonucleotide
  source 1..20: mol_type = other DNA
gttcttctggtagagggaag

SEQ ID NO: 8088 - DNA, 20 bp, synthetic construct
  misc_feature 1..20: note = Description of Artificial Sequence: Synthetic oligonucleotide
  source 1..20: mol_type = other DNA
ttcttctggtagagggaaga

SEQ ID NO: 8089 - DNA, 20 bp, synthetic construct
  misc_feature 1..20: note = Description of Artificial Sequence: Synthetic oligonucleotide
  source 1..20: mol_type = other DNA
tcttctggtagagggaagag

SEQ ID NO: 8090 - DNA, 20 bp, synthetic construct
  misc_feature 1..20: note = Description of Artificial Sequence: Synthetic oligonucleotide
  source 1..20: mol_type = other DNA
cttctggtagagggaagagc

SEQ ID NO: 8091 - DNA, 20 bp, synthetic construct
  misc_feature 1..20: note = Description of Artificial Sequence: Synthetic oligonucleotide
  source 1..20: mol_type = other DNA
ttctggtagagggaagagca

SEQ ID NO: 8092 - DNA, 20 bp, synthetic construct
  misc_feature 1..20: note = Description of Artificial Sequence: Synthetic oligonucleotide
  source 1..20: mol_type = other DNA
tctggtagagggaagagcag

SEQ ID NO: 8093 - DNA, 20 bp, synthetic construct
  misc_feature 1..20: note = Description of Artificial Sequence: Synthetic oligonucleotide
  source 1..20: mol_type = other DNA
ctggtagagggaagagcagt

SEQ ID NO: 8094 - DNA, 20 bp, synthetic construct
  misc_feature 1..20: note = Description of Artificial Sequence: Synthetic oligonucleotide
  source 1..20: mol_type = other DNA
tggtagagggaagagcagtc

SEQ ID NO: 8095 - DNA, 20 bp, synthetic construct
  misc_feature 1..20: note = Description of Artificial Sequence: Synthetic oligonucleotide
  source 1..20: mol_type = other DNA
ggtagagggaagagcagtcg

SEQ ID NO: 8096 - DNA, 20 bp, synthetic construct
  misc_feature 1..20: note = Description of Artificial Sequence: Synthetic oligonucleotide
  source 1..20: mol_type = other DNA
gtagagggaagagcagtcgt

SEQ ID NO: 8097 - DNA, 20 bp, synthetic construct
  misc_feature 1..20: note = Description of Artificial Sequence: Synthetic oligonucleotide
  source 1..20: mol_type = other DNA
tagagggaagagcagtcgta

SEQ ID NO: 8098 - DNA, 20 bp, synthetic construct
  misc_feature 1..20: note = Description of Artificial Sequence: Synthetic oligonucleotide
  source 1..20: mol_type = other DNA
agagggaagagcagtcgtag

SEQ ID NO: 8099 - DNA, 20 bp, synthetic construct
  misc_feature 1..20: note = Description of Artificial Sequence: Synthetic oligonucleotide
  source 1..20: mol_type = other DNA
gagggaagagcagtcgtaga

SEQ ID NO: 8100 - DNA, 20 bp, synthetic construct
  misc_feature 1..20: note = Description of Artificial Sequence: Synthetic oligonucleotide
  source 1..20: mol_type = other DNA
agggaagagcagtcgtagat

SEQ ID NO: 8101 - DNA, 20 bp, synthetic construct
  misc_feature 1..20: note = Description of Artificial Sequence: Synthetic oligonucleotide
  source 1..20: mol_type = other DNA
gggaagagcagtcgtagatg

SEQ ID NO: 8102 - DNA, 20 bp, synthetic construct
  misc_feature 1..20: note = Description of Artificial Sequence: Synthetic oligonucleotide
  source 1..20: mol_type = other DNA
ggaagagcagtcgtagatgg

SEQ ID NO: 8103 - DNA, 20 bp, synthetic construct
  misc_feature 1..20: note = Description of Artificial Sequence: Synthetic oligonucleotide
  source 1..20: mol_type = other DNA
gaagagcagtcgtagatggc

SEQ ID NO: 8104 - DNA, 20 bp, synthetic construct
  misc_feature 1..20: note = Description of Artificial Sequence: Synthetic oligonucleotide
  source 1..20: mol_type = other DNA
aagagcagtcgtagatggca

SEQ ID NO: 8105 - DNA, 20 bp, synthetic construct
  misc_feature 1..20: note = Description of Artificial Sequence: Synthetic oligonucleotide
  source 1..20: mol_type = other DNA
agagcagtcgtagatggcat

SEQ ID NO: 8106 - DNA, 20 bp, synthetic construct
  misc_feature 1..20: note = Description of Artificial Sequence: Synthetic oligonucleotide
  source 1..20: mol_type = other DNA
gagcagtcgtagatggcatc

SEQ ID NO: 8107 - DNA, 20 bp, synthetic construct
  misc_feature 1..20: note = Description of Artificial Sequence: Synthetic oligonucleotide
  source 1..20: mol_type = other DNA
agcagtcgtagatggcatct

SEQ ID NO: 8108 - DNA, 20 bp, synthetic construct
  misc_feature 1..20: note = Description of Artificial Sequence: Synthetic oligonucleotide
  source 1..20: mol_type = other DNA
gcagtcgtagatggcatcta

SEQ ID NO: 8109 - DNA, 20 bp, synthetic construct
  misc_feature 1..20: note = Description of Artificial Sequence: Synthetic oligonucleotide
  source 1..20: mol_type = other DNA
cagtcgtagatggcatctac

SEQ ID NO: 8110 - DNA, 20 bp, synthetic construct
  misc_feature 1..20: note = Description of Artificial Sequence: Synthetic oligonucleotide
  source 1..20: mol_type = other DNA
agtcgtagatggcatctaca

SEQ ID NO: 8111 - DNA, 20 bp, synthetic construct
  misc_feature 1..20: note = Description of Artificial Sequence: Synthetic oligonucleotide
  source 1..20: mol_type = other DNA
gtcgtagatggcatctacaa

SEQ ID NO: 8112 - DNA, 20 bp, synthetic construct
  misc_feature 1..20: note = Description of Artificial Sequence: Synthetic oligonucleotide
  source 1..20: mol_type = other DNA
tcgtagatggcatctacaag

SEQ ID NO: 8113 - DNA, 20 bp, synthetic construct
  misc_feature 1..20: note = Description of Artificial Sequence: Synthetic oligonucleotide
  source 1..20: mol_type = other DNA
cgtagatggcatctacaaga

SEQ ID NO: 8114 - DNA, 20 bp, synthetic construct
  misc_feature 1..20: note = Description of Artificial Sequence: Synthetic oligonucleotide
  source 1..20: mol_type = other DNA
gtagatggcatctacaagag

SEQ ID NO: 8115 - DNA, 20 bp, synthetic construct
  misc_feature 1..20: note = Description of Artificial Sequence: Synthetic oligonucleotide
  source 1..20: mol_type = other DNA
tagatggcatctacaagaga

SEQ ID NO: 8116 - DNA, 20 bp, synthetic construct
  misc_feature 1..20: note = Description of Artificial Sequence: Synthetic oligonucleotide
  source 1..20: mol_type = other DNA
agatggcatctacaagagaa

SEQ ID NO: 8117 - DNA, 20 bp, synthetic construct
  misc_feature 1..20: note = Description of Artificial Sequence: Synthetic oligonucleotide
  source 1..20: mol_type = other DNA
gatggcatctacaagagaac

SEQ ID NO: 8118 - DNA, 20 bp, synthetic construct
  misc_feature 1..20: note = Description of Artificial Sequence: Synthetic oligonucleotide
  source 1..20: mol_type = other DNA
atggcatctacaagagaaca

SEQ ID NO: 8119 - DNA, 20 bp, synthetic construct
  misc_feature 1..20: note = Description of Artificial Sequence: Synthetic oligonucleotide
  source 1..20: mol_type = other DNA
tggcatctacaagagaacaa

SEQ ID NO: 8120 - DNA, 20 bp, synthetic construct
  misc_feature 1..20: note = Description of Artificial Sequence: Synthetic oligonucleotide
  source 1..20: mol_type = other DNA
ggcatctacaagagaacaaa

SEQ ID NO: 8121 - DNA, 20 bp, synthetic construct
  misc_feature 1..20: note = Description of Artificial Sequence: Synthetic oligonucleotide
  source 1..20: mol_type = other DNA
gcatctacaagagaacaaac

SEQ ID NO: 8122 - DNA, 20 bp, synthetic construct
  misc_feature 1..20: note = Description of Artificial Sequence: Synthetic oligonucleotide
  source 1..20: mol_type = other DNA
catctacaagagaacaaacc

SEQ ID NO: 8123 - DNA, 20 bp, synthetic construct
  misc_feature 1..20: note = Description of Artificial Sequence: Synthetic oligonucleotide
  source 1..20: mol_type = other DNA
atctacaagagaacaaacca

SEQ ID NO: 8124 - DNA, 20 bp, synthetic construct
  misc_feature 1..20: note = Description of Artificial Sequence: Synthetic oligonucleotide
  source 1..20: mol_type = other DNA
tctacaagagaacaaaccac

SEQ ID NO: 8125 - DNA, 20 bp, synthetic construct
  misc_feature 1..20: note = Description of Artificial Sequence: Synthetic oligonucleotide
  source 1..20: mol_type = other DNA
ctacaagagaacaaaccaca

SEQ ID NO: 8126 - DNA, 20 bp, synthetic construct
  misc_feature 1..20: note = Description of Artificial Sequence: Synthetic oligonucleotide
  source 1..20: mol_type = other DNA
tacaagagaacaaaccacag

SEQ ID NO: 8127 - DNA, 20 bp, synthetic construct
  misc_feature 1..20: note = Description of Artificial Sequence: Synthetic oligonucleotide
  source 1..20: mol_type = other DNA
acaagagaacaaaccacagg

SEQ ID NO: 8128 - DNA, 20 bp, synthetic construct
  misc_feature 1..20: note = Description of Artificial Sequence: Synthetic oligonucleotide
  source 1..20: mol_type = other DNA
caagagaacaaaccacaggg

SEQ ID NO: 8129 - DNA, 20 bp, synthetic construct
  misc_feature 1..20: note = Description of Artificial Sequence: Synthetic oligonucleotide
  source 1..20: mol_type = other DNA
aagagaacaaaccacagggt

SEQ ID NO: 8130 - DNA, 20 bp, synthetic construct
  misc_feature 1..20: note = Description of Artificial Sequence: Synthetic oligonucleotide
  source 1..20: mol_type = other DNA
agagaacaaaccacagggtg

SEQ ID NO: 8131 - DNA, 20 bp, synthetic construct
  misc_feature 1..20: note = Description of Artificial Sequence: Synthetic oligonucleotide
  source 1..20: mol_type = other DNA
gagaacaaaccacagggtga

SEQ ID NO: 8132 - DNA, 20 bp, synthetic construct
  misc_feature 1..20: note = Description of Artificial Sequence: Synthetic oligonucleotide
  source 1..20: mol_type = other DNA
agaacaaaccacagggtgag

SEQ ID NO: 8133 - DNA, 20 bp, synthetic construct
  misc_feature 1..20: note = Description of Artificial Sequence: Synthetic oligonucleotide
  source 1..20: mol_type = other DNA
gaacaaaccacagggtgagc

SEQ ID NO: 8134 - DNA, 20 bp, synthetic construct
  misc_feature 1..20: note = Description of Artificial Sequence: Synthetic oligonucleotide
  source 1..20: mol_type = other DNA
aacaaaccacagggtgagca

SEQ ID NO: 8135 - DNA, 20 bp, synthetic construct
  misc_feature 1..20: note = Description of Artificial Sequence: Synthetic oligonucleotide
  source 1..20: mol_type = other DNA
acaaaccacagggtgagcat

SEQ ID NO: 8136 - DNA, 20 bp, synthetic construct
  misc_feature 1..20: note = Description of Artificial Sequence: Synthetic oligonucleotide
  source 1..20: mol_type = other DNA
caaaccacagggtgagcatt

SEQ ID NO: 8137 - DNA, 20 bp, synthetic construct
  misc_feature 1..20: note = Description of Artificial Sequence: Synthetic oligonucleotide
  source 1..20: mol_type = other DNA
aaaccacagggtgagcattt

SEQ ID NO: 8138 - DNA, 20 bp, synthetic construct
  misc_feature 1..20: note = Description of Artificial Sequence: Synthetic oligonucleotide
  source 1..20: mol_type = other DNA
aaccacagggtgagcattta

SEQ ID NO: 8139 - DNA, 20 bp, synthetic construct
  misc_feature 1..20: note = Description of Artificial Sequence: Synthetic oligonucleotide
  source 1..20: mol_type = other DNA
accacagggtgagcatttag

SEQ ID NO: 8140 - DNA, 20 bp, synthetic construct
  misc_feature 1..20: note = Description of Artificial Sequence: Synthetic oligonucleotide
  source 1..20: mol_type = other DNA
ccacagggtgagcatttaga

SEQ ID NO: 8141 - DNA, 20 bp, synthetic construct
  misc_feature 1..20: note = Description of Artificial Sequence: Synthetic oligonucleotide
  source 1..20: mol_type = other DNA
cacagggtgagcatttagac

SEQ ID NO: 8142 - DNA, 20 bp, synthetic construct
  misc_feature 1..20: note = Description of Artificial Sequence: Synthetic oligonucleotide
  source 1..20: mol_type = other DNA
acagggtgagcatttagacc

SEQ ID NO: 8143 - DNA, 20 bp, synthetic construct
  misc_feature 1..20: note = Description of Artificial Sequence: Synthetic oligonucleotide
  source 1..20: mol_type = other DNA
cagggtgagcatttagaccc

SEQ ID NO: 8144 - DNA, 20 bp, synthetic construct
  misc_feature 1..20: note = Description of Artificial Sequence: Synthetic oligonucleotide
  source 1..20: mol_type = other DNA
agggtgagcatttagaccca

SEQ ID NO: 8145 - DNA, 20 bp, synthetic construct
  misc_feature 1..20: note = Description of Artificial Sequence: Synthetic oligonucleotide
  source 1..20: mol_type = other DNA
gggtgagcatttagacccag

SEQ ID NO: 8146 - DNA, 20 bp, synthetic construct
  misc_feature 1..20: note = Description of Artificial Sequence: Synthetic oligonucleotide
  source 1..20: mol_type = other DNA
ggtgagcatttagacccagt

SEQ ID NO: 8147 - DNA, 20 bp, synthetic construct
  misc_feature 1..20: note = Description of Artificial Sequence: Synthetic oligonucleotide
  source 1..20: mol_type = other DNA
gtgagcatttagacccagtg

SEQ ID NO: 8148 - DNA, 20 bp, synthetic construct
  misc_feature 1..20: note = Description of Artificial Sequence: Synthetic oligonucleotide
  source 1..20: mol_type = other DNA
tgagcatttagacccagtgg

SEQ ID NO: 8149 - DNA, 20 bp, synthetic construct
  misc_feature 1..20: note = Description of Artificial Sequence: Synthetic oligonucleotide
  source 1..20: mol_type = other DNA
gagcatttagacccagtggc

SEQ ID NO: 8150 - DNA, 20 bp, synthetic construct
  misc_feature 1..20: note = Description of Artificial Sequence: Synthetic oligonucleotide
  source 1..20: mol_type = other DNA
agcatttagacccagtggct

SEQ ID NO: 8151 - DNA, 20 bp, synthetic construct
  misc_feature 1..20: note = Description of Artificial Sequence: Synthetic oligonucleotide
  source 1..20: mol_type = other DNA
gcatttagacccagtggctc

SEQ ID NO: 8152 - DNA, 20 bp, synthetic construct
  misc_feature 1..20: note = Description of Artificial Sequence: Synthetic oligonucleotide
  source 1..20: mol_type = other DNA
catttagacccagtggctcc

SEQ ID NO: 8153 - DNA, 20 bp, synthetic construct
  misc_feature 1..20: note = Description of Artificial Sequence: Synthetic oligonucleotide
  source 1..20: mol_type = other DNA
atttagacccagtggctcca

SEQ ID NO: 8154 - DNA, 20 bp, synthetic construct
  misc_feature 1..20: note = Description of Artificial Sequence: Synthetic oligonucleotide
  source 1..20: mol_type = other DNA
tttagacccagtggctccat

SEQ ID NO: 8155 - DNA, 20 bp, synthetic construct
  misc_feature 1..20: note = Description of Artificial Sequence: Synthetic oligonucleotide
  source 1..20: mol_type = other DNA
ttagacccagtggctccatc

SEQ ID NO: 8156 - DNA, 20 bp, synthetic construct
  misc_feature 1..20: note = Description of Artificial Sequence: Synthetic oligonucleotide
  source 1..20: mol_type = other DNA
tagacccagtggctccatct

SEQ ID NO: 8157 - DNA, 20 bp, synthetic construct
  misc_feature 1..20: note = Description of Artificial Sequence: Synthetic oligonucleotide
  source 1..20: mol_type = other DNA
agacccagtggctccatctg

SEQ ID NO: 8158 - DNA, 20 bp, synthetic construct
  misc_feature 1..20: note = Description of Artificial Sequence: Synthetic oligonucleotide
  source 1..20: mol_type = other DNA
gacccagtggctccatctga

SEQ ID NO: 8159 - DNA, 20 bp, synthetic construct
  misc_feature 1..20: note = Description of Artificial Sequence: Synthetic oligonucleotide
  source 1..20: mol_type = other DNA
acccagtggctccatctgag

SEQ ID NO: 8160 - DNA, 20 bp, synthetic construct
  misc_feature 1..20: note = Description of Artificial Sequence: Synthetic oligonucleotide
  source 1..20: mol_type = other DNA
cccagtggctccatctgagt

SEQ ID NO: 8161 - DNA, 20 bp, synthetic construct
  misc_feature 1..20: note = Description of Artificial Sequence: Synthetic oligonucleotide
  source 1..20: mol_type = other DNA
ccagtggctccatctgagtt

SEQ ID NO: 8162 - DNA, 20 bp, synthetic construct
  misc_feature 1..20: note = Description of Artificial Sequence: Synthetic oligonucleotide
  source 1..20: mol_type = other DNA
cagtggctccatctgagttg

SEQ ID NO: 8163 - DNA, 20 bp, synthetic construct
  misc_feature 1..20: note = Description of Artificial Sequence: Synthetic oligonucleotide
  source 1..20: mol_type = other DNA
agtggctccatctgagttga

SEQ ID NO: 8164 - DNA, 20 bp, synthetic construct
  misc_feature 1..20: note = Description of Artificial Sequence: Synthetic oligonucleotide
  source 1..20: mol_type = other DNA
gtggctccatctgagttgag

SEQ ID NO: 8165 - DNA, 20 bp, synthetic construct
  misc_feature 1..20: note = Description of Artificial Sequence: Synthetic oligonucleotide
  source 1..20: mol_type = other DNA
tggctccatctgagttgagt

SEQ ID NO: 8166 - DNA, 20 bp, synthetic construct
  misc_feature 1..20: note = Description of Artificial Sequence: Synthetic oligonucleotide
  source 1..20: mol_type = other DNA
ggctccatctgagttgagtg

SEQ ID NO: 8167 - DNA, 20 bp, synthetic construct
  misc_feature 1..20: note = Description of Artificial Sequence: Synthetic oligonucleotide
  source 1..20: mol_type = other DNA
gctccatctgagttgagtgt

SEQ ID NO: 8168 - DNA, 20 bp, synthetic construct
  misc_feature 1..20: note = Description of Artificial Sequence: Synthetic oligonucleotide
  source 1..20: mol_type = other DNA
ctccatctgagttgagtgtt

SEQ ID NO: 8169 - DNA, 20 bp, synthetic construct
  misc_feature 1..20: note = Description of Artificial Sequence: Synthetic oligonucleotide
  source 1..20: mol_type = other DNA
tccatctgagttgagtgttt

SEQ ID NO: 8170 - DNA, 20 bp, synthetic construct
  misc_feature 1..20: note = Description of Artificial Sequence: Synthetic oligonucleotide
  source 1..20: mol_type = other DNA
ccatctgagttgagtgttta

SEQ ID NO: 8171 - DNA, 20 bp, synthetic construct
  misc_feature 1..20: note = Description of Artificial Sequence: Synthetic oligonucleotide
  source 1..20: mol_type = other DNA
catctgagttgagtgtttag

SEQ ID NO: 8172 - DNA, 20 bp, synthetic construct
  misc_feature 1..20: note = Description of Artificial Sequence: Synthetic oligonucleotide
  source 1..20: mol_type = other DNA
atctgagttgagtgtttaga

SEQ ID NO: 8173 - DNA, 20 bp, synthetic construct
  misc_feature 1..20: note = Description of Artificial Sequence: Synthetic oligonucleotide
  source 1..20: mol_type = other DNA
tctgagttgagtgtttagag

SEQ ID NO: 8174 - DNA, 20 bp, synthetic construct
  misc_feature 1..20: note = Description of Artificial Sequence: Synthetic oligonucleotide
  source 1..20: mol_type = other DNA
ctgagttgagtgtttagaga

SEQ ID NO: 8175 - DNA, 20 bp, synthetic construct
  misc_feature 1..20: note = Description of Artificial Sequence: Synthetic oligonucleotide
  source 1..20: mol_type = other DNA
tgagttgagtgtttagagac

SEQ ID NO: 8176 - DNA, 20 bp, synthetic construct
  misc_feature 1..20: note = Description of Artificial Sequence: Synthetic oligonucleotide
  source 1..20: mol_type = other DNA
gagttgagtgtttagagact

SEQ ID NO: 8177 - DNA, 20 bp, synthetic construct
  misc_feature 1..20: note = Description of Artificial Sequence: Synthetic oligonucleotide
  source 1..20: mol_type = other DNA
agttgagtgtttagagactg

SEQ ID NO: 8178 - DNA, 20 bp, synthetic construct
  misc_feature 1..20: note = Description of Artificial Sequence: Synthetic oligonucleotide
  source 1..20: mol_type = other DNA
gttgagtgtttagagactga

SEQ ID NO: 8179 - DNA, 20 bp, synthetic construct
  misc_feature 1..20: note = Description of Artificial Sequence: Synthetic oligonucleotide
  source 1..20: mol_type = other DNA
ttgagtgtttagagactgag

SEQ ID NO: 8180 - DNA, 20 bp, synthetic construct
  misc_feature 1..20: note = Description of Artificial Sequence: Synthetic oligonucleotide
  source 1..20: mol_type = other DNA
tgagtgtttagagactgagc

SEQ ID NO: 8181 - DNA, 20 bp, synthetic construct
  misc_feature 1..20: note = Description of Artificial Sequence: Synthetic oligonucleotide
  source 1..20: mol_type = other DNA
gagtgtttagagactgagcc

SEQ ID NO: 8182 - DNA, 20 bp, synthetic construct
  misc_feature 1..20: note = Description of Artificial Sequence: Synthetic oligonucleotide
  source 1..20: mol_type = other DNA
agtgtttagagactgagcct

SEQ ID NO: 8183 - DNA, 20 bp, synthetic construct
  misc_feature 1..20: note = Description of Artificial Sequence: Synthetic oligonucleotide
  source 1..20: mol_type = other DNA
gtgtttagagactgagcctt

SEQ ID NO: 8184 - DNA, 20 bp, synthetic construct
  misc_feature 1..20: note = Description of Artificial Sequence: Synthetic oligonucleotide
  source 1..20: mol_type = other DNA
tgtttagagactgagccttt

SEQ ID NO: 8185 - DNA, 20 bp, synthetic construct
  misc_feature 1..20: note = Description of Artificial Sequence: Synthetic oligonucleotide
  source 1..20: mol_type = other DNA
gtttagagactgagccttta

SEQ ID NO: 8186 - DNA, 20 bp, synthetic construct
  misc_feature 1..20: note = Description of Artificial Sequence: Synthetic oligonucleotide
  source 1..20: mol_type = other DNA
tttagagactgagcctttat

SEQ ID NO: 8187 - DNA, 20 bp, synthetic construct
  misc_feature 1..20: note = Description of Artificial Sequence: Synthetic oligonucleotide
  source 1..20: mol_type = other DNA
ttagagactgagcctttatt

SEQ ID NO: 8188 - DNA, 20 bp, synthetic construct
  misc_feature 1..20: note = Description of Artificial Sequence: Synthetic oligonucleotide
  source 1..20: mol_type = other DNA
tagagactgagcctttattt

SEQ ID NO: 8189 - DNA, 20 bp, synthetic construct
  misc_feature 1..20: note = Description of Artificial Sequence: Synthetic oligonucleotide
  source 1..20: mol_type = other DNA
agagactgagcctttatttc

SEQ ID NO: 8190 - DNA, 20 bp, synthetic construct
  misc_feature 1..20: note = Description of Artificial Sequence: Synthetic oligonucleotide
  source 1..20: mol_type = other DNA
gagactgagcctttatttct

SEQ ID NO: 8191 - DNA, 20 bp, synthetic construct
  misc_feature 1..20: note = Description of Artificial Sequence: Synthetic oligonucleotide
  source 1..20: mol_type = other DNA
agactgagcctttatttcta

SEQ ID NO: 8192 - DNA, 20 bp, synthetic construct
  misc_feature 1..20: note = Description of Artificial Sequence: Synthetic oligonucleotide
  source 1..20: mol_type = other DNA
gactgagcctttatttctac

SEQ ID NO: 8193 - DNA, 20 bp, synthetic construct
  misc_feature 1..20: note = Description of Artificial Sequence: Synthetic oligonucleotide
  source 1..20: mol_type = other DNA
actgagcctttatttctacc

SEQ ID NO: 8194 - DNA, 20 bp, synthetic construct
  misc_feature 1..20: note = Description of Artificial Sequence: Synthetic oligonucleotide
  source 1..20: mol_type = other DNA
ctgagcctttatttctaccc

SEQ ID NO: 8195 - DNA, 20 bp, synthetic construct
  misc_feature 1..20: note = Description of Artificial Sequence: Synthetic oligonucleotide
  source 1..20: mol_type = other DNA
tgagcctttatttctaccct

SEQ ID NO: 8196 - DNA, 20 bp, synthetic construct
  misc_feature 1..20: note = Description of Artificial Sequence: Synthetic oligonucleotide
  source 1..20: mol_type = other DNA
gagcctttatttctaccctg

SEQ ID NO: 8197 - DNA, 20 bp, synthetic construct
  misc_feature 1..20: note = Description of Artificial Sequence: Synthetic oligonucleotide
  source 1..20: mol_type = other DNA
agcctttatttctaccctgg

SEQ ID NO: 8198 - DNA, 20 bp, synthetic construct
  misc_feature 1..20: note = Description of Artificial Sequence: Synthetic oligonucleotide
  source 1..20: mol_type = other DNA
gcctttatttctaccctggg

SEQ ID NO: 8199 - DNA, 20 bp, synthetic construct
  misc_feature 1..20: note = Description of Artificial Sequence: Synthetic oligonucleotide
  source 1..20: mol_type = other DNA
cctttatttctaccctggga

SEQ ID NO: 8200 - DNA, 20 bp, synthetic construct
  misc_feature 1..20: note = Description of Artificial Sequence: Synthetic oligonucleotide
  source 1..20: mol_type = other DNA
ctttatttctaccctgggat

SEQ ID NO: 8201 - DNA, 20 bp, synthetic construct
  misc_feature 1..20: note = Description of Artificial Sequence: Synthetic oligonucleotide
  source 1..20: mol_type = other DNA
tttatttctaccctgggatt

SEQ ID NO: 8202 - DNA, 20 bp, synthetic construct
  misc_feature 1..20: note = Description of Artificial Sequence: Synthetic oligonucleotide
  source 1..20: mol_type = other DNA
ttatttctaccctgggattc

SEQ ID NO: 8203 - DNA, 20 bp, synthetic construct
  misc_feature 1..20: note = Description of Artificial Sequence: Synthetic oligonucleotide
  source 1..20: mol_type = other DNA
tatttctaccctgggattct

SEQ ID NO: 8204 - DNA, 20 bp, synthetic construct
  misc_feature 1..20: note = Description of Artificial Sequence: Synthetic oligonucleotide
  source 1..20: mol_type = other DNA
atttctaccctgggattctc

SEQ ID NO: 8205 - DNA, 20 bp, synthetic construct
  misc_feature 1..20: note = Description of Artificial Sequence: Synthetic oligonucleotide
  source 1..20: mol_type = other DNA
tttctaccctgggattctca

SEQ ID NO: 8206 - DNA, 20 bp, synthetic construct
  misc_feature 1..20: note = Description of Artificial Sequence: Synthetic oligonucleotide
  source 1..20: mol_type = other DNA
ttctaccctgggattctcag

SEQ ID NO: 8207 - DNA, 20 bp, synthetic construct
  misc_feature 1..20: note = Description of Artificial Sequence: Synthetic oligonucleotide
  source 1..20: mol_type = other DNA
tctaccctgggattctcagt

SEQ ID NO: 8208 - DNA, 20 bp, synthetic construct
  misc_feature 1..20: note = Description of Artificial Sequence: Synthetic oligonucleotide
  source 1..20: mol_type = other DNA
ctaccctgggattctcagtg

SEQ ID NO: 8209 - DNA, 20 bp, synthetic construct
  misc_feature 1..20: note = Description of Artificial Sequence: Synthetic oligonucleotide
  source 1..20: mol_type = other DNA
taccctgggattctcagtgg

SEQ ID NO: 8210 - DNA, 20 bp, synthetic construct
  misc_feature 1..20: note = Description of Artificial Sequence: Synthetic oligonucleotide
  source 1..20: mol_type = other DNA
accctgggattctcagtggt

SEQ ID NO: 8211 - DNA, 20 bp, synthetic construct
  misc_feature 1..20: note = Description of Artificial Sequence: Synthetic oligonucleotide
  source 1..20: mol_type = other DNA
ccctgggattctcagtggtg

SEQ ID NO: 8212 - DNA, 20 bp, synthetic construct
  misc_feature 1..20: note = Description of Artificial Sequence: Synthetic oligonucleotide
  source 1..20: mol_type = other DNA
cctgggattctcagtggtgt

SEQ ID NO: 8213 - DNA, 20 bp, synthetic construct
  misc_feature 1..20: note = Description of Artificial Sequence: Synthetic oligonucleotide
  source 1..20: mol_type = other DNA
ctgggattctcagtggtgtt

SEQ ID NO: 8214 - DNA, 20 bp, synthetic construct
  misc_feature 1..20: note = Description of Artificial Sequence: Synthetic oligonucleotide
  source 1..20: mol_type = other DNA
tgggattctcagtggtgtta

SEQ ID NO: 8215 - DNA, 20 bp, synthetic construct
  misc_feature 1..20: note = Description of Artificial Sequence: Synthetic oligonucleotide
  source 1..20: mol_type = other DNA
gggattctcagtggtgttaa

SEQ ID NO: 8216 - DNA, 20 bp, synthetic construct
  misc_feature 1..20: note = Description of Artificial Sequence: Synthetic oligonucleotide
  source 1..20: mol_type = other DNA
ggattctcagtggtgttaat

SEQ ID NO: 8217 - DNA, 20 bp, synthetic construct
  misc_feature 1..20: note = Description of Artificial Sequence: Synthetic oligonucleotide
  source 1..20: mol_type = other DNA
gattctcagtggtgttaatt

SEQ ID NO: 8218 - DNA, 20 bp, synthetic construct
  misc_feature 1..20: note = Description of Artificial Sequence: Synthetic oligonucleotide
  source 1..20: mol_type = other DNA
attctcagtggtgttaatta

SEQ ID NO: 8219 - DNA, 20 bp, synthetic construct
  misc_feature 1..20: note = Description of Artificial Sequence: Synthetic oligonucleotide
  source 1..20: mol_type = other DNA
ttctcagtggtgttaattac

SEQ ID NO: 8220 - DNA, 20 bp, synthetic construct
  misc_feature 1..20: note = Description of Artificial Sequence: Synthetic oligonucleotide
  source 1..20: mol_type = other DNA
tctcagtggtgttaattacc

SEQ ID NO: 8221 - DNA, 20 bp, synthetic construct
  misc_feature 1..20: note = Description of Artificial Sequence: Synthetic oligonucleotide
  source 1..20: mol_type = other DNA
ctcagtggtgttaattaccc

SEQ ID NO: 8222 - DNA, 20 bp, synthetic construct
  misc_feature 1..20: note = Description of Artificial Sequence: Synthetic oligonucleotide
  source 1..20: mol_type = other DNA
tcagtggtgttaattaccca

SEQ ID NO: 8223 - DNA, 20 bp, synthetic construct
  misc_feature 1..20: note = Description of Artificial Sequence: Synthetic oligonucleotide
  source 1..20: mol_type = other DNA
cagtggtgttaattacccat

SEQ ID NO: 8224 - DNA, 20 bp, synthetic construct
  misc_feature 1..20: note = Description of Artificial Sequence: Synthetic oligonucleotide
  source 1..20: mol_type = other DNA
agtggtgttaattacccatc

SEQ ID NO: 8225 - DNA, 20 bp, synthetic construct
  misc_feature 1..20: note = Description of Artificial Sequence: Synthetic oligonucleotide
  source 1..20: mol_type = other DNA
gtggtgttaattacccatca

SEQ ID NO: 8226 - DNA, 20 bp, synthetic construct
  misc_feature 1..20: note = Description of Artificial Sequence: Synthetic oligonucleotide
  source 1..20: mol_type = other DNA
tggtgttaattacccatcag

SEQ ID NO: 8227 - DNA, 20 bp, synthetic construct
  misc_feature 1..20: note = Description of Artificial Sequence: Synthetic oligonucleotide
  source 1..20: mol_type = other DNA
ggtgttaattacccatcagt

SEQ ID NO: 8228 - DNA, 20 bp, synthetic construct
  misc_feature 1..20: note = Description of Artificial Sequence: Synthetic oligonucleotide
  source 1..20: mol_type = other DNA
gtgttaattacccatcagtg

SEQ ID NO: 8229 - DNA, 20 bp, synthetic construct
  misc_feature 1..20: note = Description of Artificial Sequence: Synthetic oligonucleotide
  source 1..20: mol_type = other DNA
tgttaattacccatcagtgt

SEQ ID NO: 8230 - DNA, 20 bp, synthetic construct
  misc_feature 1..20: note = Description of Artificial Sequence: Synthetic oligonucleotide
  source 1..20: mol_type = other DNA
gttaattacccatcagtgtc

SEQ ID NO: 8231 - DNA, 20 bp, synthetic construct
  misc_feature 1..20: note = Description of Artificial Sequence: Synthetic oligonucleotide
  source 1..20: mol_type = other DNA
ttaattacccatcagtgtct

SEQ ID NO: 8232 - DNA, 20 bp, synthetic construct
  misc_feature 1..20: note = Description of Artificial Sequence: Synthetic oligonucleotide
  source 1..20: mol_type = other DNA
taattacccatcagtgtctg

SEQ ID NO: 8233 - DNA, 20 bp, synthetic construct
  misc_feature 1..20: note = Description of Artificial Sequence: Synthetic oligonucleotide
  source 1..20: mol_type = other DNA
aattacccatcagtgtctgc

SEQ ID NO: 8234 - DNA, 20 bp, synthetic construct
  misc_feature 1..20: note = Description of Artificial Sequence: Synthetic oligonucleotide
  source 1..20: mol_type = other DNA
attacccatcagtgtctgca

SEQ ID NO: 8235 - DNA, 20 bp, synthetic construct
  misc_feature 1..20: note = Description of Artificial Sequence: Synthetic oligonucleotide
  source 1..20: mol_type = other DNA
ttacccatcagtgtctgcat

SEQ ID NO: 8236 - DNA, 20 bp, synthetic construct
  misc_feature 1..20: note = Description of Artificial Sequence: Synthetic oligonucleotide
  source 1..20: mol_type = other DNA
tacccatcagtgtctgcatt

SEQ ID NO: 8237 - DNA, 20 bp, synthetic construct
  misc_feature 1..20: note = Description of Artificial Sequence: Synthetic oligonucleotide
  source 1..20: mol_type = other DNA
acccatcagtgtctgcattt

SEQ ID NO: 8238 - DNA, 20 bp, synthetic construct
  misc_feature 1..20: note = Description of Artificial Sequence: Synthetic oligonucleotide
  source 1..20: mol_type = other DNA
cccatcagtgtctgcatttg

SEQ ID NO: 8239 - DNA, 20 bp, synthetic construct
  misc_feature 1..20: note = Description of Artificial Sequence: Synthetic oligonucleotide
  source 1..20: mol_type = other DNA
ccatcagtgtctgcatttgg

SEQ ID NO: 8240 - DNA, 20 bp, synthetic construct
  misc_feature 1..20: note = Description of Artificial Sequence: Synthetic oligonucleotide
  source 1..20: mol_type = other DNA
catcagtgtctgcatttggg

SEQ ID NO: 8241 - DNA, 20 bp, synthetic construct
  misc_feature 1..20: note = Description of Artificial Sequence: Synthetic oligonucleotide
  source 1..20: mol_type = other DNA
atcagtgtctgcatttggga

SEQ ID NO: 8242 - DNA, 20 bp, synthetic construct
  misc_feature 1..20: note = Description of Artificial Sequence: Synthetic oligonucleotide
  source 1..20: mol_type = other DNA
tcagtgtctgcatttgggag

SEQ ID NO: 8243 - DNA, 20 bp, synthetic construct
  misc_feature 1..20: note = Description of Artificial Sequence: Synthetic oligonucleotide
  source 1..20: mol_type = other DNA
cagtgtctgcatttgggaga

SEQ ID NO: 8244 - DNA, 20 bp, synthetic construct
  misc_feature 1..20: note = Description of Artificial Sequence: Synthetic oligonucleotide
  source 1..20: mol_type = other DNA
agtgtctgcatttgggagag

SEQ ID NO: 8245 - DNA, 20 bp, synthetic construct
  misc_feature 1..20: note = Description of Artificial Sequence: Synthetic oligonucleotide
  source 1..20: mol_type = other DNA
gtgtctgcatttgggagagg

SEQ ID NO: 8246 - DNA, 20 bp, synthetic construct
  misc_feature 1..20: note = Description of Artificial Sequence: Synthetic oligonucleotide
  source 1..20: mol_type = other DNA
tgtctgcatttgggagaggt

SEQ ID NO: 8247 - DNA, 20 bp, synthetic construct
  misc_feature 1..20: note = Description of Artificial Sequence: Synthetic oligonucleotide
  source 1..20: mol_type = other DNA
gtctgcatttgggagaggtg

SEQ ID NO: 8248 - DNA, 20 bp, synthetic construct
  misc_feature 1..20: note = Description of Artificial Sequence: Synthetic oligonucleotide
  source 1..20: mol_type = other DNA
tctgcatttgggagaggtgg

SEQ ID NO: 8249 - DNA, 20 bp, synthetic construct
  misc_feature 1..20: note = Description of Artificial Sequence: Synthetic oligonucleotide
  source 1..20: mol_type = other DNA
ctgcatttgggagaggtgga

SEQ ID NO: 8250 - DNA, 20 bp, synthetic construct
  misc_feature 1..20: note = Description of Artificial Sequence: Synthetic oligonucleotide
  source 1..20: mol_type = other DNA
tgcatttgggagaggtggat

SEQ ID NO: 8251 - DNA, 20 bp, synthetic construct
  misc_feature 1..20: note = Description of Artificial Sequence: Synthetic oligonucleotide
  source 1..20: mol_type = other DNA
gcatttgggagaggtggata

SEQ ID NO: 8252 - DNA, 20 bp, synthetic construct
  misc_feature 1..20: note = Description of Artificial Sequence: Synthetic oligonucleotide
  source 1..20: mol_type = other DNA
catttgggagaggtggatat

SEQ ID NO: 8253 - DNA, 20 bp, synthetic construct
  misc_feature 1..20: note = Description of Artificial Sequence: Synthetic oligonucleotide
  source 1..20: mol_type = other DNA
atttgggagaggtggatatg

SEQ ID NO: 8254 - DNA, 20 bp, synthetic construct
  misc_feature 1..20: note = Description of Artificial Sequence: Synthetic oligonucleotide
  source 1..20: mol_type = other DNA
tttgggagaggtggatatgg

SEQ ID NO: 8255 - DNA, 20 bp, synthetic construct
  misc_feature 1..20: note = Description of Artificial Sequence: Synthetic oligonucleotide
  source 1..20: mol_type = other DNA
ttgggagaggtggatatggg

SEQ ID NO: 8256 - DNA, 20 bp, synthetic construct
  misc_feature 1..20: note = Description of Artificial Sequence: Synthetic oligonucleotide
  source 1..20: mol_type = other DNA
tgggagaggtggatatgggg

SEQ ID NO: 8257 - DNA, 20 bp, synthetic construct
  misc_feature 1..20: note = Description of Artificial Sequence: Synthetic oligonucleotide
  source 1..20: mol_type = other DNA
gggagaggtggatatgggga

SEQ ID NO: 8258 - DNA, 20 bp, synthetic construct
  misc_feature 1..20: note = Description of Artificial Sequence: Synthetic oligonucleotide
  source 1..20: mol_type = other DNA
ggagaggtggatatggggag

SEQ ID NO: 8259 - DNA, 20 bp, synthetic construct
  misc_feature 1..20: note = Description of Artificial Sequence: Synthetic oligonucleotide
  source 1..20: mol_type = other DNA
gagaggtggatatggggaga

SEQ ID NO: 8260 - DNA, 20 bp, synthetic construct
  misc_feature 1..20: note = Description of Artificial Sequence: Synthetic oligonucleotide
  source 1..20: mol_type = other DNA
agaggtggatatggggagat

SEQ ID NO: 8261 - DNA, 20 bp, synthetic construct
  misc_feature 1..20: note = Description of Artificial Sequence: Synthetic oligonucleotide
  source 1..20: mol_type = other DNA
gaggtggatatggggagatc

SEQ ID NO: 8262 - DNA, 20 bp, synthetic construct
  misc_feature 1..20: note = Description of Artificial Sequence: Synthetic oligonucleotide
  source 1..20: mol_type = other DNA
aggtggatatggggagatcc

SEQ ID NO: 8263 - DNA, 20 bp, synthetic construct
  misc_feature 1..20: note = Description of Artificial Sequence: Synthetic oligonucleotide
  source 1..20: mol_type = other DNA
ggtggatatggggagatcca

SEQ ID NO: 8264 - DNA, 20 bp, synthetic construct
  misc_feature 1..20: note = Description of Artificial Sequence: Synthetic oligonucleotide
  source 1..20: mol_type = other DNA
gtggatatggggagatccag

SEQ ID NO: 8265 - DNA, 20 bp, synthetic construct
  misc_feature 1..20: note = Description of Artificial Sequence: Synthetic oligonucleotide
  source 1..20: mol_type = other DNA
tggatatggggagatccaga

SEQ ID NO: 8266 - DNA, 20 bp, synthetic construct
  misc_feature 1..20: note = Description of Artificial Sequence: Synthetic oligonucleotide
  source 1..20: mol_type = other DNA
ggatatggggagatccagag

SEQ ID NO: 8267 - DNA, 20 bp, synthetic construct
  misc_feature 1..20: note = Description of Artificial Sequence: Synthetic oligonucleotide
  source 1..20: mol_type = other DNA
gatatggggagatccagagg

SEQ ID NO: 8268 - DNA, 20 bp, synthetic construct
  misc_feature 1..20: note = Description of Artificial Sequence: Synthetic oligonucleotide
  source 1..20: mol_type = other DNA
atatggggagatccagaggg

SEQ ID NO: 8269 - DNA, 20 bp, synthetic construct
  misc_feature 1..20: note = Description of Artificial Sequence: Synthetic oligonucleotide
  source 1..20: mol_type = other DNA
tatggggagatccagagggg

SEQ ID NO: 8270 - DNA, 20 bp, synthetic construct
  misc_feature 1..20: note = Description of Artificial Sequence: Synthetic oligonucleotide
  source 1..20: mol_type = other DNA
atggggagatccagaggggg

SEQ ID NO: 8271 - DNA, 20 bp, synthetic construct
  misc_feature 1..20: note = Description of Artificial Sequence: Synthetic oligonucleotide
  source 1..20: mol_type = other DNA
tggggagatccagagggggt

SEQ ID NO: 8272 - DNA, 20 bp, synthetic construct
  misc_feature 1..20: note = Description of Artificial Sequence: Synthetic oligonucleotide
  source 1..20: mol_type = other DNA
ggggagatccagagggggtg

SEQ ID NO: 8273 - DNA, 20 bp, synthetic construct
  misc_feature 1..20: note = Description of Artificial Sequence: Synthetic oligonucleotide
  source 1..20: mol_type = other DNA
gggagatccagagggggtgt

SEQ ID NO: 8274 - DNA, 20 bp, synthetic construct
  misc_feature 1..20: note = Description of Artificial Sequence: Synthetic oligonucleotide
  source 1..20: mol_type = other DNA
ggagatccagagggggtgta

SEQ ID NO: 8275 - DNA, 20 bp, synthetic construct
  misc_feature 1..20: note = Description of Artificial Sequence: Synthetic oligonucleotide
  source 1..20: mol_type = other DNA
gagatccagagggggtgtat

SEQ ID NO: 8276 - DNA, 20 bp, synthetic construct
  misc_feature 1..20: note = Description of Artificial Sequence: Synthetic oligonucleotide
  source 1..20: mol_type = other DNA
agatccagagggggtgtatt

SEQ ID NO: 8277 - DNA, 20 bp, synthetic construct
  misc_feature 1..20: note = Description of Artificial Sequence: Synthetic oligonucleotide
  source 1..20: mol_type = other DNA
gatccagagggggtgtattt

SEQ ID NO: 8278 - DNA, 20 bp, synthetic construct
  misc_feature 1..20: note = Description of Artificial Sequence: Synthetic oligonucleotide
  source 1..20: mol_type = other DNA
atccagagggggtgtatttt

SEQ ID NO: 8279 - DNA, 20 bp, synthetic construct
  misc_feature 1..20: note = Description of Artificial Sequence: Synthetic oligonucleotide
  source 1..20: mol_type = other DNA
tccagagggggtgtattttg

SEQ ID NO: 8280 - DNA, 20 bp, synthetic construct
  misc_feature 1..20: note = Description of Artificial Sequence: Synthetic oligonucleotide
  source 1..20: mol_type = other DNA
ccagagggggtgtattttgg

SEQ ID NO: 8281 - DNA, 20 bp, synthetic construct
  misc_feature 1..20: note = Description of Artificial Sequence: Synthetic oligonucleotide
  source 1..20: mol_type = other DNA
cagagggggtgtattttggc

SEQ ID NO: 8282 - DNA, 20 bp, synthetic construct
  misc_feature 1..20: note = Description of Artificial Sequence: Synthetic oligonucleotide
  source 1..20: mol_type = other DNA
agagggggtgtattttggct

SEQ ID NO: 8283 - DNA, 20 bp, synthetic construct
  misc_feature 1..20: note = Description of Artificial Sequence: Synthetic oligonucleotide
  source 1..20: mol_type = other DNA
gagggggtgtattttggctt

SEQ ID NO: 8284 - DNA, 20 bp, synthetic construct
  misc_feature 1..20: note = Description of Artificial Sequence: Synthetic oligonucleotide
  source 1..20: mol_type = other DNA
agggggtgtattttggcttt

SEQ ID NO: 8285 - DNA, 20 bp, synthetic construct
  misc_feature 1..20: note = Description of Artificial Sequence: Synthetic oligonucleotide
  source 1..20: mol_type = other DNA
gggggtgtattttggcttta

SEQ ID NO: 8286 - DNA, 20 bp, synthetic construct
  misc_feature 1..20: note = Description of Artificial Sequence: Synthetic oligonucleotide
  source 1..20: mol_type = other DNA
ggggtgtattttggctttac

SEQ ID NO: 8287 - DNA, 20 bp, synthetic construct
  misc_feature 1..20: note = Description of Artificial Sequence: Synthetic oligonucleotide
  source 1..20: mol_type = other DNA
gggtgtattttggctttact

SEQ ID NO: 8288 - DNA, 20 bp, synthetic construct
  misc_feature 1..20: note = Description of Artificial Sequence: Synthetic oligonucleotide
  source 1..20: mol_type = other DNA
ggtgtattttggctttacta

SEQ ID NO: 8289 - DNA, 20 bp, synthetic construct
  misc_feature 1..20: note = Description of Artificial Sequence: Synthetic oligonucleotide
  source 1..20: mol_type = other DNA
gtgtattttggctttactag

SEQ ID NO: 8290 - DNA, 20 bp, synthetic construct
  misc_feature 1..20: note = Description of Artificial Sequence: Synthetic oligonucleotide
  source 1..20: mol_type = other DNA
tgtattttggctttactagc

SEQ ID NO: 8291 - DNA, 20 bp, synthetic construct
  misc_feature 1..20: note = Description of Artificial Sequence: Synthetic oligonucleotide
  source 1..20: mol_type = other DNA
gtattttggctttactagcg

SEQ ID NO: 8292 - DNA, 20 bp, synthetic construct
  misc_feature 1..20: note = Description of Artificial Sequence: Synthetic oligonucleotide
  source 1..20: mol_type = other DNA
tattttggctttactagcgg

SEQ ID NO: 8293 - DNA, 20 bp, synthetic construct
  misc_feature 1..20: note = Description of Artificial Sequence: Synthetic oligonucleotide
  source 1..20: mol_type = other DNA
attttggctttactagcggt

SEQ ID NO: 8294 - DNA, 20 bp, synthetic construct
  misc_feature 1..20: note = Description of Artificial Sequence: Synthetic oligonucleotide
  source 1..20: mol_type = other DNA
ttttggctttactagcggtg

SEQ ID NO: 8295 - DNA, 20 bp, synthetic construct
  misc_feature 1..20: note = Description of Artificial Sequence: Synthetic oligonucleotide
  source 1..20: mol_type = other DNA
tttggctttactagcggtgg

SEQ ID NO: 8296 - DNA, 20 bp, synthetic construct
  misc_feature 1..20: note = Description of Artificial Sequence: Synthetic oligonucleotide
  source 1..20: mol_type = other DNA
ttggctttactagcggtgga

SEQ ID NO: 8297 - DNA, 20 bp, synthetic construct
  misc_feature 1..20: note = Description of Artificial Sequence: Synthetic oligonucleotide
  source 1..20: mol_type = other DNA
tggctttactagcggtggag

SEQ ID NO: 8298 - DNA, 20 bp, synthetic construct
  misc_feature 1..20: note = Description of Artificial Sequence: Synthetic oligonucleotide
  source 1..20: mol_type = other DNA
ggctttactagcggtggagc

SEQ ID NO: 8299 - DNA, 20 bp, synthetic construct
  misc_feature 1..20: note = Description of Artificial Sequence: Synthetic oligonucleotide
  source 1..20: mol_type = other DNA
gctttactagcggtggagca

SEQ ID NO: 8300 - DNA, 20 bp, synthetic construct
  misc_feature 1..20: note = Description of Artificial Sequence: Synthetic oligonucleotide
  source 1..20: mol_type = other DNA
ctttactagcggtggagcag

SEQ ID NO: 8301 - DNA, 20 bp, synthetic construct
  misc_feature 1..20: note = Description of Artificial Sequence: Synthetic oligonucleotide
  source 1..20: mol_type = other DNA
tttactagcggtggagcaga

SEQ ID NO: 8302 - DNA, 20 bp, synthetic construct
  misc_feature 1..20: note = Description of Artificial Sequence: Synthetic oligonucleotide
  source 1..20: mol_type = other DNA
ttactagcggtggagcagag

SEQ ID NO: 8303 - DNA, 20 bp, synthetic construct
  misc_feature 1..20: note = Description of Artificial Sequence: Synthetic oligonucleotide
  source 1..20: mol_type = other DNA
tactagcggtggagcagagg

SEQ ID NO: 8304 - DNA, 20 bp, synthetic construct
  misc_feature 1..20: note = Description of Artificial Sequence: Synthetic oligonucleotide
  source 1..20: mol_type = other DNA
actagcggtggagcagaggg

SEQ ID NO: 8305 - DNA, 20 bp, synthetic construct
  misc_feature 1..20: note = Description of Artificial Sequence: Synthetic oligonucleotide
  source 1..20: mol_type = other DNA
ctagcggtggagcagagggg

SEQ ID NO: 8306 - DNA, 20 bp, synthetic construct
  misc_feature 1..20: note = Description of Artificial Sequence: Synthetic oligonucleotide
  source 1..20: mol_type = other DNA
tagcggtggagcagaggggt

SEQ ID NO: 8307 - DNA, 20 bp, synthetic construct
  misc_feature 1..20: note = Description of Artificial Sequence: Synthetic oligonucleotide
  source 1..20: mol_type = other DNA
agcggtggagcagaggggta

SEQ ID NO: 8308 - DNA, 20 bp, synthetic construct
  misc_feature 1..20: note = Description of Artificial Sequence: Synthetic oligonucleotide
  source 1..20: mol_type = other DNA
gcggtggagcagaggggtag

SEQ ID NO: 8309 - DNA, 20 bp, synthetic construct
  misc_feature 1..20: note = Description of Artificial Sequence: Synthetic oligonucleotide
  source 1..20: mol_type = other DNA
cggtggagcagaggggtagg

SEQ ID NO: 8310 - DNA, 20 bp, synthetic construct
  misc_feature 1..20: note = Description of Artificial Sequence: Synthetic oligonucleotide
  source 1..20: mol_type = other DNA
ggtggagcagaggggtaggg

SEQ ID NO: 8311 - DNA, 20 bp, synthetic construct
  misc_feature 1..20: note = Description of Artificial Sequence: Synthetic oligonucleotide
  source 1..20: mol_type = other DNA
gtggagcagaggggtaggga

SEQ ID NO: 8312 - DNA, 20 bp, synthetic construct
  misc_feature 1..20: note = Description of Artificial Sequence: Synthetic oligonucleotide
  source 1..20: mol_type = other DNA
tggagcagaggggtagggaa

SEQ ID NO: 8313 - DNA, 20 bp, synthetic construct
  misc_feature 1..20: note = Description of Artificial Sequence: Synthetic oligonucleotide
  source 1..20: mol_type = other DNA
ggagcagaggggtagggaag

SEQ ID NO: 8314 - DNA, 20 bp, synthetic construct
  misc_feature 1..20: note = Description of Artificial Sequence: Synthetic oligonucleotide
  source 1..20: mol_type = other DNA
gagcagaggggtagggaagc

SEQ ID NO: 8315 - DNA, 20 bp, synthetic construct
  misc_feature 1..20: note = Description of Artificial Sequence: Synthetic oligonucleotide
  source 1..20: mol_type = other DNA
agcagaggggtagggaagcc

SEQ ID NO: 8316 - DNA, 20 bp, synthetic construct
  misc_feature 1..20: note = Description of Artificial Sequence: Synthetic oligonucleotide
  source 1..20: mol_type = other DNA
gcagaggggtagggaagccc

SEQ ID NO: 8317 - DNA, 20 bp, synthetic construct
  misc_feature 1..20: note = Description of Artificial Sequence: Synthetic oligonucleotide
  source 1..20: mol_type = other DNA
cagaggggtagggaagccct

SEQ ID NO: 8318 - DNA, 20 bp, synthetic construct
  misc_feature 1..20: note = Description of Artificial Sequence: Synthetic oligonucleotide
  source 1..20: mol_type = other DNA
agaggggtagggaagccctt

SEQ ID NO: 8319 - DNA, 20 bp, synthetic construct
  misc_feature 1..20: note = Description of Artificial Sequence: Synthetic oligonucleotide
  source 1..20: mol_type = other DNA
gaggggtagggaagcccttc

SEQ ID NO: 8320 - DNA, 20 bp, synthetic construct
  misc_feature 1..20: note = Description of Artificial Sequence: Synthetic oligonucleotide
  source 1..20: mol_type = other DNA
aggggtagggaagcccttca

SEQ ID NO: 8321 - DNA, 20 bp, synthetic construct
  misc_feature 1..20: note = Description of Artificial Sequence: Synthetic oligonucleotide
  source 1..20: mol_type = other DNA
ggggtagggaagcccttcac

SEQ ID NO: 8322 - DNA, 20 bp, synthetic construct
  misc_feature 1..20: note = Description of Artificial Sequence: Synthetic oligonucleotide
  source 1..20: mol_type = other DNA
gggtagggaagcccttcacc

SEQ ID NO: 8323 - DNA, 20 bp, synthetic construct
  misc_feature 1..20: note = Description of Artificial Sequence: Synthetic oligonucleotide
  source 1..20: mol_type = other DNA
ggtagggaagcccttcacct

SEQ ID NO: 8324 - DNA, 20 bp, synthetic construct
  misc_feature 1..20: note = Description of Artificial Sequence: Synthetic oligonucleotide
  source 1..20: mol_type = other DNA
gtagggaagcccttcacctg

SEQ ID NO: 8325 - DNA, 20 bp, synthetic construct
  misc_feature 1..20: note = Description of Artificial Sequence: Synthetic oligonucleotide
  source 1..20: mol_type = other DNA
tagggaagcccttcacctgg

SEQ ID NO: 8326 - DNA, 20 bp, synthetic construct
  misc_feature 1..20: note = Description of Artificial Sequence: Synthetic oligonucleotide
  source 1..20: mol_type = other DNA
agggaagcccttcacctgga

SEQ ID NO: 8327 - DNA, 20 bp, synthetic construct
  misc_feature 1..20: note = Description of Artificial Sequence: Synthetic oligonucleotide
  source 1..20: mol_type = other DNA
gggaagcccttcacctggat

SEQ ID NO: 8328 - DNA, 20 bp, synthetic construct
  misc_feature 1..20: note = Description of Artificial Sequence: Synthetic oligonucleotide
  source 1..20: mol_type = other DNA
ggaagcccttcacctggata

SEQ ID NO: 8329 - DNA, 20 bp, synthetic construct
  misc_feature 1..20: note = Description of Artificial Sequence: Synthetic oligonucleotide
  source 1..20: mol_type = other DNA
gaagcccttcacctggatag

SEQ ID NO: 8330 - DNA, 20 bp, synthetic construct
  misc_feature 1..20: note = Description of Artificial Sequence: Synthetic oligonucleotide
  source 1..20: mol_type = other DNA
aagcccttcacctggatagc

SEQ ID NO: 8331 - DNA, 20 bp, synthetic construct
  misc_feature 1..20: note = Description of Artificial Sequence: Synthetic oligonucleotide
  source 1..20: mol_type = other DNA
agcccttcacctggatagca

SEQ ID NO: 8332 - DNA, 20 bp, synthetic construct
  misc_feature 1..20: note = Description of Artificial Sequence: Synthetic oligonucleotide
  source 1..20: mol_type = other DNA
gcccttcacctggatagcat

SEQ ID NO: 8333 - DNA, 20 bp, synthetic construct
  misc_feature 1..20: note = Description of Artificial Sequence: Synthetic oligonucleotide
  source 1..20: mol_type = other DNA
cccttcacctggatagcatt

SEQ ID NO: 8334 - DNA, 20 bp, synthetic construct
  misc_feature 1..20: note = Description of Artificial Sequence: Synthetic oligonucleotide
  source 1..20: mol_type = other DNA
ccttcacctggatagcatta

SEQ ID NO: 8335 - DNA, 20 bp, synthetic construct
  misc_feature 1..20: note = Description of Artificial Sequence: Synthetic oligonucleotide
  source 1..20: mol_type = other DNA
cttcacctggatagcattag

SEQ ID NO: 8336 - DNA, 20 bp, synthetic construct
  misc_feature 1..20: note = Description of Artificial Sequence: Synthetic oligonucleotide
  source 1..20: mol_type = other DNA
ttcacctggatagcattagt

SEQ ID NO: 8337 - DNA, 20 bp, synthetic construct
  misc_feature 1..20: note = Description of Artificial Sequence: Synthetic oligonucleotide
  source 1..20: mol_type = other DNA
tcacctggatagcattagtg

SEQ ID NO: 8338 - DNA, 20 bp, synthetic construct
  misc_feature 1..20: note = Description of Artificial Sequence: Synthetic oligonucleotide
  source 1..20: mol_type = other DNA
cacctggatagcattagtgg

SEQ ID NO: 8339 - DNA, 20 bp, synthetic construct
  misc_feature 1..20: note = Description of Artificial Sequence: Synthetic oligonucleotide
  source 1..20: mol_type = other DNA
acctggatagcattagtggg

SEQ ID NO: 8340 - DNA, 20 bp, synthetic construct
  misc_feature 1..20: note = Description of Artificial Sequence: Synthetic oligonucleotide
  source 1..20: mol_type = other DNA
cctggatagcattagtggga

SEQ ID NO: 8341 - DNA, 20 bp, synthetic construct
  misc_feature 1..20: note = Description of Artificial Sequence: Synthetic oligonucleotide
  source 1..20: mol_type = other DNA
ctggatagcattagtgggac

SEQ ID NO: 8342 - DNA, 20 bp, synthetic construct
  misc_feature 1..20: note = Description of Artificial Sequence: Synthetic oligonucleotide
  source 1..20: mol_type = other DNA
tggatagcattagtgggacg

SEQ ID NO: 8343 - DNA, 20 bp, synthetic construct
  misc_feature 1..20: note = Description of Artificial Sequence: Synthetic oligonucleotide
  source 1..20: mol_type = other DNA
ggatagcattagtgggacgt

SEQ ID NO: 8344 - DNA, 20 bp, synthetic construct
  misc_feature 1..20: note = Description of Artificial Sequence: Synthetic oligonucleotide
  source 1..20: mol_type = other DNA
gatagcattagtgggacgtt

SEQ ID NO: 8345 - DNA, 20 bp, synthetic construct
  misc_feature 1..20: note = Description of Artificial Sequence: Synthetic oligonucleotide
  source 1..20: mol_type = other DNA
atagcattagtgggacgttc

SEQ ID NO: 8346 - DNA, 20 bp, synthetic construct
  misc_feature 1..20: note = Description of Artificial Sequence: Synthetic oligonucleotide
  source 1..20: mol_type = other DNA
tagcattagtgggacgttcc

SEQ ID NO: 8347 - DNA, 20 bp, synthetic construct
  misc_feature 1..20: note = Description of Artificial Sequence: Synthetic oligonucleotide
  source 1..20: mol_type = other DNA
agcattagtgggacgttcca

SEQ ID NO: 8348 - DNA, 20 bp, synthetic construct
  misc_feature 1..20: note = Description of Artificial Sequence: Synthetic oligonucleotide
  source 1..20: mol_type = other DNA
gcattagtgggacgttccaa

SEQ ID NO: 8349 - DNA, 20 bp, synthetic construct
  misc_feature 1..20: note = Description of Artificial Sequence: Synthetic oligonucleotide
  source 1..20: mol_type = other DNA
cattagtgggacgttccaac

SEQ ID NO: 8350 - DNA, 20 bp, synthetic construct
  misc_feature 1..20: note = Description of Artificial Sequence: Synthetic oligonucleotide
  source 1..20: mol_type = other DNA
attagtgggacgttccaaca

SEQ ID NO: 8351 - DNA, 20 bp, synthetic construct
  misc_feature 1..20: note = Description of Artificial Sequence: Synthetic oligonucleotide
  source 1..20: mol_type = other DNA
ttagtgggacgttccaacag

SEQ ID NO: 8352 - DNA, 20 bp, synthetic construct
  misc_feature 1..20: note = Description of Artificial Sequence: Synthetic oligonucleotide
  source 1..20: mol_type = other DNA
tagtgggacgttccaacagg

SEQ ID NO: 8353 - DNA, 20 bp, synthetic construct
  misc_feature 1..20: note = Description of Artificial Sequence: Synthetic oligonucleotide
  source 1..20: mol_type = other DNA
agtgggacgttccaacaggt

SEQ ID NO: 8354 - DNA, 20 bp, synthetic construct
  misc_feature 1..20: note = Description of Artificial Sequence: Synthetic oligonucleotide
  source 1..20: mol_type = other DNA
gtgggacgttccaacaggtg

SEQ ID NO: 8355 - DNA, 20 bp, synthetic construct
  misc_feature 1..20: note = Description of Artificial Sequence: Synthetic oligonucleotide
  source 1..20: mol_type = other DNA
tgggacgttccaacaggtgg

SEQ ID NO: 8356 - DNA, 20 bp, synthetic construct
  misc_feature 1..20: note = Description of Artificial Sequence: Synthetic oligonucleotide
  source 1..20: mol_type = other DNA
gggacgttccaacaggtggt

SEQ ID NO: 8357 - DNA, 20 bp, synthetic construct
  misc_feature 1..20: note = Description of Artificial Sequence: Synthetic oligonucleotide
  source 1..20: mol_type = other DNA
ggacgttccaacaggtggtt

SEQ ID NO: 8358 - DNA, 20 bp, synthetic construct
  misc_feature 1..20: note = Description of Artificial Sequence: Synthetic oligonucleotide
  source 1..20: mol_type = other DNA
gacgttccaacaggtggttt

SEQ ID NO: 8359 - DNA, 20 bp, synthetic construct
  misc_feature 1..20: note = Description of Artificial Sequence: Synthetic oligonucleotide
  source 1..20: mol_type = other DNA
acgttccaacaggtggtttc

SEQ ID NO: 8360 - DNA, 20 bp, synthetic construct
  misc_feature 1..20: note = Description of Artificial Sequence: Synthetic oligonucleotide
  source 1..20: mol_type = other DNA
cgttccaacaggtggtttca

SEQ ID NO: 8361 - DNA, 20 bp, synthetic construct
  misc_feature 1..20: note = Description of Artificial Sequence: Synthetic oligonucleotide
  source 1..20: mol_type = other DNA
gttccaacaggtggtttcag

SEQ ID NO: 8362 - DNA, 20 bp, synthetic construct
  misc_feature 1..20: note = Description of Artificial Sequence: Synthetic oligonucleotide
  source 1..20: mol_type = other DNA
ttccaacaggtggtttcagg

SEQ ID NO: 8363 - DNA, 20 bp, synthetic construct
  misc_feature 1..20: note = Description of Artificial Sequence: Synthetic oligonucleotide
  source 1..20: mol_type = other DNA
tccaacaggtggtttcaggt

SEQ ID NO: 8364 - DNA, 20 bp, synthetic construct
  misc_feature 1..20: note = Description of Artificial Sequence: Synthetic oligonucleotide
  source 1..20: mol_type = other DNA
ccaacaggtggtttcaggtt

SEQ ID NO: 8365 - DNA, 20 bp, synthetic construct
  misc_feature 1..20: note = Description of Artificial Sequence: Synthetic oligonucleotide
  source 1..20: mol_type = other DNA
caacaggtggtttcaggtta

SEQ ID NO: 8366 - DNA, 20 bp, synthetic construct
  misc_feature 1..20: note = Description of Artificial Sequence: Synthetic oligonucleotide
  source 1..20: mol_type = other DNA
aacaggtggtttcaggttaa

SEQ ID NO: 8367 - DNA, 20 bp, synthetic construct
  misc_feature 1..20: note = Description of Artificial Sequence: Synthetic oligonucleotide
  source 1..20: mol_type = other DNA
acaggtggtttcaggttaac

SEQ ID NO: 8368 - DNA, 20 bp, synthetic construct
  misc_feature 1..20: note = Description of Artificial Sequence: Synthetic oligonucleotide
  source 1..20: mol_type = other DNA
caggtggtttcaggttaact

SEQ ID NO: 8369 - DNA, 20 bp, synthetic construct
  misc_feature 1..20: note = Description of Artificial Sequence: Synthetic oligonucleotide
  source 1..20: mol_type = other DNA
aggtggtttcaggttaactc

SEQ ID NO: 8370 - DNA, 20 bp, synthetic construct
  misc_feature 1..20: note = Description of Artificial Sequence: Synthetic oligonucleotide
  source 1..20: mol_type = other DNA
ggtggtttcaggttaactct

SEQ ID NO: 8371 - DNA, 20 bp, synthetic construct
  misc_feature 1..20: note = Description of Artificial Sequence: Synthetic oligonucleotide
  source 1..20: mol_type = other DNA
gtggtttcaggttaactctg

SEQ ID NO: 8372 - DNA, 20 bp, synthetic construct
  misc_feature 1..20: note = Description of Artificial Sequence: Synthetic oligonucleotide
  source 1..20: mol_type = other DNA
tggtttcaggttaactctga

SEQ ID NO: 8373 - DNA, 20 bp, synthetic construct
  misc_feature 1..20: note = Description of Artificial Sequence: Synthetic oligonucleotide
  source 1..20: mol_type = other DNA
ggtttcaggttaactctgaa

SEQ ID NO: 8374 - DNA, 20 bp, synthetic construct
  misc_feature 1..20: note = Description of Artificial Sequence: Synthetic oligonucleotide
  source 1..20: mol_type = other DNA
gtttcaggttaactctgaaa

SEQ ID NO: 8375 - DNA, 20 bp, synthetic construct
  misc_feature 1..20: note = Description of Artificial Sequence: Synthetic oligonucleotide
  source 1..20: mol_type = other DNA
tttcaggttaactctgaaat

SEQ ID NO: 8376 - DNA, 20 bp, synthetic construct
  misc_feature 1..20: note = Description of Artificial Sequence: Synthetic oligonucleotide
  source 1..20: mol_type = other DNA
ttcaggttaactctgaaata

SEQ ID NO: 8377 - DNA, 20 bp, synthetic construct
  misc_feature 1..20: note = Description of Artificial Sequence: Synthetic oligonucleotide
  source 1..20: mol_type = other DNA
tcaggttaactctgaaataa

SEQ ID NO: 8378 - DNA, 20 bp, synthetic construct
  misc_feature 1..20: note = Description of Artificial Sequence: Synthetic oligonucleotide
  source 1..20: mol_type = other DNA
caggttaactctgaaataaa

SEQ ID NO: 8379 - DNA, 20 bp, synthetic construct
  misc_feature 1..20: note = Description of Artificial Sequence: Synthetic oligonucleotide
  source 1..20: mol_type = other DNA
aggttaactctgaaataaat

SEQ ID NO: 8380 - DNA, 20 bp, synthetic construct
  misc_feature 1..20: note = Description of Artificial Sequence: Synthetic oligonucleotide
  source 1..20: mol_type = other DNA
ggttaactctgaaataaatt

SEQ ID NO: 8381 - DNA, 20 bp, synthetic construct
  misc_feature 1..20: note = Description of Artificial Sequence: Synthetic oligonucleotide
  source 1..20: mol_type = other DNA
gttaactctgaaataaatta

SEQ ID NO: 8382 - DNA, 20 bp, synthetic construct
  misc_feature 1..20: note = Description of Artificial Sequence: Synthetic oligonucleotide
  source 1..20: mol_type = other DNA
ttaactctgaaataaattat

SEQ ID NO: 8383 - DNA, 20 bp, synthetic construct
  misc_feature 1..20: note = Description of Artificial Sequence: Synthetic oligonucleotide
  source 1..20: mol_type = other DNA
taactctgaaataaattatt

SEQ ID NO: 8384 - DNA, 20 bp, synthetic construct
  misc_feature 1..20: note = Description of Artificial Sequence: Synthetic oligonucleotide
  source 1..20: mol_type = other DNA
aactctgaaataaattattc

SEQ ID NO: 8385 - DNA, 20 bp, synthetic construct
  misc_feature 1..20: note = Description of Artificial Sequence: Synthetic oligonucleotide
  source 1..20: mol_type = other DNA
actctgaaataaattattct

SEQ ID NO: 8386 - DNA, 20 bp, synthetic construct
  misc_feature 1..20: note = Description of Artificial Sequence: Synthetic oligonucleotide
  source 1..20: mol_type = other DNA
ctctgaaataaattattctg

SEQ ID NO: 8387 - DNA, 20 bp, synthetic construct
  misc_feature 1..20: note = Description of Artificial Sequence: Synthetic oligonucleotide
  source 1..20: mol_type = other DNA
tctgaaataaattattctgc

SEQ ID NO: 8388 - DNA, 20 bp, synthetic construct
  misc_feature 1..20: note = Description of Artificial Sequence: Synthetic oligonucleotide
  source 1..20: mol_type = other DNA
ctgaaataaattattctgct

SEQ ID NO: 8389 - DNA, 20 bp, synthetic construct
  misc_feature 1..20: note = Description of Artificial Sequence: Synthetic oligonucleotide
  source 1..20: mol_type = other DNA
tgaaataaattattctgcta

SEQ ID NO: 8390 - DNA, 20 bp, synthetic construct
  misc_feature 1..20: note = Description of Artificial Sequence: Synthetic oligonucleotide
  source 1..20: mol_type = other DNA
gaaataaattattctgctat

SEQ ID NO: 8391 - DNA, 20 bp, synthetic construct
  misc_feature 1..20: note = Description of Artificial Sequence: Synthetic oligonucleotide
  source 1..20: mol_type = other DNA
aaataaattattctgctata

SEQ ID NO: 8392 - DNA, 20 bp, synthetic construct
  misc_feature 1..20: note = Description of Artificial Sequence: Synthetic oligonucleotide
  source 1..20: mol_type = other DNA
aataaattattctgctatag

SEQ ID NO: 8393 - DNA, 20 bp, synthetic construct
  misc_feature 1..20: note = Description of Artificial Sequence: Synthetic oligonucleotide
  source 1..20: mol_type = other DNA
ataaattattctgctatagc

SEQ ID NO: 8394 - DNA, 20 bp, synthetic construct
  misc_feature 1..20: note = Description of Artificial Sequence: Synthetic oligonucleotide
  source 1..20: mol_type = other DNA
taaattattctgctatagct

SEQ ID NO: 8395 - DNA, 20 bp, synthetic construct
  misc_feature 1..20: note = Description of Artificial Sequence: Synthetic oligonucleotide
  source 1..20: mol_type = other DNA
aaattattctgctatagctg

SEQ ID NO: 8396 - DNA, 20 bp, synthetic construct
  misc_feature 1..20: note = Description of Artificial Sequence: Synthetic oligonucleotide
  source 1..20: mol_type = other DNA
aattattctgctatagctgg

SEQ ID NO: 8397 - DNA, 20 bp, synthetic construct
  misc_feature 1..20: note = Description of Artificial Sequence: Synthetic oligonucleotide
  source 1..20: mol_type = other DNA
attattctgctatagctggg

SEQ ID NO: 8398 - DNA, 20 bp, synthetic construct
  misc_feature 1..20: note = Description of Artificial Sequence: Synthetic oligonucleotide
  source 1..20: mol_type = other DNA
ttattctgctatagctgggc

SEQ ID NO: 8399 - DNA, 20 bp, synthetic construct
  misc_feature 1..20: note = Description of Artificial Sequence: Synthetic oligonucleotide
  source 1..20: mol_type = other DNA
tattctgctatagctgggcc

SEQ ID NO: 8400 - DNA, 20 bp, synthetic construct
  misc_feature 1..20: note = Description of Artificial Sequence: Synthetic oligonucleotide
  source 1..20: mol_type = other DNA
attctgctatagctgggcca

SEQ ID NO: 8401 - DNA, 20 bp, synthetic construct
  misc_feature 1..20: note = Description of Artificial Sequence: Synthetic oligonucleotide
  source 1..20: mol_type = other DNA
ttctgctatagctgggccat

SEQ ID NO: 8402 - DNA, 20 bp, synthetic construct
  misc_feature 1..20: note = Description of Artificial Sequence: Synthetic oligonucleotide
  source 1..20: mol_type = other DNA
tctgctatagctgggccatg

SEQ ID NO: 8403 - DNA, 20 bp, synthetic construct
  misc_feature 1..20: note = Description of Artificial Sequence: Synthetic oligonucleotide
  source 1..20: mol_type = other DNA
ctgctatagctgggccatga

SEQ ID NO: 8404 - DNA, 20 bp, synthetic construct
  misc_feature 1..20: note = Description of Artificial Sequence: Synthetic oligonucleotide
  source 1..20: mol_type = other DNA
tgctatagctgggccatgaa

SEQ ID NO: 8405 - DNA, 20 bp, synthetic construct
  misc_feature 1..20: note = Description of Artificial Sequence: Synthetic oligonucleotide
  source 1..20: mol_type = other DNA
gctatagctgggccatgaat

SEQ ID NO: 8406 - DNA, 20 bp, synthetic construct
  misc_feature 1..20: note = Description of Artificial Sequence: Synthetic oligonucleotide
  source 1..20: mol_type = other DNA
ctatagctgggccatgaatt

SEQ ID NO: 8407 - DNA, 20 bp, synthetic construct
  misc_feature 1..20: note = Description of Artificial Sequence: Synthetic oligonucleotide
  source 1..20: mol_type = other DNA
tatagctgggccatgaattc

SEQ ID NO: 8408 - DNA, 20 bp, synthetic construct
  misc_feature 1..20: note = Description of Artificial Sequence: Synthetic oligonucleotide
  source 1..20: mol_type = other DNA
atagctgggccatgaattct

SEQ ID NO: 8409 - DNA, 20 bp, synthetic construct
  misc_feature 1..20: note = Description of Artificial Sequence: Synthetic oligonucleotide
  source 1..20: mol_type = other DNA
tagctgggccatgaattcta

SEQ ID NO: 8410 - DNA, 20 bp, synthetic construct
  misc_feature 1..20: note = Description of Artificial Sequence: Synthetic oligonucleotide
  source 1..20: mol_type = other DNA
agctgggccatgaattctag

SEQ ID NO: 8411 - DNA, 20 bp, synthetic construct
  misc_feature 1..20: note = Description of Artificial Sequence: Synthetic oligonucleotide
  source 1..20: mol_type = other DNA
gctgggccatgaattctaga

SEQ ID NO: 8412 - DNA, 20 bp, synthetic construct
  misc_feature 1..20: note = Description of Artificial Sequence: Synthetic oligonucleotide
  source 1..20: mol_type = other DNA
ctgggccatgaattctagaa

SEQ ID NO: 8413 - DNA, 20 bp, synthetic construct
  misc_feature 1..20: note = Description of Artificial Sequence: Synthetic oligonucleotide
  source 1..20: mol_type = other DNA
tgggccatgaattctagaaa

SEQ ID NO: 8414 - DNA, 20 bp, synthetic construct
  misc_feature 1..20: note = Description of Artificial Sequence: Synthetic oligonucleotide
  source 1..20: mol_type = other DNA
gggccatgaattctagaaat

SEQ ID NO: 8415 - DNA, 20 bp, synthetic construct
  misc_feature 1..20: note = Description of Artificial Sequence: Synthetic oligonucleotide
  source 1..20: mol_type = other DNA
ggccatgaattctagaaatg

SEQ ID NO: 8416 - DNA, 20 bp, synthetic construct
  misc_feature 1..20: note = Description of Artificial Sequence: Synthetic oligonucleotide
  source 1..20: mol_type = other DNA
gccatgaattctagaaatgt

SEQ ID NO: 8417 - DNA, 20 bp, synthetic construct
  misc_feature 1..20: note = Description of Artificial Sequence: Synthetic oligonucleotide
  source 1..20: mol_type = other DNA
ccatgaattctagaaatgtt

SEQ ID NO: 8418 - DNA, 20 bp, synthetic construct
  misc_feature 1..20: note = Description of Artificial Sequence: Synthetic oligonucleotide
  source 1..20: mol_type = other DNA
catgaattctagaaatgtta

SEQ ID NO: 8419 - DNA, 20 bp, synthetic construct
  misc_feature 1..20: note = Description of Artificial Sequence: Synthetic oligonucleotide
  source 1..20: mol_type = other DNA
atgaattctagaaatgttac

SEQ ID NO: 8420 - DNA, 20 bp, synthetic construct
  misc_feature 1..20: note = Description of Artificial Sequence: Synthetic oligonucleotide
  source 1..20: mol_type = other DNA
tgaattctagaaatgttaca

SEQ ID NO: 8421 - DNA, 20 bp, synthetic construct
  misc_feature 1..20: note = Description of Artificial Sequence: Synthetic oligonucleotide
  source 1..20: mol_type = other DNA
gaattctagaaatgttacag

SEQ ID NO: 8422 - DNA, 20 bp, synthetic construct
  misc_feature 1..20: note = Description of Artificial Sequence: Synthetic oligonucleotide
  source 1..20: mol_type = other DNA
aattctagaaatgttacagt

SEQ ID NO: 8423 - DNA, 20 bp, synthetic construct
  misc_feature 1..20: note = Description of Artificial Sequence: Synthetic oligonucleotide
  source 1..20: mol_type = other DNA
attctagaaatgttacagtg

SEQ ID NO: 8424 - DNA, 20 bp, synthetic construct
  misc_feature 1..20: note = Description of Artificial Sequence: Synthetic oligonucleotide
  source 1..20: mol_type = other DNA
ttctagaaatgttacagtgt

SEQ ID NO: 8425 - DNA, 20 bp, synthetic construct
  misc_feature 1..20: note = Description of Artificial Sequence: Synthetic oligonucleotide
  source 1..20: mol_type = other DNA
tctagaaatgttacagtgta

SEQ ID NO: 8426 - DNA, 20 bp, synthetic construct
  misc_feature 1..20: note = Description of Artificial Sequence: Synthetic oligonucleotide
  source 1..20: mol_type = other DNA
ctagaaatgttacagtgtat

SEQ ID NO: 8427 - DNA, 20 bp, synthetic construct
  misc_feature 1..20: note = Description of Artificial Sequence: Synthetic oligonucleotide
  source 1..20: mol_type = other DNA
tagaaatgttacagtgtatg

SEQ ID NO: 8428 - DNA, 20 bp, synthetic construct
  misc_feature 1..20: note = Description of Artificial Sequence: Synthetic oligonucleotide
  source 1..20: mol_type = other DNA
agaaatgttacagtgtatga

SEQ ID NO: 8429 - DNA, 20 bp, synthetic construct
  misc_feature 1..20: note = Description of Artificial Sequence: Synthetic oligonucleotide
  source 1..20: mol_type = other DNA
gaaatgttacagtgtatgag

SEQ ID NO: 8430 - DNA, 20 bp, synthetic construct
  misc_feature 1..20: note = Description of Artificial Sequence: Synthetic oligonucleotide
  source 1..20: mol_type = other DNA
aaatgttacagtgtatgagg

SEQ ID NO: 8431 - DNA, 20 bp, synthetic construct
  misc_feature 1..20: note = Description of Artificial Sequence: Synthetic oligonucleotide
  source 1..20: mol_type = other DNA
aatgttacagtgtatgaggg

SEQ ID NO: 8432 - DNA, 20 bp, synthetic construct
  misc_feature 1..20: note = Description of Artificial Sequence: Synthetic oligonucleotide
  source 1..20: mol_type = other DNA
atgttacagtgtatgagggc

SEQ ID NO: 8433 - DNA, 20 bp, synthetic construct
  misc_feature 1..20: note = Description of Artificial Sequence: Synthetic oligonucleotide
  source 1..20: mol_type = other DNA
tgttacagtgtatgagggcc

SEQ ID NO: 8434 - DNA, 20 bp, synthetic construct
  misc_feature 1..20: note = Description of Artificial Sequence: Synthetic oligonucleotide
  source 1..20: mol_type = other DNA
gttacagtgtatgagggcca

SEQ ID NO: 8435 - DNA, 20 bp, synthetic construct
  misc_feature 1..20: note = Description of Artificial Sequence: Synthetic oligonucleotide
  source 1..20: mol_type = other DNA
ttacagtgtatgagggccac

SEQ ID NO: 8436 - DNA, 20 bp, synthetic construct
  misc_feature 1..20: note = Description of Artificial Sequence: Synthetic oligonucleotide
  source 1..20: mol_type = other DNA
tacagtgtatgagggccacg

SEQ ID NO: 8437 - DNA, 20 bp, synthetic construct
  misc_feature 1..20: note = Description of Artificial Sequence: Synthetic oligonucleotide
  source 1..20: mol_type = other DNA
acagtgtatgagggccacgt

SEQ ID NO: 8438 - DNA, 20 bp, synthetic construct
  misc_feature 1..20: note = Description of Artificial Sequence: Synthetic oligonucleotide
  source 1..20: mol_type = other DNA
cagtgtatgagggccacgta

SEQ ID NO: 8439 - DNA, 20 bp, synthetic construct
  misc_feature 1..20: note = Description of Artificial Sequence: Synthetic oligonucleotide
  source 1..20: mol_type = other DNA
agtgtatgagggccacgtaa

SEQ ID NO: 8440 - DNA, 20 bp, synthetic construct
  misc_feature 1..20: note = Description of Artificial Sequence: Synthetic oligonucleotide
  source 1..20: mol_type = other DNA
gtgtatgagggccacgtaac

SEQ ID NO: 8441 - DNA, 20 bp, synthetic construct
  misc_feature 1..20: note = Description of Artificial Sequence: Synthetic oligonucleotide
  source 1..20: mol_type = other DNA
tgtatgagggccacgtaaca

SEQ ID NO: 8442 - DNA, 20 bp, synthetic construct
  misc_feature 1..20: note = Description of Artificial Sequence: Synthetic oligonucleotide
  source 1..20: mol_type = other DNA
gtatgagggccacgtaacag

SEQ ID NO: 8443 - DNA, 20 bp, synthetic construct
  misc_feature 1..20: note = Description of Artificial Sequence: Synthetic oligonucleotide
  source 1..20: mol_type = other DNA
tatgagggccacgtaacaga

SEQ ID NO: 8444 - DNA, 20 bp, synthetic construct
  misc_feature 1..20: note = Description of Artificial Sequence: Synthetic oligonucleotide
  source 1..20: mol_type = other DNA
atgagggccacgtaacagat

SEQ ID NO: 8445 - DNA, 20 bp, synthetic construct
  misc_feature 1..20: note = Description of Artificial Sequence: Synthetic oligonucleotide
  source 1..20: mol_type = other DNA
tgagggccacgtaacagata

SEQ ID NO: 8446 - DNA, 20 bp, synthetic construct
  misc_feature 1..20: note = Description of Artificial Sequence: Synthetic oligonucleotide
  source 1..20: mol_type = other DNA
gagggccacgtaacagatac

SEQ ID NO: 8447 - DNA, 20 bp, synthetic construct
  misc_feature 1..20: note = Description of Artificial Sequence: Synthetic oligonucleotide
  source 1..20: mol_type = other DNA
agggccacgtaacagatact

SEQ ID NO: 8448 - DNA, 20 bp, synthetic construct
  misc_feature 1..20: note = Description of Artificial Sequence: Synthetic oligonucleotide
  source 1..20: mol_type = other DNA
gggccacgtaacagatactc

SEQ ID NO: 8449 - DNA, 20 bp, synthetic construct
  misc_feature 1..20: note = Description of Artificial Sequence: Synthetic oligonucleotide
  source 1..20: mol_type = other DNA
ggccacgtaacagatactcc

SEQ ID NO: 8450 - DNA, 20 bp, synthetic construct
  misc_feature 1..20: note = Description of Artificial Sequence: Synthetic oligonucleotide
  source 1..20: mol_type = other DNA
gccacgtaacagatactcct

SEQ ID NO: 8451 - DNA, 20 bp, synthetic construct
  misc_feature 1..20: note = Description of Artificial Sequence: Synthetic oligonucleotide
  source 1..20: mol_type = other DNA
ccacgtaacagatactcctg

SEQ ID NO: 8452 - DNA, 20 bp, synthetic construct
  misc_feature 1..20: note = Description of Artificial Sequence: Synthetic oligonucleotide
  source 1..20: mol_type = other DNA
cacgtaacagatactcctgt

SEQ ID NO: 8453 - DNA, 20 bp, synthetic construct
  misc_feature 1..20: note = Description of Artificial Sequence: Synthetic oligonucleotide
  source 1..20: mol_type = other DNA
acgtaacagatactcctgtc

SEQ ID NO: 8454 - DNA, 20 bp, synthetic construct
  misc_feature 1..20: note = Description of Artificial Sequence: Synthetic oligonucleotide
  source 1..20: mol_type = other DNA
cgtaacagatactcctgtca

SEQ ID NO: 8455 - DNA, 20 bp, synthetic construct
  misc_feature 1..20: note = Description of Artificial Sequence: Synthetic oligonucleotide
  source 1..20: mol_type = other DNA
gtaacagatactcctgtcag

SEQ ID NO: 8456 - DNA, 20 bp, synthetic construct
  misc_feature 1..20: note = Description of Artificial Sequence: Synthetic oligonucleotide
  source 1..20: mol_type = other DNA
taacagatactcctgtcaga

SEQ ID NO: 8457 - DNA, 20 bp, synthetic construct
  misc_feature 1..20: note = Description of Artificial Sequence: Synthetic oligonucleotide
  source 1..20: mol_type = other DNA
aacagatactcctgtcagat

SEQ ID NO: 8458 - DNA, 20 bp, synthetic construct
  misc_feature 1..20: note = Description of Artificial Sequence: Synthetic oligonucleotide
  source 1..20: mol_type = other DNA
acagatactcctgtcagata

SEQ ID NO: 8459 - DNA, 20 bp, synthetic construct
  misc_feature 1..20: note = Description of Artificial Sequence: Synthetic oligonucleotide
  source 1..20: mol_type = other DNA
cagatactcctgtcagatag

SEQ ID NO: 8460 - DNA, 20 bp, synthetic construct
  misc_feature 1..20: note = Description of Artificial Sequence: Synthetic oligonucleotide
  source 1..20: mol_type = other DNA
agatactcctgtcagataga

SEQ ID NO: 8461 - DNA, 20 bp, synthetic construct
  misc_feature 1..20: note = Description of Artificial Sequence: Synthetic oligonucleotide
  source 1..20: mol_type = other DNA
gatactcctgtcagatagat

SEQ ID NO: 8462 - DNA, 20 bp, synthetic construct
  misc_feature 1..20: note = Description of Artificial Sequence: Synthetic oligonucleotide
  source 1..20: mol_type = other DNA
atactcctgtcagatagatt

SEQ ID NO: 8463 - DNA, 20 bp, synthetic construct
  misc_feature 1..20: note = Description of Artificial Sequence: Synthetic oligonucleotide
  source 1..20: mol_type = other DNA
tactcctgtcagatagattc

SEQ ID NO: 8464 - DNA, 20 bp, synthetic construct
  misc_feature 1..20: note = Description of Artificial Sequence: Synthetic oligonucleotide
  source 1..20: mol_type = other DNA
actcctgtcagatagattca

SEQ ID NO: 8465 - DNA, 20 bp, synthetic construct
  misc_feature 1..20: note = Description of Artificial Sequence: Synthetic oligonucleotide
  source 1..20: mol_type = other DNA
ctcctgtcagatagattcag

SEQ ID NO: 8466 - DNA, 20 bp, synthetic construct
  misc_feature 1..20: note = Description of Artificial Sequence: Synthetic oligonucleotide
  source 1..20: mol_type = other DNA
tcctgtcagatagattcaga

SEQ ID NO: 8467 - DNA, 20 bp, synthetic construct
  misc_feature 1..20: note = Description of Artificial Sequence: Synthetic oligonucleotide
  source 1..20: mol_type = other DNA
cctgtcagatagattcagac

SEQ ID NO: 8468 - DNA, 20 bp, synthetic construct
  misc_feature 1..20: note = Description of Artificial Sequence: Synthetic oligonucleotide
  source 1..20: mol_type = other DNA
ctgtcagatagattcagact

SEQ ID NO: 8469 - DNA, 20 bp, synthetic construct
  misc_feature 1..20: note = Description of Artificial Sequence: Synthetic oligonucleotide
  source 1..20: mol_type = other DNA
tgtcagatagattcagactt

SEQ ID NO: 8470 - DNA, 20 bp, synthetic construct
  misc_feature 1..20: note = Description of Artificial Sequence: Synthetic oligonucleotide
  source 1..20: mol_type = other DNA
gtcagatagattcagacttc

SEQ ID NO: 8471 - DNA, 20 bp, synthetic construct
  misc_feature 1..20: note = Description of Artificial Sequence: Synthetic oligonucleotide
  source 1..20: mol_type = other DNA
tcagatagattcagacttct

SEQ ID NO: 8472 - DNA, 20 bp, synthetic construct
  misc_feature 1..20: note = Description of Artificial Sequence: Synthetic oligonucleotide
  source 1..20: mol_type = other DNA
cagatagattcagacttctt

SEQ ID NO: 8473 - DNA, 20 bp, synthetic construct
  misc_feature 1..20: note = Description of Artificial Sequence: Synthetic oligonucleotide
  source 1..20: mol_type = other DNA
agatagattcagacttctta

SEQ ID NO: 8474 - DNA, 20 bp, synthetic construct
  misc_feature 1..20: note = Description of Artificial Sequence: Synthetic oligonucleotide
  source 1..20: mol_type = other DNA
gatagattcagacttcttag

SEQ ID NO: 8475 - DNA, 20 bp, synthetic construct
  misc_feature 1..20: note = Description of Artificial Sequence: Synthetic oligonucleotide
  source 1..20: mol_type = other DNA
atagattcagacttcttaga

SEQ ID NO: 8476 - DNA, 20 bp, synthetic construct
  misc_feature 1..20: note = Description of Artificial Sequence: Synthetic oligonucleotide
  source 1..20: mol_type = other DNA
tagattcagacttcttagac

SEQ ID NO: 8477 - DNA, 20 bp, synthetic construct
  misc_feature 1..20: note = Description of Artificial Sequence: Synthetic oligonucleotide
  source 1..20: mol_type = other DNA
agattcagacttcttagaca

SEQ ID NO: 8478 - DNA, 20 bp, synthetic construct
  misc_feature 1..20: note = Description of Artificial Sequence: Synthetic oligonucleotide
  source 1..20: mol_type = other DNA
gattcagacttcttagacag

SEQ ID NO: 8479 - DNA, 20 bp, synthetic construct
  misc_feature 1..20: note = Description of Artificial Sequence: Synthetic oligonucleotide
  source 1..20: mol_type = other DNA
attcagacttcttagacagc

SEQ ID NO: 8480 - DNA, 20 bp, synthetic construct
  misc_feature 1..20: note = Description of Artificial Sequence: Synthetic oligonucleotide
  source 1..20: mol_type = other DNA
ttcagacttcttagacagcc

SEQ ID NO: 8481 - DNA, 20 bp, synthetic construct
  misc_feature 1..20: note = Description of Artificial Sequence: Synthetic oligonucleotide
  source 1..20: mol_type = other DNA
tcagacttcttagacagccg

SEQ ID NO: 8482 - DNA, 20 bp, synthetic construct
  misc_feature 1..20: note = Description of Artificial Sequence: Synthetic oligonucleotide
  source 1..20: mol_type = other DNA
cagacttcttagacagccgc

SEQ ID NO: 8483 - DNA, 20 bp, synthetic construct
  misc_feature 1..20: note = Description of Artificial Sequence: Synthetic oligonucleotide
  source 1..20: mol_type = other DNA
agacttcttagacagccgcc

SEQ ID NO: 8484 - DNA, 20 bp, synthetic construct
  misc_feature 1..20: note = Description of Artificial Sequence: Synthetic oligonucleotide
  source 1..20: mol_type = other DNA
gacttcttagacagccgcca

SEQ ID NO: 8485 - DNA, 20 bp, synthetic construct
  misc_feature 1..20: note = Description of Artificial Sequence: Synthetic oligonucleotide
  source 1..20: mol_type = other DNA
acttcttagacagccgccac

SEQ ID NO: 8486 - DNA, 20 bp, synthetic construct
  misc_feature 1..20: note = Description of Artificial Sequence: Synthetic oligonucleotide
  source 1..20: mol_type = other DNA
cttcttagacagccgccact

SEQ ID NO: 8487 - DNA, 20 bp, synthetic construct
  misc_feature 1..20: note = Description of Artificial Sequence: Synthetic oligonucleotide
  source 1..20: mol_type = other DNA
ttcttagacagccgccacta

SEQ ID NO: 8488 - DNA, 20 bp, synthetic construct
  misc_feature 1..20: note = Description of Artificial Sequence: Synthetic oligonucleotide
  source 1..20: mol_type = other DNA
tcttagacagccgccactat

SEQ ID NO: 8489 - DNA, 20 bp, synthetic construct
  misc_feature 1..20: note = Description of Artificial Sequence: Synthetic oligonucleotide
  source 1..20: mol_type = other DNA
cttagacagccgccactata

SEQ ID NO: 8490 - DNA, 20 bp, synthetic construct
  misc_feature 1..20: note = Description of Artificial Sequence: Synthetic oligonucleotide
  source 1..20: mol_type = other DNA
ttagacagccgccactataa

SEQ ID NO: 8491 - DNA, 20 bp, synthetic construct
  misc_feature 1..20: note = Description of Artificial Sequence: Synthetic oligonucleotide
  source 1..20: mol_type = other DNA
tagacagccgccactataac

SEQ ID NO: 8492 - DNA, 20 bp, synthetic construct
  misc_feature 1..20: note = Description of Artificial Sequence: Synthetic oligonucleotide
  source 1..20: mol_type = other DNA
agacagccgccactataaca

SEQ ID NO: 8493 - DNA, 20 bp, synthetic construct
  misc_feature 1..20: note = Description of Artificial Sequence: Synthetic oligonucleotide
  source 1..20: mol_type = other DNA
gacagccgccactataacaa

SEQ ID NO: 8494 - DNA, 20 bp, synthetic construct
  misc_feature 1..20: note = Description of Artificial Sequence: Synthetic oligonucleotide
  source 1..20: mol_type = other DNA
acagccgccactataacaaa

SEQ ID NO: 8495 - DNA, 20 bp, synthetic construct
  misc_feature 1..20: note = Description of Artificial Sequence: Synthetic oligonucleotide
  source 1..20: mol_type = other DNA
cagccgccactataacaaat

SEQ ID NO: 8496 - DNA, 20 bp, synthetic construct
  misc_feature 1..20: note = Description of Artificial Sequence: Synthetic oligonucleotide
  source 1..20: mol_type = other DNA
agccgccactataacaaatc

SEQ ID NO: 8497 - DNA, 20 bp, synthetic construct
  misc_feature 1..20: note = Description of Artificial Sequence: Synthetic oligonucleotide
  source 1..20: mol_type = other DNA
gccgccactataacaaatca

SEQ ID NO: 8498 - DNA, 20 bp, synthetic construct
  misc_feature 1..20: note = Description of Artificial Sequence: Synthetic oligonucleotide
  source 1..20: mol_type = other DNA
ccgccactataacaaatcag

SEQ ID NO: 8499 - DNA, 20 bp, synthetic construct
  misc_feature 1..20: note = Description of Artificial Sequence: Synthetic oligonucleotide
  source 1..20: mol_type = other DNA
cgccactataacaaatcagt

SEQ ID NO: 8500 - DNA, 20 bp, synthetic construct
  misc_feature 1..20: note = Description of Artificial Sequence: Synthetic oligonucleotide
  source 1..20: mol_type = other DNA
gccactataacaaatcagtc

SEQ ID NO: 8501 - DNA, 20 bp, synthetic construct
  misc_feature 1..20: note = Description of Artificial Sequence: Synthetic oligonucleotide
  source 1..20: mol_type = other DNA
ccactataacaaatcagtcg

SEQ ID NO: 8502 - DNA, 20 bp, synthetic construct
  misc_feature 1..20: note = Description of Artificial Sequence: Synthetic oligonucleotide
  source 1..20: mol_type = other DNA
cactataacaaatcagtcgt

SEQ ID NO: 8503 - DNA, 20 bp, synthetic construct
  misc_feature 1..20: note = Description of Artificial Sequence: Synthetic oligonucleotide
  source 1..20: mol_type = other DNA
actataacaaatcagtcgtg

SEQ ID NO: 8504 - DNA, 20 bp, synthetic construct
  misc_feature 1..20: note = Description of Artificial Sequence: Synthetic oligonucleotide
  source 1..20: mol_type = other DNA
ctataacaaatcagtcgtga

SEQ ID NO: 8505 - DNA, 20 bp, synthetic construct
  misc_feature 1..20: note = Description of Artificial Sequence: Synthetic oligonucleotide
  source 1..20: mol_type = other DNA
tataacaaatcagtcgtgaa

SEQ ID NO: 8506 - DNA, 20 bp, synthetic construct
  misc_feature 1..20: note = Description of Artificial Sequence: Synthetic oligonucleotide
  source 1..20: mol_type = other DNA
ataacaaatcagtcgtgaat

SEQ ID NO: 8507 - DNA, 20 bp, synthetic construct
  misc_feature 1..20: note = Description of Artificial Sequence: Synthetic oligonucleotide
  source 1..20: mol_type = other DNA
taacaaatcagtcgtgaata

SEQ ID NO: 8508 - DNA, 20 bp, synthetic construct
  misc_feature 1..20: note = Description of Artificial Sequence: Synthetic oligonucleotide
  source 1..20: mol_type = other DNA
aacaaatcagtcgtgaatat

SEQ ID NO: 8509 - DNA, 20 bp, synthetic construct
  misc_feature 1..20: note = Description of Artificial Sequence: Synthetic oligonucleotide
  source 1..20: mol_type = other DNA
acaaatcagtcgtgaatatc

SEQ ID NO: 8510 - DNA, 20 bp, synthetic construct
  misc_feature 1..20: note = Description of Artificial Sequence: Synthetic oligonucleotide
  source 1..20: mol_type = other DNA
caaatcagtcgtgaatatct

SEQ ID NO: 8511 - DNA, 20 bp, synthetic construct
  misc_feature 1..20: note = Description of Artificial Sequence: Synthetic oligonucleotide
  source 1..20: mol_type = other DNA
aaatcagtcgtgaatatctc

SEQ ID NO: 8512 - DNA, 20 bp, synthetic construct
  misc_feature 1..20: note = Description of Artificial Sequence: Synthetic oligonucleotide
  source 1..20: mol_type = other DNA
aatcagtcgtgaatatctca

SEQ ID NO: 8513 - DNA, 20 bp, synthetic construct
  misc_feature 1..20: note = Description of Artificial Sequence: Synthetic oligonucleotide
  source 1..20: mol_type = other DNA
atcagtcgtgaatatctcat

SEQ ID NO: 8514 - DNA, 20 bp, synthetic construct
  misc_feature 1..20: note = Description of Artificial Sequence: Synthetic oligonucleotide
  source 1..20: mol_type = other DNA
tcagtcgtgaatatctcata

SEQ ID NO: 8515 - DNA, 20 bp, synthetic construct
  misc_feature 1..20: note = Description of Artificial Sequence: Synthetic oligonucleotide
  source 1..20: mol_type = other DNA
cagtcgtgaatatctcatag

SEQ ID NO: 8516 - DNA, 20 bp, synthetic construct
  misc_feature 1..20: note = Description of Artificial Sequence: Synthetic oligonucleotide
  source 1..20: mol_type = other DNA
agtcgtgaatatctcataga

SEQ ID NO: 8517 - DNA, 20 bp, synthetic construct
  misc_feature 1..20: note = Description of Artificial Sequence: Synthetic oligonucleotide
  source 1..20: mol_type = other DNA
gtcgtgaatatctcatagag

SEQ ID NO: 8518 - DNA, 20 bp, synthetic construct
  misc_feature 1..20: note = Description of Artificial Sequence: Synthetic oligonucleotide
  source 1..20: mol_type = other DNA
tcgtgaatatctcatagagt

SEQ ID NO: 8519 - DNA, 20 bp, synthetic construct
  misc_feature 1..20: note = Description of Artificial Sequence: Synthetic oligonucleotide
  source 1..20: mol_type = other DNA
cgtgaatatctcatagagtc

SEQ ID NO: 8520 - DNA, 20 bp, synthetic construct
  misc_feature 1..20: note = Description of Artificial Sequence: Synthetic oligonucleotide
  source 1..20: mol_type = other DNA
gtgaatatctcatagagtct

SEQ ID NO: 8521 - DNA, 20 bp, synthetic construct
  misc_feature 1..20: note = Description of Artificial Sequence: Synthetic oligonucleotide
  source 1..20: mol_type = other DNA
tgaatatctcatagagtctg

SEQ ID NO: 8522 - DNA, 20 bp, synthetic construct
  misc_feature 1..20: note = Description of Artificial Sequence: Synthetic oligonucleotide
  source 1..20: mol_type = other DNA
gaatatctcatagagtctgg

SEQ ID NO: 8523 - DNA, 20 bp, synthetic construct
  misc_feature 1..20: note = Description of Artificial Sequence: Synthetic oligonucleotide
  source 1..20: mol_type = other DNA
aatatctcatagagtctggt

SEQ ID NO: 8524 - DNA, 20 bp, synthetic construct
  misc_feature 1..20: note = Description of Artificial Sequence: Synthetic oligonucleotide
  source 1..20: mol_type = other DNA
atatctcatagagtctggtt

SEQ ID NO: 8525 - DNA, 20 bp, synthetic construct
  misc_feature 1..20: note = Description of Artificial Sequence: Synthetic oligonucleotide
  source 1..20: mol_type = other DNA
tatctcatagagtctggttt

SEQ ID NO: 8526 - DNA, 20 bp, synthetic construct
  misc_feature 1..20: note = Description of Artificial Sequence: Synthetic oligonucleotide
  source 1..20: mol_type = other DNA
atctcatagagtctggtttt

SEQ ID NO: 8527 - DNA, 20 bp, synthetic construct
  misc_feature 1..20: note = Description of Artificial Sequence: Synthetic oligonucleotide
  source 1..20: mol_type = other DNA
tctcatagagtctggttttg

SEQ ID NO: 8528 - DNA, 20 bp, synthetic construct
  misc_feature 1..20: note = Description of Artificial Sequence: Synthetic oligonucleotide
  source 1..20: mol_type = other DNA
ctcatagagtctggttttgt

SEQ ID NO: 8529 - DNA, 20 bp, synthetic construct
  misc_feature 1..20: note = Description of Artificial Sequence: Synthetic oligonucleotide
  source 1..20: mol_type = other DNA
tcatagagtctggttttgtt

SEQ ID NO: 8530 - DNA, 20 bp, synthetic construct
  misc_feature 1..20: note = Description of Artificial Sequence: Synthetic oligonucleotide
  source 1..20: mol_type = other DNA
catagagtctggttttgttg

SEQ ID NO: 8531 - DNA, 20 bp, synthetic construct
  misc_feature 1..20: note = Description of Artificial Sequence: Synthetic oligonucleotide
  source 1..20: mol_type = other DNA
atagagtctggttttgttga

SEQ ID NO: 8532 - DNA, 20 bp, synthetic construct
  misc_feature 1..20: note = Description of Artificial Sequence: Synthetic oligonucleotide
  source 1..20: mol_type = other DNA
tagagtctggttttgttgat

SEQ ID NO: 8533 - DNA, 20 bp, synthetic construct
  misc_feature 1..20: note = Description of Artificial Sequence: Synthetic oligonucleotide
  source 1..20: mol_type = other DNA
agagtctggttttgttgatg

SEQ ID NO: 8534 - DNA, 20 bp, synthetic construct
  misc_feature 1..20: note = Description of Artificial Sequence: Synthetic oligonucleotide
  source 1..20: mol_type = other DNA
gagtctggttttgttgatgt

SEQ ID NO: 8535 - DNA, 20 bp, synthetic construct
  misc_feature 1..20: note = Description of Artificial Sequence: Synthetic oligonucleotide
  source 1..20: mol_type = other DNA
agtctggttttgttgatgtt

SEQ ID NO: 8536 - DNA, 20 bp, synthetic construct
  misc_feature 1..20: note = Description of Artificial Sequence: Synthetic oligonucleotide
  source 1..20: mol_type = other DNA
gtctggttttgttgatgttt

SEQ ID NO: 8537 - DNA, 20 bp, synthetic construct
  misc_feature 1..20: note = Description of Artificial Sequence: Synthetic oligonucleotide
  source 1..20: mol_type = other DNA
tctggttttgttgatgtttc

SEQ ID NO: 8538 - DNA, 20 bp, synthetic construct
  misc_feature 1..20: note = Description of Artificial Sequence: Synthetic oligonucleotide
  source 1..20: mol_type = other DNA
ctggttttgttgatgtttcc

SEQ ID NO: 8539 - DNA, 20 bp, synthetic construct
  misc_feature 1..20: note = Description of Artificial Sequence: Synthetic oligonucleotide
  source 1..20: mol_type = other DNA
tggttttgttgatgtttcct

SEQ ID NO: 8540 - DNA, 20 bp, synthetic construct
  misc_feature 1..20: note = Description of Artificial Sequence: Synthetic oligonucleotide
  source 1..20: mol_type = other DNA
ggttttgttgatgtttcctg

SEQ ID NO: 8541 - DNA, 20 bp, synthetic construct
  misc_feature 1..20: note = Description of Artificial Sequence: Synthetic oligonucleotide
  source 1..20: mol_type = other DNA
gttttgttgatgtttcctgg

SEQ ID NO: 8542 - DNA, 20 bp, synthetic construct
  misc_feature 1..20: note = Description of Artificial Sequence: Synthetic oligonucleotide
  source 1..20: mol_type = other DNA
ttttgttgatgtttcctggt

SEQ ID NO: 8543 - DNA, 20 bp, synthetic construct
  misc_feature 1..20: note = Description of Artificial Sequence: Synthetic oligonucleotide
  source 1..20: mol_type = other DNA
tttgttgatgtttcctggtt

SEQ ID NO: 8544 - DNA, 20 bp, synthetic construct
  misc_feature 1..20: note = Description of Artificial Sequence: Synthetic oligonucleotide
  source 1..20: mol_type = other DNA
ttgttgatgtttcctggttg

SEQ ID NO: 8545 - DNA, 20 bp, synthetic construct
  misc_feature 1..20: note = Description of Artificial Sequence: Synthetic oligonucleotide
  source 1..20: mol_type = other DNA
tgttgatgtttcctggttgg

SEQ ID NO: 8546 - DNA, 20 bp, synthetic construct
  misc_feature 1..20: note = Description of Artificial Sequence: Synthetic oligonucleotide
  source 1..20: mol_type = other DNA
gttgatgtttcctggttggt

SEQ ID NO: 8547 - DNA, 20 bp, synthetic construct
  misc_feature 1..20: note = Description of Artificial Sequence: Synthetic oligonucleotide
  source 1..20: mol_type = other DNA
ttgatgtttcctggttggtt

SEQ ID NO: 8548 - DNA, 20 bp, synthetic construct
  misc_feature 1..20: note = Description of Artificial Sequence: Synthetic oligonucleotide
  source 1..20: mol_type = other DNA
tgatgtttcctggttggttg

SEQ ID NO: 8549 - DNA, 20 bp, synthetic construct
  misc_feature 1..20: note = Description of Artificial Sequence: Synthetic oligonucleotide
  source 1..20: mol_type = other DNA
gatgtttcctggttggttgt

SEQ ID NO: 8550 - DNA, 20 bp, synthetic construct
  misc_feature 1..20: note = Description of Artificial Sequence: Synthetic oligonucleotide
  source 1..20: mol_type = other DNA
atgtttcctggttggttgtt

SEQ ID NO: 8551 - DNA, 20 bp, synthetic construct
  misc_feature 1..20: note = Description of Artificial Sequence: Synthetic oligonucleotide
  source 1..20: mol_type = other DNA
tgtttcctggttggttgttt

SEQ ID NO: 8552 - DNA, 20 bp, synthetic construct
  misc_feature 1..20: note = Description of Artificial Sequence: Synthetic oligonucleotide
  source 1..20: mol_type = other DNA
gtttcctggttggttgtttt

SEQ ID NO: 8553 - DNA, 20 bp, synthetic construct
  misc_feature 1..20: note = Description of Artificial Sequence: Synthetic oligonucleotide
  source 1..20: mol_type = other DNA
tttcctggttggttgttttt

SEQ ID NO: 8554 - DNA, 20 bp, synthetic construct
  misc_feature 1..20: note = Description of Artificial Sequence: Synthetic oligonucleotide
  source 1..20: mol_type = other DNA
ttcctggttggttgtttttg

SEQ ID NO: 8555 - DNA, 20 bp, synthetic construct
  misc_feature 1..20: note = Description of Artificial Sequence: Synthetic oligonucleotide
  source 1..20: mol_type = other DNA
tcctggttggttgtttttgt

SEQ ID NO: 8556 - DNA, 20 bp, synthetic construct
  misc_feature 1..20: note = Description of Artificial Sequence: Synthetic oligonucleotide
  source 1..20: mol_type = other DNA
cctggttggttgtttttgtt

SEQ ID NO: 8557 - DNA, 20 bp, synthetic construct
  misc_feature 1..20: note = Description of Artificial Sequence: Synthetic oligonucleotide
  source 1..20: mol_type = other DNA
ctggttggttgtttttgttg

SEQ ID NO: 8558 - DNA, 20 bp, synthetic construct
  misc_feature 1..20: note = Description of Artificial Sequence: Synthetic oligonucleotide
  source 1..20: mol_type = other DNA
tggttggttgtttttgttgt

SEQ ID NO: 8559 - DNA, 20 bp, synthetic construct
  misc_feature 1..20: note = Description of Artificial Sequence: Synthetic oligonucleotide
  source 1..20: mol_type = other DNA
ggttggttgtttttgttgtt

SEQ ID NO: 8560 - DNA, 20 bp, synthetic construct
  misc_feature 1..20: note = Description of Artificial Sequence: Synthetic oligonucleotide
  source 1..20: mol_type = other DNA
gttggttgtttttgttgttg

SEQ ID NO: 8561 - DNA, 20 bp, synthetic construct
  misc_feature 1..20: note = Description of Artificial Sequence: Synthetic oligonucleotide
  source 1..20: mol_type = other DNA
ttggttgtttttgttgttgt

SEQ ID NO: 8562 - DNA, 20 bp, synthetic construct
  misc_feature 1..20: note = Description of Artificial Sequence: Synthetic oligonucleotide
  source 1..20: mol_type = other DNA
tggttgtttttgttgttgtt

SEQ ID NO: 8563 - DNA, 20 bp, synthetic construct
  misc_feature 1..20: note = Description of Artificial Sequence: Synthetic oligonucleotide
  source 1..20: mol_type = other DNA
ggttgtttttgttgttgttc

SEQ ID NO: 8564 - DNA, 20 bp, synthetic construct
  misc_feature 1..20: note = Description of Artificial Sequence: Synthetic oligonucleotide
  source 1..20: mol_type = other DNA
gttgtttttgttgttgttca

SEQ ID NO: 8565 - DNA, 20 bp, synthetic construct
  misc_feature 1..20: note = Description of Artificial Sequence: Synthetic oligonucleotide
  source 1..20: mol_type = other DNA
ttgtttttgttgttgttcag

SEQ ID NO: 8566 - DNA, 20 bp, synthetic construct
  misc_feature 1..20: note = Description of Artificial Sequence: Synthetic oligonucleotide
  source 1..20: mol_type = other DNA
tgtttttgttgttgttcaga

SEQ ID NO: 8567 - DNA, 20 bp, synthetic construct
  misc_feature 1..20: note = Description of Artificial Sequence: Synthetic oligonucleotide
  source 1..20: mol_type = other DNA
gtttttgttgttgttcagag

SEQ ID NO: 8568 - DNA, 20 bp, synthetic construct
  misc_feature 1..20: note = Description of Artificial Sequence: Synthetic oligonucleotide
  source 1..20: mol_type = other DNA
tttttgttgttgttcagaga

SEQ ID NO: 8569 - DNA, 20 bp, synthetic construct
  misc_feature 1..20: note = Description of Artificial Sequence: Synthetic oligonucleotide
  source 1..20: mol_type = other DNA
ttttgttgttgttcagagat

SEQ ID NO: 8570 - DNA, 20 bp, synthetic construct
  misc_feature 1..20: note = Description of Artificial Sequence: Synthetic oligonucleotide
  source 1..20: mol_type = other DNA
tttgttgttgttcagagatg

SEQ ID NO: 8571 - DNA, 20 bp, synthetic construct
  misc_feature 1..20: note = Description of Artificial Sequence: Synthetic oligonucleotide
  source 1..20: mol_type = other DNA
ttgttgttgttcagagatgg

SEQ ID NO: 8572 - DNA, 20 bp, synthetic construct
  misc_feature 1..20: note = Description of Artificial Sequence: Synthetic oligonucleotide
  source 1..20: mol_type = other DNA
tgttgttgttcagagatggt

SEQ ID NO: 8573 - DNA, 20 bp, synthetic construct
  misc_feature 1..20: note = Description of Artificial Sequence: Synthetic oligonucleotide
  source 1..20: mol_type = other DNA
gttgttgttcagagatggtg

SEQ ID NO: 8574 - DNA, 20 bp, synthetic construct
  misc_feature 1..20: note = Description of Artificial Sequence: Synthetic oligonucleotide
  source 1..20: mol_type = other DNA
ttgttgttcagagatggtgg

SEQ ID NO: 8575 - DNA, 20 bp, synthetic construct
  misc_feature 1..20: note = Description of Artificial Sequence: Synthetic oligonucleotide
  source 1..20: mol_type = other DNA
tgttgttcagagatggtggc

SEQ ID NO: 8576 - DNA, 20 bp, synthetic construct
  misc_feature 1..20: note = Description of Artificial Sequence: Synthetic oligonucleotide
  source 1..20: mol_type = other DNA
gttgttcagagatggtggct

SEQ ID NO: 8577 - DNA, 20 bp, synthetic construct
  misc_feature 1..20: note = Description of Artificial Sequence: Synthetic oligonucleotide
  source 1..20: mol_type = other DNA
ttgttcagagatggtggcta

SEQ ID NO: 8578 - DNA, 20 bp, synthetic construct
  misc_feature 1..20: note = Description of Artificial Sequence: Synthetic oligonucleotide
  source 1..20: mol_type = other DNA
tgttcagagatggtggctac

SEQ ID NO: 8579 - DNA, 20 bp, synthetic construct
  misc_feature 1..20: note = Description of Artificial Sequence: Synthetic oligonucleotide
  source 1..20: mol_type = other DNA
gttcagagatggtggctact

SEQ ID NO: 8580 - DNA, 20 bp, synthetic construct
  misc_feature 1..20: note = Description of Artificial Sequence: Synthetic oligonucleotide
  source 1..20: mol_type = other DNA
ttcagagatggtggctactg

SEQ ID NO: 8581 - DNA, 20 bp, synthetic construct
  misc_feature 1..20: note = Description of Artificial Sequence: Synthetic oligonucleotide
  source 1..20: mol_type = other DNA
tcagagatggtggctactgc

SEQ ID NO: 8582 - DNA, 20 bp, synthetic construct
  misc_feature 1..20: note = Description of Artificial Sequence: Synthetic oligonucleotide
  source 1..20: mol_type = other DNA
cagagatggtggctactgcc

SEQ ID NO: 8583 - DNA, 20 bp, synthetic construct
  misc_feature 1..20: note = Description of Artificial Sequence: Synthetic oligonucleotide
  source 1..20: mol_type = other DNA
agagatggtggctactgcca

SEQ ID NO: 8584 - DNA, 20 bp, synthetic construct
  misc_feature 1..20: note = Description of Artificial Sequence: Synthetic oligonucleotide
  source 1..20: mol_type = other DNA
gagatggtggctactgccac

SEQ ID NO: 8585 - DNA, 20 bp, synthetic construct
  misc_feature 1..20: note = Description of Artificial Sequence: Synthetic oligonucleotide
  source 1..20: mol_type = other DNA
agatggtggctactgccacc

SEQ ID NO: 8586 - DNA, 20 bp, synthetic construct
  misc_feature 1..20: note = Description of Artificial Sequence: Synthetic oligonucleotide
  source 1..20: mol_type = other DNA
gatggtggctactgccacct

SEQ ID NO: 8587 - DNA, 20 bp, synthetic construct
  misc_feature 1..20: note = Description of Artificial Sequence: Synthetic oligonucleotide
  source 1..20: mol_type = other DNA
atggtggctactgccacctg

SEQ ID NO: 8588 - DNA, 20 bp, synthetic construct
  misc_feature 1..20: note = Description of Artificial Sequence: Synthetic oligonucleotide
  source 1..20: mol_type = other DNA
tggtggctactgccacctga

SEQ ID NO: 8589 - DNA, 20 bp, synthetic construct
  misc_feature 1..20: note = Description of Artificial Sequence: Synthetic oligonucleotide
  source 1..20: mol_type = other DNA
ggtggctactgccacctgag

SEQ ID NO: 8590 - DNA, 20 bp, synthetic construct
  misc_feature 1..20: note = Description of Artificial Sequence: Synthetic oligonucleotide
  source 1..20: mol_type = other DNA
gtggctactgccacctgaga

SEQ ID NO: 8591 - DNA, 20 bp, synthetic construct
  misc_feature 1..20: note = Description of Artificial Sequence: Synthetic oligonucleotide
  source 1..20: mol_type = other DNA
tggctactgccacctgagac

SEQ ID NO: 8592 - DNA, 20 bp, synthetic construct
  misc_feature 1..20: note = Description of Artificial Sequence: Synthetic oligonucleotide
  source 1..20: mol_type = other DNA
ggctactgccacctgagacc

SEQ ID NO: 8593 - DNA, 20 bp, synthetic construct
  misc_feature 1..20: note = Description of Artificial Sequence: Synthetic oligonucleotide
  source 1..20: mol_type = other DNA
gctactgccacctgagacca

SEQ ID NO: 8594 - DNA, 20 bp, synthetic construct
  misc_feature 1..20: note = Description of Artificial Sequence: Synthetic oligonucleotide
  source 1..20: mol_type = other DNA
ctactgccacctgagaccat

SEQ ID NO: 8595 - DNA, 20 bp, synthetic construct
  misc_feature 1..20: note = Description of Artificial Sequence: Synthetic oligonucleotide
  source 1..20: mol_type = other DNA
tactgccacctgagaccata

SEQ ID NO: 8596 - DNA, 20 bp, synthetic construct
  misc_feature 1..20: note = Description of Artificial Sequence: Synthetic oligonucleotide
  source 1..20: mol_type = other DNA
actgccacctgagaccataa

SEQ ID NO: 8597 - DNA, 20 bp, synthetic construct
  misc_feature 1..20: note = Description of Artificial Sequence: Synthetic oligonucleotide
  source 1..20: mol_type = other DNA
ctgccacctgagaccataat

SEQ ID NO: 8598 - DNA, 20 bp, synthetic construct
  misc_feature 1..20: note = Description of Artificial Sequence: Synthetic oligonucleotide
  source 1..20: mol_type = other DNA
tgccacctgagaccataatt

SEQ ID NO: 8599 - DNA, 20 bp, synthetic construct
  misc_feature 1..20: note = Description of Artificial Sequence: Synthetic oligonucleotide
  source 1..20: mol_type = other DNA
gccacctgagaccataatta

SEQ ID NO: 8600 - DNA, 20 bp, synthetic construct
  misc_feature 1..20: note = Description of Artificial Sequence: Synthetic oligonucleotide
  source 1..20: mol_type = other DNA
ccacctgagaccataattaa

SEQ ID NO: 8601 - DNA, 20 bp, synthetic construct
  misc_feature 1..20: note = Description of Artificial Sequence: Synthetic oligonucleotide
  source 1..20: mol_type = other DNA
cacctgagaccataattaag

SEQ ID NO: 8602 - DNA, 20 bp, synthetic construct
  misc_feature 1..20: note = Description of Artificial Sequence: Synthetic oligonucleotide
  source 1..20: mol_type = other DNA
acctgagaccataattaagg

SEQ ID NO: 8603 - DNA, 20 bp, synthetic construct
  misc_feature 1..20: note = Description of Artificial Sequence: Synthetic oligonucleotide
  source 1..20: mol_type = other DNA
cctgagaccataattaaggg

SEQ ID NO: 8604 - DNA, 20 bp, synthetic construct
  misc_feature 1..20: note = Description of Artificial Sequence: Synthetic oligonucleotide
  source 1..20: mol_type = other DNA
ctgagaccataattaaggga

SEQ ID NO: 8605 - DNA, 20 bp, synthetic construct
  misc_feature 1..20: note = Description of Artificial Sequence: Synthetic oligonucleotide
  source 1..20: mol_type = other DNA
tgagaccataattaagggag

SEQ ID NO: 8606 - DNA, 20 bp, synthetic construct
  misc_feature 1..20: note = Description of Artificial Sequence: Synthetic oligonucleotide
  source 1..20: mol_type = other DNA
gagaccataattaagggaga

SEQ ID NO: 8607 - DNA, 20 bp, synthetic construct
  misc_feature 1..20: note = Description of Artificial Sequence: Synthetic oligonucleotide
  source 1..20: mol_type = other DNA
agaccataattaagggagat

SEQ ID NO: 8608 - DNA, 20 bp, synthetic construct
  misc_feature 1..20: note = Description of Artificial Sequence: Synthetic oligonucleotide
  source 1..20: mol_type = other DNA
gaccataattaagggagata

SEQ ID NO: 8609 - DNA, 20 bp, synthetic construct
  misc_feature 1..20: note = Description of Artificial Sequence: Synthetic oligonucleotide
  source 1..20: mol_type = other DNA
accataattaagggagatag

SEQ ID NO: 8610 - DNA, 20 bp, synthetic construct
  misc_feature 1..20: note = Description of Artificial Sequence: Synthetic oligonucleotide
  source 1..20: mol_type = other DNA
ccataattaagggagataga

SEQ ID NO: 8611 - DNA, 20 bp, synthetic construct
  misc_feature 1..20: note = Description of Artificial Sequence: Synthetic oligonucleotide
  source 1..20: mol_type = other DNA
cataattaagggagatagat

SEQ ID NO: 8612 - DNA, 20 bp, synthetic construct
  misc_feature 1..20: note = Description of Artificial Sequence: Synthetic oligonucleotide
  source 1..20: mol_type = other DNA
ataattaagggagatagatt

SEQ ID NO: 8613 - DNA, 20 bp, synthetic construct
  misc_feature 1..20: note = Description of Artificial Sequence: Synthetic oligonucleotide
  source 1..20: mol_type = other DNA
taattaagggagatagattt

SEQ ID NO: 8614 - DNA, 20 bp, synthetic construct
  misc_feature 1..20: note = Description of Artificial Sequence: Synthetic oligonucleotide
  source 1..20: mol_type = other DNA
aattaagggagatagatttt

SEQ ID NO: 8615 - DNA, 20 bp, synthetic construct
  misc_feature 1..20: note = Description of Artificial Sequence: Synthetic oligonucleotide
  source 1..20: mol_type = other DNA
attaagggagatagatttta

SEQ ID NO: 8616 - DNA, 20 bp, synthetic construct
  misc_feature 1..20: note = Description of Artificial Sequence: Synthetic oligonucleotide
  source 1..20: mol_type = other DNA
ttaagggagatagattttat

SEQ ID NO: 8617 - DNA, 20 bp, synthetic construct
  misc_feature 1..20: note = Description of Artificial Sequence: Synthetic oligonucleotide
  source 1..20: mol_type = other DNA
taagggagatagattttatt

SEQ ID NO: 8618 - DNA, 20 bp, synthetic construct
  misc_feature 1..20: note = Description of Artificial Sequence: Synthetic oligonucleotide
  source 1..20: mol_type = other DNA
aagggagatagattttatta

SEQ ID NO: 8619 - DNA, 20 bp, synthetic construct
  misc_feature 1..20: note = Description of Artificial Sequence: Synthetic oligonucleotide
  source 1..20: mol_type = other DNA
agggagatagattttattat

SEQ ID NO: 8620 - DNA, 20 bp, synthetic construct
  misc_feature 1..20: note = Description of Artificial Sequence: Synthetic oligonucleotide
  source 1..20: mol_type = other DNA
gggagatagattttattatc

SEQ ID NO: 8621 - DNA, 20 bp, synthetic construct
  misc_feature 1..20: note = Description of Artificial Sequence: Synthetic oligonucleotide
  source 1..20: mol_type = other DNA
ggagatagattttattatca

SEQ ID NO: 8622 - DNA, 20 bp, synthetic construct
  misc_feature 1..20: note = Description of Artificial Sequence: Synthetic oligonucleotide
  source 1..20: mol_type = other DNA
gagatagattttattatcac

SEQ ID NO: 8623 - DNA, 20 bp, synthetic construct
  misc_feature 1..20: note = Description of Artificial Sequence: Synthetic oligonucleotide
  source 1..20: mol_type = other DNA
agatagattttattatcaca

SEQ ID NO: 8624 - DNA, 20 bp, synthetic construct
  misc_feature 1..20: note = Description of Artificial Sequence: Synthetic oligonucleotide
  source 1..20: mol_type = other DNA
gatagattttattatcacat

SEQ ID NO: 8625 - DNA, 20 bp, synthetic construct
  misc_feature 1..20: note = Description of Artificial Sequence: Synthetic oligonucleotide
  source 1..20: mol_type = other DNA
atagattttattatcacata

SEQ ID NO: 8626 - DNA, 20 bp, synthetic construct
  misc_feature 1..20: note = Description of Artificial Sequence: Synthetic oligonucleotide
  source 1..20: mol_type = other DNA
tagattttattatcacatat

SEQ ID NO: 8627 - DNA, 20 bp, synthetic construct
  misc_feature 1..20: note = Description of Artificial Sequence: Synthetic oligonucleotide
  source 1..20: mol_type = other DNA
agattttattatcacatatt

SEQ ID NO: 8628 - DNA, 20 bp, synthetic construct
  misc_feature 1..20: note = Description of Artificial Sequence: Synthetic oligonucleotide
  source 1..20: mol_type = other DNA
gattttattatcacatattt

SEQ ID NO: 8629 - DNA, 20 bp, synthetic construct
  misc_feature 1..20: note = Description of Artificial Sequence: Synthetic oligonucleotide
  source 1..20: mol_type = other DNA
attttattatcacatatttt

SEQ ID NO: 8630 - DNA, 20 bp, synthetic construct
  misc_feature 1..20: note = Description of Artificial Sequence: Synthetic oligonucleotide
  source 1..20: mol_type = other DNA
ttttattatcacatattttc

SEQ ID NO: 8631 - DNA, 20 bp, synthetic construct
  misc_feature 1..20: note = Description of Artificial Sequence: Synthetic oligonucleotide
  source 1..20: mol_type = other DNA
tttattatcacatattttcc

SEQ ID NO: 8632 - DNA, 20 bp, synthetic construct
  misc_feature 1..20: note = Description of Artificial Sequence: Synthetic oligonucleotide
  source 1..20: mol_type = other DNA
ttattatcacatattttccc

SEQ ID NO: 8633 - DNA, 20 bp, synthetic construct
  misc_feature 1..20: note = Description of Artificial Sequence: Synthetic oligonucleotide
  source 1..20: mol_type = other DNA
tattatcacatattttcccc

SEQ ID NO: 8634 - DNA, 20 bp, synthetic construct
  misc_feature 1..20: note = Description of Artificial Sequence: Synthetic oligonucleotide
  source 1..20: mol_type = other DNA
attatcacatattttcccct

SEQ ID NO: 8635 - DNA, 20 bp, synthetic construct
  misc_feature 1..20: note = Description of Artificial Sequence: Synthetic oligonucleotide
  source 1..20: mol_type = other DNA
ttatcacatattttcccctt

SEQ ID NO: 8636 - DNA, 20 bp, synthetic construct
  misc_feature 1..20: note = Description of Artificial Sequence: Synthetic oligonucleotide
  source 1..20: mol_type = other DNA
tatcacatattttccccttc

SEQ ID NO: 8637 - DNA, 20 bp, synthetic construct
  misc_feature 1..20: note = Description of Artificial Sequence: Synthetic oligonucleotide
  source 1..20: mol_type = other DNA
atcacatattttccccttcc

SEQ ID NO: 8638 - DNA, 20 bp, synthetic construct
  misc_feature 1..20: note = Description of Artificial Sequence: Synthetic oligonucleotide
  source 1..20: mol_type = other DNA
tcacatattttccccttcca

SEQ ID NO: 8639 - DNA, 20 bp, synthetic construct
  misc_feature 1..20: note = Description of Artificial Sequence: Synthetic oligonucleotide
  source 1..20: mol_type = other DNA
cacatattttccccttccat

SEQ ID NO: 8640 - DNA, 20 bp, synthetic construct
  misc_feature 1..20: note = Description of Artificial Sequence: Synthetic oligonucleotide
  source 1..20: mol_type = other DNA
acatattttccccttccatc

SEQ ID NO: 8641 - DNA, 20 bp, synthetic construct
  misc_feature 1..20: note = Description of Artificial Sequence: Synthetic oligonucleotide
  source 1..20: mol_type = other DNA
catattttccccttccatcc

SEQ ID NO: 8642 - DNA, 20 bp, synthetic construct
  misc_feature 1..20: note = Description of Artificial Sequence: Synthetic oligonucleotide
  source 1..20: mol_type = other DNA
atattttccccttccatcca

SEQ ID NO: 8643 - DNA, 20 bp, synthetic construct
  misc_feature 1..20: note = Description of Artificial Sequence: Synthetic oligonucleotide
  source 1..20: mol_type = other DNA
tattttccccttccatccag

SEQ ID NO: 8644 - DNA, 20 bp, synthetic construct
  misc_feature 1..20: note = Description of Artificial Sequence: Synthetic oligonucleotide
  source 1..20: mol_type = other DNA
attttccccttccatccagc

SEQ ID NO: 8645 - DNA, 20 bp, synthetic construct
  misc_feature 1..20: note = Description of Artificial Sequence: Synthetic oligonucleotide
  source 1..20: mol_type = other DNA
ttttccccttccatccagct

SEQ ID NO: 8646 - DNA, 20 bp, synthetic construct
  misc_feature 1..20: note = Description of Artificial Sequence: Synthetic oligonucleotide
  source 1..20: mol_type = other DNA
tttccccttccatccagcta

SEQ ID NO: 8647 - DNA, 20 bp, synthetic construct
  misc_feature 1..20: note = Description of Artificial Sequence: Synthetic oligonucleotide
  source 1..20: mol_type = other DNA
ttccccttccatccagctag

SEQ ID NO: 8648 - DNA, 20 bp, synthetic construct
  misc_feature 1..20: note = Description of Artificial Sequence: Synthetic oligonucleotide
  source 1..20: mol_type = other DNA
tccccttccatccagctagc

SEQ ID NO: 8649 - DNA, 20 bp, synthetic construct
  misc_feature 1..20: note = Description of Artificial Sequence: Synthetic oligonucleotide
  source 1..20: mol_type = other DNA
ccccttccatccagctagca

SEQ ID NO: 8650 - DNA, 20 bp, synthetic construct
  misc_feature 1..20: note = Description of Artificial Sequence: Synthetic oligonucleotide
  source 1..20: mol_type = other DNA
cccttccatccagctagcac

SEQ ID NO: 8651 - DNA, 20 bp, synthetic construct
  misc_feature 1..20: note = Description of Artificial Sequence: Synthetic oligonucleotide
  source 1..20: mol_type = other DNA
ccttccatccagctagcacc

SEQ ID NO: 8652 - DNA, 20 bp, synthetic construct
  misc_feature 1..20: note = Description of Artificial Sequence: Synthetic oligonucleotide
  source 1..20: mol_type = other DNA
cttccatccagctagcacct

SEQ ID NO: 8653 - DNA, 20 bp, synthetic construct
  misc_feature 1..20: note = Description of Artificial Sequence: Synthetic oligonucleotide
  source 1..20: mol_type = other DNA
ttccatccagctagcacctc

SEQ ID NO: 8654 - DNA, 20 bp, synthetic construct
  misc_feature 1..20: note = Description of Artificial Sequence: Synthetic oligonucleotide
  source 1..20: mol_type = other DNA
tccatccagctagcacctca

SEQ ID NO: 8655 - DNA, 20 bp, synthetic construct
  misc_feature 1..20: note = Description of Artificial Sequence: Synthetic oligonucleotide
  source 1..20: mol_type = other DNA
ccatccagctagcacctcaa

SEQ ID NO: 8656 - DNA, 20 bp, synthetic construct
  misc_feature 1..20: note = Description of Artificial Sequence: Synthetic oligonucleotide
  source 1..20: mol_type = other DNA
catccagctagcacctcaaa

SEQ ID NO: 8657 - DNA, 20 bp, synthetic construct
  misc_feature 1..20: note = Description of Artificial Sequence: Synthetic oligonucleotide
  source 1..20: mol_type = other DNA
atccagctagcacctcaaaa

SEQ ID NO: 8658 - DNA, 20 bp, synthetic construct
  misc_feature 1..20: note = Description of Artificial Sequence: Synthetic oligonucleotide
  source 1..20: mol_type = other DNA
tccagctagcacctcaaaac

SEQ ID NO: 8659 - DNA, 20 bp, synthetic construct
  misc_feature 1..20: note = Description of Artificial Sequence: Synthetic oligonucleotide
  source 1..20: mol_type = other DNA
ccagctagcacctcaaaaca

SEQ ID NO: 8660 - DNA, 20 bp, synthetic construct
  misc_feature 1..20: note = Description of Artificial Sequence: Synthetic oligonucleotide
  source 1..20: mol_type = other DNA
cagctagcacctcaaaacac

SEQ ID NO: 8661 - DNA, 20 bp, synthetic construct
  misc_feature 1..20: note = Description of Artificial Sequence: Synthetic oligonucleotide
  source 1..20: mol_type = other DNA
agctagcacctcaaaacact

SEQ ID NO: 8662 - DNA, 20 bp, synthetic construct
  misc_feature 1..20: note = Description of Artificial Sequence: Synthetic oligonucleotide
  source 1..20: mol_type = other DNA
gctagcacctcaaaacactc

SEQ ID NO: 8663 - DNA, 20 bp, synthetic construct
  misc_feature 1..20: note = Description of Artificial Sequence: Synthetic oligonucleotide
  source 1..20: mol_type = other DNA
ctagcacctcaaaacactca

SEQ ID NO: 8664 - DNA, 20 bp, synthetic construct
  misc_feature 1..20: note = Description of Artificial Sequence: Synthetic oligonucleotide
  source 1..20: mol_type = other DNA
tagcacctcaaaacactcag

SEQ ID NO: 8665 - DNA, 20 bp, synthetic construct
  misc_feature 1..20: note = Description of Artificial Sequence: Synthetic oligonucleotide
  source 1..20: mol_type = other DNA
agcacctcaaaacactcaga

SEQ ID NO: 8666 - DNA, 20 bp, synthetic construct
  misc_feature 1..20: note = Description of Artificial Sequence: Synthetic oligonucleotide
  source 1..20: mol_type = other DNA
gcacctcaaaacactcagaa

SEQ ID NO: 8667 - DNA, 20 bp, synthetic construct
  misc_feature 1..20: note = Description of Artificial Sequence: Synthetic oligonucleotide
  source 1..20: mol_type = other DNA
cacctcaaaacactcagaag

SEQ ID NO: 8668 - DNA, 20 bp, synthetic construct
  misc_feature 1..20: note = Description of Artificial Sequence: Synthetic oligonucleotide
  source 1..20: mol_type = other DNA
acctcaaaacactcagaaga

SEQ ID NO: 8669 - DNA, 20 bp, synthetic construct
  misc_feature 1..20: note = Description of Artificial Sequence: Synthetic oligonucleotide
  source 1..20: mol_type = other DNA
cctcaaaacactcagaagaa

SEQ ID NO: 8670 - DNA, 20 bp, synthetic construct
  misc_feature 1..20: note = Description of Artificial Sequence: Synthetic oligonucleotide
  source 1..20: mol_type = other DNA
ctcaaaacactcagaagaac

SEQ ID NO: 8671 - DNA, 20 bp, synthetic construct
  misc_feature 1..20: note = Description of Artificial Sequence: Synthetic oligonucleotide
  source 1..20: mol_type = other DNA
tcaaaacactcagaagaacc

SEQ ID NO: 8672 - DNA, 20 bp, synthetic construct
  misc_feature 1..20: note = Description of Artificial Sequence: Synthetic oligonucleotide
  source 1..20: mol_type = other DNA
caaaacactcagaagaacct

SEQ ID NO: 8673 - DNA, 20 bp, synthetic construct
  misc_feature 1..20: note = Description of Artificial Sequence: Synthetic oligonucleotide
  source 1..20: mol_type = other DNA
aaaacactcagaagaacctt

SEQ ID NO: 8674 - DNA, 20 bp, synthetic construct
  misc_feature 1..20: note = Description of Artificial Sequence: Synthetic oligonucleotide
  source 1..20: mol_type = other DNA
aaacactcagaagaaccttt

SEQ ID NO: 8675 - DNA, 20 bp, synthetic construct
  misc_feature 1..20: note = Description of Artificial Sequence: Synthetic oligonucleotide
  source 1..20: mol_type = other DNA
aacactcagaagaacctttg

SEQ ID NO: 8676 - DNA, 20 bp, synthetic construct
  misc_feature 1..20: note = Description of Artificial Sequence: Synthetic oligonucleotide
  source 1..20: mol_type = other DNA
acactcagaagaacctttga

SEQ ID NO: 8677 - DNA, 20 bp, synthetic construct
  misc_feature 1..20: note = Description of Artificial Sequence: Synthetic oligonucleotide
  source 1..20: mol_type = other DNA
cactcagaagaacctttgag

SEQ ID NO: 8678 - DNA, 20 bp, synthetic construct
  misc_feature 1..20: note = Description of Artificial Sequence: Synthetic oligonucleotide
  source 1..20: mol_type = other DNA
actcagaagaacctttgagg

SEQ ID NO: 8679 - DNA, 20 bp, synthetic construct
  misc_feature 1..20: note = Description of Artificial Sequence: Synthetic oligonucleotide
  source 1..20: mol_type = other DNA
ctcagaagaacctttgaggc

SEQ ID NO: 8680 - DNA, 20 bp, synthetic construct
  misc_feature 1..20: note = Description of Artificial Sequence: Synthetic oligonucleotide
  source 1..20: mol_type = other DNA
tcagaagaacctttgaggcc

SEQ ID NO: 8681 - DNA, 20 bp, synthetic construct
  misc_feature 1..20: note = Description of Artificial Sequence: Synthetic oligonucleotide
  source 1..20: mol_type = other DNA
cagaagaacctttgaggcct

SEQ ID NO: 8682 - DNA, 20 bp, synthetic construct
  misc_feature 1..20: note = Description of Artificial Sequence: Synthetic oligonucleotide
  source 1..20: mol_type = other DNA
agaagaacctttgaggcctt

SEQ ID NO: 8683 - DNA, 20 bp, synthetic construct
  misc_feature 1..20: note = Description of Artificial Sequence: Synthetic oligonucleotide
  source 1..20: mol_type = other DNA
gaagaacctttgaggccttc

SEQ ID NO: 8684 - DNA, 20 bp, synthetic construct
  misc_feature 1..20: note = Description of Artificial Sequence: Synthetic oligonucleotide
  source 1..20: mol_type = other DNA
aagaacctttgaggccttcc

SEQ ID NO: 8685 - DNA, 20 bp, synthetic construct
  misc_feature 1..20: note = Description of Artificial Sequence: Synthetic oligonucleotide
  source 1..20: mol_type = other DNA
agaacctttgaggccttcct

SEQ ID NO: 8686 - DNA, 20 bp, synthetic construct
  misc_feature 1..20: note = Description of Artificial Sequence: Synthetic oligonucleotide
  source 1..20: mol_type = other DNA
gaacctttgaggccttcctc

SEQ ID NO: 8687 - DNA, 20 bp, synthetic construct
  misc_feature 1..20: note = Description of Artificial Sequence: Synthetic oligonucleotide
  source 1..20: mol_type = other DNA
aacctttgaggccttcctcc

SEQ ID NO: 8688 - DNA, 20 bp, synthetic construct
  misc_feature 1..20: note = Description of Artificial Sequence: Synthetic oligonucleotide
  source 1..20: mol_type = other DNA
acctttgaggccttcctccc

SEQ ID NO: 8689 - DNA, 20 bp, synthetic construct
  misc_feature 1..20: note = Description of Artificial Sequence: Synthetic oligonucleotide
  source 1..20: mol_type = other DNA
cctttgaggccttcctccca

SEQ ID NO: 8690 - DNA, 20 bp, synthetic construct
  misc_feature 1..20: note = Description of Artificial Sequence: Synthetic oligonucleotide
  source 1..20: mol_type = other DNA
ctttgaggccttcctcccag

SEQ ID NO: 8691 - DNA, 20 bp, synthetic construct
  misc_feature 1..20: note = Description of Artificial Sequence: Synthetic oligonucleotide
  source 1..20: mol_type = other DNA
tttgaggccttcctcccaga

SEQ ID NO: 8692 - DNA, 20 bp, synthetic construct
  misc_feature 1..20: note = Description of Artificial Sequence: Synthetic oligonucleotide
  source 1..20: mol_type = other DNA
ttgaggccttcctcccagaa

SEQ ID NO: 8693 - DNA, 20 bp, synthetic construct
  misc_feature 1..20: note = Description of Artificial Sequence: Synthetic oligonucleotide
  source 1..20: mol_type = other DNA
tgaggccttcctcccagaag

SEQ ID NO: 8694 - DNA, 20 bp, synthetic construct
  misc_feature 1..20: note = Description of Artificial Sequence: Synthetic oligonucleotide
  source 1..20: mol_type = other DNA
gaggccttcctcccagaagt

SEQ ID NO: 8695 - DNA, 20 bp, synthetic construct
  misc_feature 1..20: note = Description of Artificial Sequence: Synthetic oligonucleotide
  source 1..20: mol_type = other DNA
aggccttcctcccagaagtt

SEQ ID NO: 8696 - DNA, 20 bp, synthetic construct
  misc_feature 1..20: note = Description of Artificial Sequence: Synthetic oligonucleotide
  source 1..20: mol_type = other DNA
ggccttcctcccagaagttt

SEQ ID NO: 8697 - DNA, 20 bp, synthetic construct
  misc_feature 1..20: note = Description of Artificial Sequence: Synthetic oligonucleotide
  source 1..20: mol_type = other DNA
gccttcctcccagaagtttt

SEQ ID NO: 8698 - DNA, 20 bp, synthetic construct
  misc_feature 1..20: note = Description of Artificial Sequence: Synthetic oligonucleotide
  source 1..20: mol_type = other DNA
ccttcctcccagaagttttg

SEQ ID NO: 8699 - DNA, 20 bp, synthetic construct
  misc_feature 1..20: note = Description of Artificial Sequence: Synthetic oligonucleotide
  source 1..20: mol_type = other DNA
cttcctcccagaagttttgt

SEQ ID NO: 8700 - DNA, 20 bp, synthetic construct
  misc_feature 1..20: note = Description of Artificial Sequence: Synthetic oligonucleotide
  source 1..20: mol_type = other DNA
ttcctcccagaagttttgtt

SEQ ID NO: 8701 - DNA, 20 bp, synthetic construct
  misc_feature 1..20: note = Description of Artificial Sequence: Synthetic oligonucleotide
  source 1..20: mol_type = other DNA
tcctcccagaagttttgtta

SEQ ID NO: 8702 - DNA, 20 bp, synthetic construct
  misc_feature 1..20: note = Description of Artificial Sequence: Synthetic oligonucleotide
  source 1..20: mol_type = other DNA
cctcccagaagttttgttaa

SEQ ID NO: 8703 - DNA, 20 bp, synthetic construct
  misc_feature 1..20: note = Description of Artificial Sequence: Synthetic oligonucleotide
  source 1..20: mol_type = other DNA
ctcccagaagttttgttaaa

SEQ ID NO: 8704 - DNA, 20 bp, synthetic construct
  misc_feature 1..20: note = Description of Artificial Sequence: Synthetic oligonucleotide
  source 1..20: mol_type = other DNA
tcccagaagttttgttaaaa

SEQ ID NO: 8705 - DNA, 20 bp, synthetic construct
  misc_feature 1..20: note = Description of Artificial Sequence: Synthetic oligonucleotide
  source 1..20: mol_type = other DNA
cccagaagttttgttaaaac

SEQ ID NO: 8706 - DNA, 20 bp, synthetic construct
  misc_feature 1..20: note = Description of Artificial Sequence: Synthetic oligonucleotide
  source 1..20: mol_type = other DNA
ccagaagttttgttaaaaca

SEQ ID NO: 8707 - DNA, 20 bp, synthetic construct
  misc_feature 1..20: note = Description of Artificial Sequence: Synthetic oligonucleotide
  source 1..20: mol_type = other DNA
cagaagttttgttaaaacaa

SEQ ID NO: 8708 - DNA, 20 bp, synthetic construct
  misc_feature 1..20: note = Description of Artificial Sequence: Synthetic oligonucleotide
  source 1..20: mol_type = other DNA
agaagttttgttaaaacaat

SEQ ID NO: 8709 - DNA, 20 bp, synthetic construct
  misc_feature 1..20: note = Description of Artificial Sequence: Synthetic oligonucleotide
  source 1..20: mol_type = other DNA
gaagttttgttaaaacaatg

SEQ ID NO: 8710 - DNA, 20 bp, synthetic construct
  misc_feature 1..20: note = Description of Artificial Sequence: Synthetic oligonucleotide
  source 1..20: mol_type = other DNA
aagttttgttaaaacaatga

SEQ ID NO: 8711 - DNA, 20 bp, synthetic construct
  misc_feature 1..20: note = Description of Artificial Sequence: Synthetic oligonucleotide
  source 1..20: mol_type = other DNA
agttttgttaaaacaatgaa

SEQ ID NO: 8712 - DNA, 20 bp, synthetic construct
  misc_feature 1..20: note = Description of Artificial Sequence: Synthetic oligonucleotide
  source 1..20: mol_type = other DNA
gttttgttaaaacaatgaaa

SEQ ID NO: 8713 - DNA, 20 bp, synthetic construct
  misc_feature 1..20: note = Description of Artificial Sequence: Synthetic oligonucleotide
  source 1..20: mol_type = other DNA
ttttgttaaaacaatgaaat

SEQ ID NO: 8714 - DNA, 20 bp, synthetic construct
  misc_feature 1..20: note = Description of Artificial Sequence: Synthetic oligonucleotide
  source 1..20: mol_type = other DNA
tttgttaaaacaatgaaatg

SEQ ID NO: 8715 - DNA, 20 bp, synthetic construct
  misc_feature 1..20: note = Description of Artificial Sequence: Synthetic oligonucleotide
  source 1..20: mol_type = other DNA
ttgttaaaacaatgaaatga

SEQ ID NO: 8716 - DNA, 20 bp, synthetic construct
  misc_feature 1..20: note = Description of Artificial Sequence: Synthetic oligonucleotide
  source 1..20: mol_type = other DNA
tgttaaaacaatgaaatgag

SEQ ID NO: 8717 - DNA, 20 bp, synthetic construct
  misc_feature 1..20: note = Description of Artificial Sequence: Synthetic oligonucleotide
  source 1..20: mol_type = other DNA
gttaaaacaatgaaatgaga

SEQ ID NO: 8718 - DNA, 20 bp, synthetic construct
  misc_feature 1..20: note = Description of Artificial Sequence: Synthetic oligonucleotide
  source 1..20: mol_type = other DNA
ttaaaacaatgaaatgagag

SEQ ID NO: 8719 - DNA, 20 bp, synthetic construct
  misc_feature 1..20: note = Description of Artificial Sequence: Synthetic oligonucleotide
  source 1..20: mol_type = other DNA
taaaacaatgaaatgagagc

SEQ ID NO: 8720 - DNA, 20 bp, synthetic construct
  misc_feature 1..20: note = Description of Artificial Sequence: Synthetic oligonucleotide
  source 1..20: mol_type = other DNA
aaaacaatgaaatgagagca

SEQ ID NO: 8721 - DNA, 20 bp, synthetic construct
  misc_feature 1..20: note = Description of Artificial Sequence: Synthetic oligonucleotide
  source 1..20: mol_type = other DNA
aaacaatgaaatgagagcat

SEQ ID NO: 8722 - DNA, 20 bp, synthetic construct
  misc_feature 1..20: note = Description of Artificial Sequence: Synthetic oligonucleotide
  source 1..20: mol_type = other DNA
aacaatgaaatgagagcatc

SEQ ID NO: 8723 - DNA, 20 bp, synthetic construct
  misc_feature 1..20: note = Description of Artificial Sequence: Synthetic oligonucleotide
  source 1..20: mol_type = other DNA
acaatgaaatgagagcatca

SEQ ID NO: 8724 - DNA, 20 bp, synthetic construct
  misc_feature 1..20: note = Description of Artificial Sequence: Synthetic oligonucleotide
  source 1..20: mol_type = other DNA
caatgaaatgagagcatcag

SEQ ID NO: 8725 - DNA, 20 bp, synthetic construct
  misc_feature 1..20: note = Description of Artificial Sequence: Synthetic oligonucleotide
  source 1..20: mol_type = other DNA
aatgaaatgagagcatcaga

SEQ ID NO: 8726 - DNA, 20 bp, synthetic construct
  misc_feature 1..20: note = Description of Artificial Sequence: Synthetic oligonucleotide
  source 1..20: mol_type = other DNA
atgaaatgagagcatcagac

SEQ ID NO: 8727 - DNA, 20 bp, synthetic construct
  misc_feature 1..20: note = Description of Artificial Sequence: Synthetic oligonucleotide
  source 1..20: mol_type = other DNA
tgaaatgagagcatcagact

SEQ ID NO: 8728 - DNA, 20 bp, synthetic construct
  misc_feature 1..20: note = Description of Artificial Sequence: Synthetic oligonucleotide
  source 1..20: mol_type = other DNA
gaaatgagagcatcagactg

SEQ ID NO: 8729 - DNA, 20 bp, synthetic construct
  misc_feature 1..20: note = Description of Artificial Sequence: Synthetic oligonucleotide
  source 1..20: mol_type = other DNA
aaatgagagcatcagactgg

SEQ ID NO: 8730 - DNA, 20 bp, synthetic construct
  misc_feature 1..20: note = Description of Artificial Sequence: Synthetic oligonucleotide
  source 1..20: mol_type = other DNA
aatgagagcatcagactggc

SEQ ID NO: 8731 - DNA, 20 bp, synthetic construct
  misc_feature 1..20: note = Description of Artificial Sequence: Synthetic oligonucleotide
  source 1..20: mol_type = other DNA
atgagagcatcagactggcc

SEQ ID NO: 8732 - DNA, 20 bp, synthetic construct
  misc_feature 1..20: note = Description of Artificial Sequence: Synthetic oligonucleotide
  source 1..20: mol_type = other DNA
tgagagcatcagactggcca

SEQ ID NO: 8733 - DNA, 20 bp, synthetic construct
  misc_feature 1..20: note = Description of Artificial Sequence: Synthetic oligonucleotide
  source 1..20: mol_type = other DNA
gagagcatcagactggccag

SEQ ID NO: 8734 - DNA, 20 bp, synthetic construct
  misc_feature 1..20: note = Description of Artificial Sequence: Synthetic oligonucleotide
  source 1..20: mol_type = other DNA
agagcatcagactggccagt

SEQ ID NO: 8735 - DNA, 20 bp, synthetic construct
  misc_feature 1..20: note = Description of Artificial Sequence: Synthetic oligonucleotide
  source 1..20: mol_type = other DNA
gagcatcagactggccagtt

SEQ ID NO: 8736 - DNA, 20 bp, synthetic construct
  misc_feature 1..20: note = Description of Artificial Sequence: Synthetic oligonucleotide
  source 1..20: mol_type = other DNA
agcatcagactggccagttt

SEQ ID NO: 8737 - DNA, 20 bp, synthetic construct
  misc_feature 1..20: note = Description of Artificial Sequence: Synthetic oligonucleotide
  source 1..20: mol_type = other DNA
gcatcagactggccagtttt

SEQ ID NO: 8738 - DNA, 20 bp, synthetic construct
  misc_feature 1..20: note = Description of Artificial Sequence: Synthetic oligonucleotide
  source 1..20: mol_type = other DNA
catcagactggccagttttt

SEQ ID NO: 8739 - DNA, 20 bp, synthetic construct
  misc_feature 1..20: note = Description of Artificial Sequence: Synthetic oligonucleotide
  source 1..20: mol_type = other DNA
atcagactggccagtttttt

SEQ ID NO: 8740 - DNA, 20 bp, synthetic construct
  misc_feature 1..20: note = Description of Artificial Sequence: Synthetic oligonucleotide
  source 1..20: mol_type = other DNA
tcagactggccagttttttt

SEQ ID NO: 8741 - DNA, 20 bp, synthetic construct
  misc_feature 1..20: note = Description of Artificial Sequence: Synthetic oligonucleotide
  source 1..20: mol_type = other DNA
cagactggccagttttttta

SEQ ID NO: 8742 - DNA, 20 bp, synthetic construct
  misc_feature 1..20: note = Description of Artificial Sequence: Synthetic oligonucleotide
  source 1..20: mol_type = other DNA
agactggccagtttttttac

SEQ ID NO: 8743 - DNA, 20 bp, synthetic construct
  misc_feature 1..20: note = Description of Artificial Sequence: Synthetic oligonucleotide
  source 1..20: mol_type = other DNA
gactggccagtttttttact

SEQ ID NO: 8744 - DNA, 20 bp, synthetic construct
  misc_feature 1..20: note = Description of Artificial Sequence: Synthetic oligonucleotide
  source 1..20: mol_type = other DNA
actggccagtttttttactc

SEQ ID NO: 8745 - DNA, 20 bp, synthetic construct
  misc_feature 1..20: note = Description of Artificial Sequence: Synthetic oligonucleotide
  source 1..20: mol_type = other DNA
ctggccagtttttttactct

SEQ ID NO: 8746 - DNA, 20 bp, synthetic construct
  misc_feature 1..20: note = Description of Artificial Sequence: Synthetic oligonucleotide
  source 1..20: mol_type = other DNA
tggccagtttttttactcta

SEQ ID NO: 8747 - DNA, 20 bp, synthetic construct
  misc_feature 1..20: note = Description of Artificial Sequence: Synthetic oligonucleotide
  source 1..20: mol_type = other DNA
ggccagtttttttactctag

SEQ ID NO: 8748 - DNA, 20 bp, synthetic construct
  misc_feature 1..20: note = Description of Artificial Sequence: Synthetic oligonucleotide
  source 1..20: mol_type = other DNA
gccagtttttttactctagg

SEQ ID NO: 8749 - DNA, 20 bp, synthetic construct
  misc_feature 1..20: note = Description of Artificial Sequence: Synthetic oligonucleotide
  source 1..20: mol_type = other DNA
ccagtttttttactctaggg

SEQ ID NO: 8750 - DNA, 20 bp, synthetic construct
  misc_feature 1..20: note = Description of Artificial Sequence: Synthetic oligonucleotide
  source 1..20: mol_type = other DNA
cagtttttttactctagggc

SEQ ID NO: 8751 - DNA, 20 bp, synthetic construct
  misc_feature 1..20: note = Description of Artificial Sequence: Synthetic oligonucleotide
  source 1..20: mol_type = other DNA
agtttttttactctagggcc

SEQ ID NO: 8752 - DNA, 20 bp, synthetic construct
  misc_feature 1..20: note = Description of Artificial Sequence: Synthetic oligonucleotide
  source 1..20: mol_type = other DNA
gtttttttactctagggcca

SEQ ID NO: 8753 - DNA, 20 bp, synthetic construct
  misc_feature 1..20: note = Description of Artificial Sequence: Synthetic oligonucleotide
  source 1..20: mol_type = other DNA
tttttttactctagggccat

SEQ ID NO: 8754 - DNA, 20 bp, synthetic construct
  misc_feature 1..20: note = Description of Artificial Sequence: Synthetic oligonucleotide
  source 1..20: mol_type = other DNA
ttttttactctagggccatg

SEQ ID NO: 8755 - DNA, 20 bp, synthetic construct
  misc_feature 1..20: note = Description of Artificial Sequence: Synthetic oligonucleotide
  source 1..20: mol_type = other DNA
tttttactctagggccatgg

SEQ ID NO: 8756 - DNA, 20 bp, synthetic construct
  misc_feature 1..20: note = Description of Artificial Sequence: Synthetic oligonucleotide
  source 1..20: mol_type = other DNA
ttttactctagggccatgga

SEQ ID NO: 8757 - DNA, 20 bp, synthetic construct
  misc_feature 1..20: note = Description of Artificial Sequence: Synthetic oligonucleotide
  source 1..20: mol_type = other DNA
tttactctagggccatggag

SEQ ID NO: 8758 - DNA, 20 bp, synthetic construct
  misc_feature 1..20: note = Description of Artificial Sequence: Synthetic oligonucleotide
  source 1..20: mol_type = other DNA
ttactctagggccatggagc

SEQ ID NO: 8759 - DNA, 20 bp, synthetic construct
  misc_feature 1..20: note = Description of Artificial Sequence: Synthetic oligonucleotide
  source 1..20: mol_type = other DNA
tactctagggccatggagct

SEQ ID NO: 8760 - DNA, 20 bp, synthetic construct
  misc_feature 1..20: note = Description of Artificial Sequence: Synthetic oligonucleotide
  source 1..20: mol_type = other DNA
actctagggccatggagctg

SEQ ID NO: 8761 - DNA, 20 bp, synthetic construct
  misc_feature 1..20: note = Description of Artificial Sequence: Synthetic oligonucleotide
  source 1..20: mol_type = other DNA
ctctagggccatggagctgc

SEQ ID NO: 8762 - DNA, 20 bp, synthetic construct
  misc_feature 1..20: note = Description of Artificial Sequence: Synthetic oligonucleotide
  source 1..20: mol_type = other DNA
tctagggccatggagctgct

SEQ ID NO: 8763 - DNA, 20 bp, synthetic construct
  misc_feature 1..20: note = Description of Artificial Sequence: Synthetic oligonucleotide
  source 1..20: mol_type = other DNA
ctagggccatggagctgcta

SEQ ID NO: 8764 - DNA, 20 bp, synthetic construct
  misc_feature 1..20: note = Description of Artificial Sequence: Synthetic oligonucleotide
  source 1..20: mol_type = other DNA
tagggccatggagctgctac

SEQ ID NO: 8765 - DNA, 20 bp, synthetic construct
  misc_feature 1..20: note = Description of Artificial Sequence: Synthetic oligonucleotide
  source 1..20: mol_type = other DNA
agggccatggagctgctact

SEQ ID NO: 8766 - DNA, 20 bp, synthetic construct
  misc_feature 1..20: note = Description of Artificial Sequence: Synthetic oligonucleotide
  source 1..20: mol_type = other DNA
gggccatggagctgctactt

SEQ ID NO: 8767 - DNA, 20 bp, synthetic construct
  misc_feature 1..20: note = Description of Artificial Sequence: Synthetic oligonucleotide
  source 1..20: mol_type = other DNA
ggccatggagctgctacttt

SEQ ID NO: 8768 - DNA, 20 bp, synthetic construct
  misc_feature 1..20: note = Description of Artificial Sequence: Synthetic oligonucleotide
  source 1..20: mol_type = other DNA
gccatggagctgctacttta

SEQ ID NO: 8769 - DNA, 20 bp, synthetic construct
  misc_feature 1..20: note = Description of Artificial Sequence: Synthetic oligonucleotide
  source 1..20: mol_type = other DNA
ccatggagctgctactttat

SEQ ID NO: 8770 - DNA, 20 bp, synthetic construct
  misc_feature 1..20: note = Description of Artificial Sequence: Synthetic oligonucleotide
  source 1..20: mol_type = other DNA
catggagctgctactttatg

SEQ ID NO: 8771 - DNA, 20 bp, synthetic construct
  misc_feature 1..20: note = Description of Artificial Sequence: Synthetic oligonucleotide
  source 1..20: mol_type = other DNA
atggagctgctactttatgc

SEQ ID NO: 8772 - DNA, 20 bp, synthetic construct
  misc_feature 1..20: note = Description of Artificial Sequence: Synthetic oligonucleotide
  source 1..20: mol_type = other DNA
tggagctgctactttatgca

SEQ ID NO: 8773 - DNA, 20 bp, synthetic construct
  misc_feature 1..20: note = Description of Artificial Sequence: Synthetic oligonucleotide
  source 1..20: mol_type = other DNA
ggagctgctactttatgcag

SEQ ID NO: 8774 - DNA, 20 bp, synthetic construct
  misc_feature 1..20: note = Description of Artificial Sequence: Synthetic oligonucleotide
  source 1..20: mol_type = other DNA
gagctgctactttatgcagg

SEQ ID NO: 8775 - DNA, 20 bp, synthetic construct
  misc_feature 1..20: note = Description of Artificial Sequence: Synthetic oligonucleotide
  source 1..20: mol_type = other DNA
agctgctactttatgcagga

SEQ ID NO: 8776 - DNA, 20 bp, synthetic construct
  misc_feature 1..20: note = Description of Artificial Sequence: Synthetic oligonucleotide
  source 1..20: mol_type = other DNA
gctgctactttatgcaggat

SEQ ID NO: 8777 - DNA, 20 bp, synthetic construct
  misc_feature 1..20: note = Description of Artificial Sequence: Synthetic oligonucleotide
  source 1..20: mol_type = other DNA
ctgctactttatgcaggatt

SEQ ID NO: 8778 - DNA, 20 bp, synthetic construct
  misc_feature 1..20: note = Description of Artificial Sequence: Synthetic oligonucleotide
  source 1..20: mol_type = other DNA
tgctactttatgcaggattt

SEQ ID NO: 8779 - DNA, 20 bp, synthetic construct
  misc_feature 1..20: note = Description of Artificial Sequence: Synthetic oligonucleotide
  source 1..20: mol_type = other DNA
gctactttatgcaggattta

SEQ ID NO: 8780 - DNA, 20 bp, synthetic construct
  misc_feature 1..20: note = Description of Artificial Sequence: Synthetic oligonucleotide
  source 1..20: mol_type = other DNA
ctactttatgcaggatttaa

SEQ ID NO: 8781 - DNA, 20 bp, synthetic construct
  misc_feature 1..20: note = Description of Artificial Sequence: Synthetic oligonucleotide
  source 1..20: mol_type = other DNA
tactttatgcaggatttaag

SEQ ID NO: 8782 - DNA, 20 bp, synthetic construct
  misc_feature 1..20: note = Description of Artificial Sequence: Synthetic oligonucleotide
  source 1..20: mol_type = other DNA
actttatgcaggatttaagc

SEQ ID NO: 8783 - DNA, 20 bp, synthetic construct
  misc_feature 1..20: note = Description of Artificial Sequence: Synthetic oligonucleotide
  source 1..20: mol_type = other DNA
ctttatgcaggatttaagct

SEQ ID NO: 8784 - DNA, 20 bp, synthetic construct
  misc_feature 1..20: note = Description of Artificial Sequence: Synthetic oligonucleotide
  source 1..20: mol_type = other DNA
tttatgcaggatttaagctc

SEQ ID NO: 8785 - DNA, 20 bp, synthetic construct
  misc_feature 1..20: note = Description of Artificial Sequence: Synthetic oligonucleotide
  source 1..20: mol_type = other DNA
ttatgcaggatttaagctct

SEQ ID NO: 8786 - DNA, 20 bp, synthetic construct
  misc_feature 1..20: note = Description of Artificial Sequence: Synthetic oligonucleotide
  source 1..20: mol_type = other DNA
tatgcaggatttaagctctg

SEQ ID NO: 8787 - DNA, 20 bp, synthetic construct
  misc_feature 1..20: note = Description of Artificial Sequence: Synthetic oligonucleotide
  source 1..20: mol_type = other DNA
atgcaggatttaagctctgt

SEQ ID NO: 8788 - DNA, 20 bp, synthetic construct
  misc_feature 1..20: note = Description of Artificial Sequence: Synthetic oligonucleotide
  source 1..20: mol_type = other DNA
tgcaggatttaagctctgta

SEQ ID NO: 8789 - DNA, 20 bp, synthetic construct
  misc_feature 1..20: note = Description of Artificial Sequence: Synthetic oligonucleotide
  source 1..20: mol_type = other DNA
gcaggatttaagctctgtat

SEQ ID NO: 8790 - DNA, 20 bp, synthetic construct
  misc_feature 1..20: note = Description of Artificial Sequence: Synthetic oligonucleotide
  source 1..20: mol_type = other DNA
caggatttaagctctgtatt

SEQ ID NO: 8791 - DNA, 20 bp, synthetic construct
  misc_feature 1..20: note = Description of Artificial Sequence: Synthetic oligonucleotide
  source 1..20: mol_type = other DNA
aggatttaagctctgtattc

SEQ ID NO: 8792 - DNA, 20 bp, synthetic construct
  misc_feature 1..20: note = Description of Artificial Sequence: Synthetic oligonucleotide
  source 1..20: mol_type = other DNA
ggatttaagctctgtattct

SEQ ID NO: 8793 - DNA, 20 bp, synthetic construct
  misc_feature 1..20: note = Description of Artificial Sequence: Synthetic oligonucleotide
  source 1..20: mol_type = other DNA
gatttaagctctgtattcta

SEQ ID NO: 8794 - DNA, 20 bp, synthetic construct
  misc_feature 1..20: note = Description of Artificial Sequence: Synthetic oligonucleotide
  source 1..20: mol_type = other DNA
atttaagctctgtattctaa

SEQ ID NO: 8795 - DNA, 20 bp, synthetic construct
  misc_feature 1..20: note = Description of Artificial Sequence: Synthetic oligonucleotide
  source 1..20: mol_type = other DNA
tttaagctctgtattctaaa

SEQ ID NO: 8796 - DNA, 20 bp, synthetic construct
  misc_feature 1..20: note = Description of Artificial Sequence: Synthetic oligonucleotide
  source 1..20: mol_type = other DNA
ttaagctctgtattctaaat

SEQ ID NO: 8797 - DNA, 20 bp, synthetic construct
  misc_feature 1..20: note = Description of Artificial Sequence: Synthetic oligonucleotide
  source 1..20: mol_type = other DNA
taagctctgtattctaaata

SEQ ID NO: 8798 - DNA, 20 bp, synthetic construct
  misc_feature 1..20: note = Description of Artificial Sequence: Synthetic oligonucleotide
  source 1..20: mol_type = other DNA
aagctctgtattctaaatat

SEQ ID NO: 8799 - DNA, 20 bp, synthetic construct
  misc_feature 1..20: note = Description of Artificial Sequence: Synthetic oligonucleotide
  source 1..20: mol_type = other DNA
agctctgtattctaaatatc

SEQ ID NO: 8800 - DNA, 20 bp, synthetic construct
  misc_feature 1..20: note = Description of Artificial Sequence: Synthetic oligonucleotide
  source 1..20: mol_type = other DNA
gctctgtattctaaatatca

SEQ ID NO: 8801 - DNA, 20 bp, synthetic construct
  misc_feature 1..20: note = Description of Artificial Sequence: Synthetic oligonucleotide
  source 1..20: mol_type = other DNA
ctctgtattctaaatatcaa

SEQ ID NO: 8802 - DNA, 20 bp, synthetic construct
  misc_feature 1..20: note = Description of Artificial Sequence: Synthetic oligonucleotide
  source 1..20: mol_type = other DNA
tctgtattctaaatatcaaa

SEQ ID NO: 8803 - DNA, 20 bp, synthetic construct
  misc_feature 1..20: note = Description of Artificial Sequence: Synthetic oligonucleotide
  source 1..20: mol_type = other DNA
ctgtattctaaatatcaaag

SEQ ID NO: 8804 - DNA, 20 bp, synthetic construct
  misc_feature 1..20: note = Description of Artificial Sequence: Synthetic oligonucleotide
  source 1..20: mol_type = other DNA
tgtattctaaatatcaaaga

SEQ ID NO: 8805 - DNA, 20 bp, synthetic construct
  misc_feature 1..20: note = Description of Artificial Sequence: Synthetic oligonucleotide
  source 1..20: mol_type = other DNA
gtattctaaatatcaaagag

SEQ ID NO: 8806 - DNA, 20 bp, synthetic construct
  misc_feature 1..20: note = Description of Artificial Sequence: Synthetic oligonucleotide
  source 1..20: mol_type = other DNA
tattctaaatatcaaagagc

SEQ ID NO: 8807 - DNA, 20 bp, synthetic construct
  misc_feature 1..20: note = Description of Artificial Sequence: Synthetic oligonucleotide
  source 1..20: mol_type = other DNA
attctaaatatcaaagagca

SEQ ID NO: 8808 - DNA, 20 bp, synthetic construct
  misc_feature 1..20: note = Description of Artificial Sequence: Synthetic oligonucleotide
  source 1..20: mol_type = other DNA
ttctaaatatcaaagagcat

SEQ ID NO: 8809 - DNA, 20 bp, synthetic construct
  misc_feature 1..20: note = Description of Artificial Sequence: Synthetic oligonucleotide
  source 1..20: mol_type = other DNA
tctaaatatcaaagagcata

SEQ ID NO: 8810 - DNA, 20 bp, synthetic construct
  misc_feature 1..20: note = Description of Artificial Sequence: Synthetic oligonucleotide
  source 1..20: mol_type = other DNA
ctaaatatcaaagagcatag

SEQ ID NO: 8811 - DNA, 20 bp, synthetic construct
  misc_feature 1..20: note = Description of Artificial Sequence: Synthetic oligonucleotide
  source 1..20: mol_type = other DNA
taaatatcaaagagcatagt

SEQ ID NO: 8812 - DNA, 20 bp, synthetic construct
  misc_feature 1..20: note = Description of Artificial Sequence: Synthetic oligonucleotide
  source 1..20: mol_type = other DNA
aaatatcaaagagcatagtg

SEQ ID NO: 8813 - DNA, 20 bp, synthetic construct
  misc_feature 1..20: note = Description of Artificial Sequence: Synthetic oligonucleotide
  source 1..20: mol_type = other DNA
aatatcaaagagcatagtgg

SEQ ID NO: 8814 - DNA, 20 bp, synthetic construct
  misc_feature 1..20: note = Description of Artificial Sequence: Synthetic oligonucleotide
  source 1..20: mol_type = other DNA
atatcaaagagcatagtgga

SEQ ID NO: 8815 - DNA, 20 bp, synthetic construct
  misc_feature 1..20: note = Description of Artificial Sequence: Synthetic oligonucleotide
  source 1..20: mol_type = other DNA
tatcaaagagcatagtggaa

SEQ ID NO: 8816 - DNA, 20 bp, synthetic construct
  misc_feature 1..20: note = Description of Artificial Sequence: Synthetic oligonucleotide
  source 1..20: mol_type = other DNA
atcaaagagcatagtggaag

SEQ ID NO: 8817 - DNA, 20 bp, synthetic construct
  misc_feature 1..20: note = Description of Artificial Sequence: Synthetic oligonucleotide
  source 1..20: mol_type = other DNA
tcaaagagcatagtggaaga

SEQ ID NO: 8818 - DNA, 20 bp, synthetic construct
  misc_feature 1..20: note = Description of Artificial Sequence: Synthetic oligonucleotide
  source 1..20: mol_type = other DNA
caaagagcatagtggaagag

SEQ ID NO: 8819 - DNA, 20 bp, synthetic construct
  misc_feature 1..20: note = Description of Artificial Sequence: Synthetic oligonucleotide
  source 1..20: mol_type = other DNA
aaagagcatagtggaagaga

SEQ ID NO: 8820 - DNA, 20 bp, synthetic construct
  misc_feature 1..20: note = Description of Artificial Sequence: Synthetic oligonucleotide
  source 1..20: mol_type = other DNA
aagagcatagtggaagagac

SEQ ID NO: 8821 - DNA, 20 bp, synthetic construct
  misc_feature 1..20: note = Description of Artificial Sequence: Synthetic oligonucleotide
  source 1..20: mol_type = other DNA
agagcatagtggaagagaca

SEQ ID NO: 8822 - DNA, 20 bp, synthetic construct
  misc_feature 1..20: note = Description of Artificial Sequence: Synthetic oligonucleotide
  source 1..20: mol_type = other DNA
gagcatagtggaagagacag

SEQ ID NO: 8823 - DNA, 20 bp, synthetic construct
  misc_feature 1..20: note = Description of Artificial Sequence: Synthetic oligonucleotide
  source 1..20: mol_type = other DNA
agcatagtggaagagacagc

SEQ ID NO: 8824 - DNA, 20 bp, synthetic construct
  misc_feature 1..20: note = Description of Artificial Sequence: Synthetic oligonucleotide
  source 1..20: mol_type = other DNA
gcatagtggaagagacagcc

SEQ ID NO: 8825 - DNA, 20 bp, synthetic construct
  misc_feature 1..20: note = Description of Artificial Sequence: Synthetic oligonucleotide
  source 1..20: mol_type = other DNA
catagtggaagagacagcct

SEQ ID NO: 8826 - DNA, 20 bp, synthetic construct
  misc_feature 1..20: note = Description of Artificial Sequence: Synthetic oligonucleotide
  source 1..20: mol_type = other DNA
atagtggaagagacagcctt

SEQ ID NO: 8827 - DNA, 20 bp, synthetic construct
  misc_feature 1..20: note = Description of Artificial Sequence: Synthetic oligonucleotide
  source 1..20: mol_type = other DNA
tagtggaagagacagccttt

SEQ ID NO: 8828 - DNA, 20 bp, synthetic construct
  misc_feature 1..20: note = Description of Artificial Sequence: Synthetic oligonucleotide
  source 1..20: mol_type = other DNA
agtggaagagacagcctttt

SEQ ID NO: 8829 - DNA, 20 bp, synthetic construct
  misc_feature 1..20: note = Description of Artificial Sequence: Synthetic oligonucleotide
  source 1..20: mol_type = other DNA
gtggaagagacagccttttc

SEQ ID NO: 8830 - DNA, 20 bp, synthetic construct
  misc_feature 1..20: note = Description of Artificial Sequence: Synthetic oligonucleotide
  source 1..20: mol_type = other DNA
tggaagagacagccttttct

SEQ ID NO: 8831 - DNA, 20 bp, synthetic construct
  misc_feature 1..20: note = Description of Artificial Sequence: Synthetic oligonucleotide
  source 1..20: mol_type = other DNA
ggaagagacagccttttctg

SEQ ID NO: 8832 - DNA, 20 bp, synthetic construct
  misc_feature 1..20: note = Description of Artificial Sequence: Synthetic oligonucleotide
  source 1..20: mol_type = other DNA
gaagagacagccttttctga

SEQ ID NO: 8833 - DNA, 20 bp, synthetic construct
  misc_feature 1..20: note = Description of Artificial Sequence: Synthetic oligonucleotide
  source 1..20: mol_type = other DNA
aagagacagccttttctgat

SEQ ID NO: 8834 - DNA, 20 bp, synthetic construct
  misc_feature 1..20: note = Description of Artificial Sequence: Synthetic oligonucleotide
  source 1..20: mol_type = other DNA
agagacagccttttctgata

SEQ ID NO: 8835 - DNA, 20 bp, synthetic construct
  misc_feature 1..20: note = Description of Artificial Sequence: Synthetic oligonucleotide
  source 1..20: mol_type = other DNA
gagacagccttttctgatag

SEQ ID NO: 8836 - DNA, 20 bp, synthetic construct
  misc_feature 1..20: note = Description of Artificial Sequence: Synthetic oligonucleotide
  source 1..20: mol_type = other DNA
agacagccttttctgatagg

SEQ ID NO: 8837 - DNA, 20 bp, synthetic construct
  misc_feature 1..20: note = Description of Artificial Sequence: Synthetic oligonucleotide
  source 1..20: mol_type = other DNA
gacagccttttctgatagga

SEQ ID NO: 8838 - DNA, 20 bp, synthetic construct
  misc_feature 1..20: note = Description of Artificial Sequence: Synthetic oligonucleotide
  source 1..20: mol_type = other DNA
acagccttttctgataggat

SEQ ID NO: 8839 - DNA, 20 bp, synthetic construct
  misc_feature 1..20: note = Description of Artificial Sequence: Synthetic oligonucleotide
  source 1..20: mol_type = other DNA
cagccttttctgataggatt

SEQ ID NO: 8840 - DNA, 20 bp, synthetic construct
  misc_feature 1..20: note = Description of Artificial Sequence: Synthetic oligonucleotide
  source 1..20: mol_type = other DNA
agccttttctgataggattc

SEQ ID NO: 8841 - DNA, 20 bp, synthetic construct
  misc_feature 1..20: note = Description of Artificial Sequence: Synthetic oligonucleotide
  source 1..20: mol_type = other DNA
gccttttctgataggattca

SEQ ID NO: 8842 - DNA, 20 bp, synthetic construct
  misc_feature 1..20: note = Description of Artificial Sequence: Synthetic oligonucleotide
  source 1..20: mol_type = other DNA
ccttttctgataggattcag

SEQ ID NO: 8843 - DNA, 20 bp, synthetic construct
  misc_feature 1..20: note = Description of Artificial Sequence: Synthetic oligonucleotide
  source 1..20: mol_type = other DNA
cttttctgataggattcaga

SEQ ID NO: 8844 - DNA, 20 bp, synthetic construct
  misc_feature 1..20: note = Description of Artificial Sequence: Synthetic oligonucleotide
  source 1..20: mol_type = other DNA
ttttctgataggattcagag

SEQ ID NO: 8845 - DNA, 20 bp, synthetic construct
  misc_feature 1..20: note = Description of Artificial Sequence: Synthetic oligonucleotide
  source 1..20: mol_type = other DNA
tttctgataggattcagaga

SEQ ID NO: 8846 - DNA, 20 bp, synthetic construct
  misc_feature 1..20: note = Description of Artificial Sequence: Synthetic oligonucleotide
  source 1..20: mol_type = other DNA
ttctgataggattcagagac

SEQ ID NO: 8847 - DNA, 20 bp, synthetic construct
  misc_feature 1..20: note = Description of Artificial Sequence: Synthetic oligonucleotide
  source 1..20: mol_type = other DNA
tctgataggattcagagact

SEQ ID NO: 8848 - DNA, 20 bp, synthetic construct
  misc_feature 1..20: note = Description of Artificial Sequence: Synthetic oligonucleotide
  source 1..20: mol_type = other DNA
ctgataggattcagagactg

SEQ ID NO: 8849 - DNA, 20 bp, synthetic construct
  misc_feature 1..20: note = Description of Artificial Sequence: Synthetic oligonucleotide
  source 1..20: mol_type = other DNA
tgataggattcagagactgc

SEQ ID NO: 8850 - DNA, 20 bp, synthetic construct
  misc_feature 1..20: note = Description of Artificial Sequence: Synthetic oligonucleotide
  source 1..20: mol_type = other DNA
gataggattcagagactgcg

SEQ ID NO: 8851 - DNA, 20 bp, synthetic construct
  misc_feature 1..20: note = Description of Artificial Sequence: Synthetic oligonucleotide
  source 1..20: mol_type = other DNA
ataggattcagagactgcgg

SEQ ID NO: 8852 - DNA, 20 bp, synthetic construct
  misc_feature 1..20: note = Description of Artificial Sequence: Synthetic oligonucleotide
  source 1..20: mol_type = other DNA
taggattcagagactgcggc

SEQ ID NO: 8853 - DNA, 20 bp, synthetic construct
  misc_feature 1..20: note = Description of Artificial Sequence: Synthetic oligonucleotide
  source 1..20: mol_type = other DNA
aggattcagagactgcggcc

SEQ ID NO: 8854 - DNA, 20 bp, synthetic construct
  misc_feature 1..20: note = Description of Artificial Sequence: Synthetic oligonucleotide
  source 1..20: mol_type = other DNA
ggattcagagactgcggccc

SEQ ID NO: 8855 - DNA, 20 bp, synthetic construct
  misc_feature 1..20: note = Description of Artificial Sequence: Synthetic oligonucleotide
  source 1..20: mol_type = other DNA
gattcagagactgcggccct

SEQ ID NO: 8856 - DNA, 20 bp, synthetic construct
  misc_feature 1..20: note = Description of Artificial Sequence: Synthetic oligonucleotide
  source 1..20: mol_type = other DNA
attcagagactgcggccctt

SEQ ID NO: 8857 - DNA, 20 bp, synthetic construct
  misc_feature 1..20: note = Description of Artificial Sequence: Synthetic oligonucleotide
  source 1..20: mol_type = other DNA
ttcagagactgcggccctta

SEQ ID NO: 8858 - DNA, 20 bp, synthetic construct
  misc_feature 1..20: note = Description of Artificial Sequence: Synthetic oligonucleotide
  source 1..20: mol_type = other DNA
tcagagactgcggcccttac

SEQ ID NO: 8859 - DNA, 20 bp, synthetic construct
  misc_feature 1..20: note = Description of Artificial Sequence: Synthetic oligonucleotide
  source 1..20: mol_type = other DNA
cagagactgcggcccttact

SEQ ID NO: 8860 - DNA, 20 bp, synthetic construct
  misc_feature 1..20: note = Description of Artificial Sequence: Synthetic oligonucleotide
  source 1..20: mol_type = other DNA
agagactgcggcccttacta

SEQ ID NO: 8861 - DNA, 20 bp, synthetic construct
  misc_feature 1..20: note = Description of Artificial Sequence: Synthetic oligonucleotide
  source 1..20: mol_type = other DNA
gagactgcggcccttactat

SEQ ID NO: 8862 - DNA, 20 bp, synthetic construct
  misc_feature 1..20: note = Description of Artificial Sequence: Synthetic oligonucleotide
  source 1..20: mol_type = other DNA
agactgcggcccttactatc

SEQ ID NO: 8863 - DNA, 20 bp, synthetic construct
  misc_feature 1..20: note = Description of Artificial Sequence: Synthetic oligonucleotide
  source 1..20: mol_type = other DNA
gactgcggcccttactatcc

SEQ ID NO: 8864 - DNA, 20 bp, synthetic construct
  misc_feature 1..20: note = Description of Artificial Sequence: Synthetic oligonucleotide
  source 1..20: mol_type = other DNA
actgcggcccttactatcca

SEQ ID NO: 8865 - DNA, 20 bp, synthetic construct
  misc_feature 1..20: note = Description of Artificial Sequence: Synthetic oligonucleotide
  source 1..20: mol_type = other DNA
ctgcggcccttactatccaa

SEQ ID NO: 8866 - DNA, 20 bp, synthetic construct
  misc_feature 1..20: note = Description of Artificial Sequence: Synthetic oligonucleotide
  source 1..20: mol_type = other DNA
tgcggcccttactatccaag

SEQ ID NO: 8867 - DNA, 20 bp, synthetic construct
  misc_feature 1..20: note = Description of Artificial Sequence: Synthetic oligonucleotide
  source 1..20: mol_type = other DNA
gcggcccttactatccaaga

SEQ ID NO: 8868 - DNA, 20 bp, synthetic construct
  misc_feature 1..20: note = Description of Artificial Sequence: Synthetic oligonucleotide
  source 1..20: mol_type = other DNA
cggcccttactatccaagag

SEQ ID NO: 8869 - DNA, 20 bp, synthetic construct
  misc_feature 1..20: note = Description of Artificial Sequence: Synthetic oligonucleotide
  source 1..20: mol_type = other DNA
ggcccttactatccaagaga

SEQ ID NO: 8870 - DNA, 20 bp, synthetic construct
  misc_feature 1..20: note = Description of Artificial Sequence: Synthetic oligonucleotide
  source 1..20: mol_type = other DNA
gcccttactatccaagagaa

SEQ ID NO: 8871 - DNA, 20 bp, synthetic construct
  misc_feature 1..20: note = Description of Artificial Sequence: Synthetic oligonucleotide
  source 1..20: mol_type = other DNA
cccttactatccaagagaag

SEQ ID NO: 8872 - DNA, 20 bp, synthetic construct
  misc_feature 1..20: note = Description of Artificial Sequence: Synthetic oligonucleotide
  source 1..20: mol_type = other DNA
ccttactatccaagagaagc

SEQ ID NO: 8873 - DNA, 20 bp, synthetic construct
  misc_feature 1..20: note = Description of Artificial Sequence: Synthetic oligonucleotide
  source 1..20: mol_type = other DNA
cttactatccaagagaagct

SEQ ID NO: 8874 - DNA, 20 bp, synthetic construct
  misc_feature 1..20: note = Description of Artificial Sequence: Synthetic oligonucleotide
  source 1..20: mol_type = other DNA
ttactatccaagagaagctt

SEQ ID NO: 8875 - DNA, 20 bp, synthetic construct
  misc_feature 1..20: note = Description of Artificial Sequence: Synthetic oligonucleotide
  source 1..20: mol_type = other DNA
tactatccaagagaagcttc

SEQ ID NO: 8876 - DNA, 20 bp, synthetic construct
  misc_feature 1..20: note = Description of Artificial Sequence: Synthetic oligonucleotide
  source 1..20: mol_type = other DNA
actatccaagagaagcttcc

SEQ ID NO: 8877 - DNA, 20 bp, synthetic construct
  misc_feature 1..20: note = Description of Artificial Sequence: Synthetic oligonucleotide
  source 1..20: mol_type = other DNA
ctatccaagagaagcttcct

SEQ ID NO: 8878 - DNA, 20 bp, synthetic construct
  misc_feature 1..20: note = Description of Artificial Sequence: Synthetic oligonucleotide
  source 1..20: mol_type = other DNA
tatccaagagaagcttcctg

SEQ ID NO: 8879 - DNA, 20 bp, synthetic construct
  misc_feature 1..20: note = Description of Artificial Sequence: Synthetic oligonucleotide
  source 1..20: mol_type = other DNA
atccaagagaagcttcctgc

SEQ ID NO: 8880 - DNA, 20 bp, synthetic construct
  misc_feature 1..20: note = Description of Artificial Sequence: Synthetic oligonucleotide
  source 1..20: mol_type = other DNA
tccaagagaagcttcctgcc

SEQ ID NO: 8881 - DNA, 20 bp, synthetic construct
  misc_feature 1..20: note = Description of Artificial Sequence: Synthetic oligonucleotide
  source 1..20: mol_type = other DNA
ccaagagaagcttcctgcct

SEQ ID NO: 8882 - DNA, 20 bp, synthetic construct
  misc_feature 1..20: note = Description of Artificial Sequence: Synthetic oligonucleotide
  source 1..20: mol_type = other DNA
caagagaagcttcctgcctg

SEQ ID NO: 8883 - DNA, 20 bp, synthetic construct
  misc_feature 1..20: note = Description of Artificial Sequence: Synthetic oligonucleotide
  source 1..20: mol_type = other DNA
aagagaagcttcctgcctgc

SEQ ID NO: 8884 - DNA, 20 bp, synthetic construct
  misc_feature 1..20: note = Description of Artificial Sequence: Synthetic oligonucleotide
  source 1..20: mol_type = other DNA
agagaagcttcctgcctgct

SEQ ID NO: 8885 - DNA, 20 bp, synthetic construct
  misc_feature 1..20: note = Description of Artificial Sequence: Synthetic oligonucleotide
  source 1..20: mol_type = other DNA
gagaagcttcctgcctgcta

SEQ ID NO: 8886 - DNA, 20 bp, synthetic construct
  misc_feature 1..20: note = Description of Artificial Sequence: Synthetic oligonucleotide
  source 1..20: mol_type = other DNA
agaagcttcctgcctgctat

SEQ ID NO: 8887 - DNA, 20 bp, synthetic construct
  misc_feature 1..20: note = Description of Artificial Sequence: Synthetic oligonucleotide
  source 1..20: mol_type = other DNA
gaagcttcctgcctgctatg

SEQ ID NO: 8888 - DNA, 20 bp, synthetic construct
  misc_feature 1..20: note = Description of Artificial Sequence: Synthetic oligonucleotide
  source 1..20: mol_type = other DNA
aagcttcctgcctgctatgt

SEQ ID NO: 8889 - DNA, 20 bp, synthetic construct
  misc_feature 1..20: note = Description of Artificial Sequence: Synthetic oligonucleotide
  source 1..20: mol_type = other DNA
agcttcctgcctgctatgtc

SEQ ID NO: 8890 - DNA, 20 bp, synthetic construct
  misc_feature 1..20: note = Description of Artificial Sequence: Synthetic oligonucleotide
  source 1..20: mol_type = other DNA
gcttcctgcctgctatgtct

SEQ ID NO: 8891 - DNA, 20 bp, synthetic construct
  misc_feature 1..20: note = Description of Artificial Sequence: Synthetic oligonucleotide
  source 1..20: mol_type = other DNA
cttcctgcctgctatgtctc

SEQ ID NO: 8892 - DNA, 20 bp, synthetic construct
  misc_feature 1..20: note = Description of Artificial Sequence: Synthetic oligonucleotide
  source 1..20: mol_type = other DNA
ttcctgcctgctatgtctcg

SEQ ID NO: 8893 - DNA, 20 bp, synthetic construct
  misc_feature 1..20: note = Description of Artificial Sequence: Synthetic oligonucleotide
  source 1..20: mol_type = other DNA
tcctgcctgctatgtctcgg

SEQ ID NO: 8894 - DNA, 20 bp, synthetic construct
  misc_feature 1..20: note = Description of Artificial Sequence: Synthetic oligonucleotide
  source 1..20: mol_type = other DNA
cctgcctgctatgtctcggg

SEQ ID NO: 8895 - DNA, 20 bp, synthetic construct
  misc_feature 1..20: note = Description of Artificial Sequence: Synthetic oligonucleotide
  source 1..20: mol_type = other DNA
ctgcctgctatgtctcgggg

SEQ ID NO: 8896 - DNA, 20 bp, synthetic construct
  misc_feature 1..20: note = Description of Artificial Sequence: Synthetic oligonucleotide
  source 1..20: mol_type = other DNA
tgcctgctatgtctcggggt

SEQ ID NO: 8897 - DNA, 20 bp, synthetic construct
  misc_feature 1..20: note = Description of Artificial Sequence: Synthetic oligonucleotide
  source 1..20: mol_type = other DNA
gcctgctatgtctcggggtg

SEQ ID NO: 8898 - DNA, 20 bp, synthetic construct
  misc_feature 1..20: note = Description of Artificial Sequence: Synthetic oligonucleotide
  source 1..20: mol_type = other DNA
cctgctatgtctcggggtgc

SEQ ID NO: 8899 - DNA, 20 bp, synthetic construct
  misc_feature 1..20: note = Description of Artificial Sequence: Synthetic oligonucleotide
  source 1..20: mol_type = other DNA
ctgctatgtctcggggtgct

SEQ ID NO: 8900 - DNA, 20 bp, synthetic construct
  misc_feature 1..20: note = Description of Artificial Sequence: Synthetic oligonucleotide
  source 1..20: mol_type = other DNA
tgctatgtctcggggtgctt

SEQ ID NO: 8901 - DNA, 20 bp, synthetic construct
  misc_feature 1..20: note = Description of Artificial Sequence: Synthetic oligonucleotide
  source 1..20: mol_type = other DNA
gctatgtctcggggtgcttt

SEQ ID NO: 8902 - DNA, 20 bp, synthetic construct
  misc_feature 1..20: note = Description of Artificial Sequence: Synthetic oligonucleotide
  source 1..20: mol_type = other DNA
ctatgtctcggggtgctttt

SEQ ID NO: 8903 - DNA, 20 bp, synthetic construct
  misc_feature 1..20: note = Description of Artificial Sequence: Synthetic oligonucleotide
  source 1..20: mol_type = other DNA
tatgtctcggggtgcttttc

SEQ ID NO: 8904 - DNA, 20 bp, synthetic construct
  misc_feature 1..20: note = Description of Artificial Sequence: Synthetic oligonucleotide
  source 1..20: mol_type = other DNA
atgtctcggggtgcttttct

SEQ ID NO: 8905 - DNA, 20 bp, synthetic construct
  misc_feature 1..20: note = Description of Artificial Sequence: Synthetic oligonucleotide
  source 1..20: mol_type = other DNA
tgtctcggggtgcttttctt

SEQ ID NO: 8906 - DNA, 20 bp, synthetic construct
  misc_feature 1..20: note = Description of Artificial Sequence: Synthetic oligonucleotide
  source 1..20: mol_type = other DNA
gtctcggggtgcttttcttg

SEQ ID NO: 8907 - DNA, 20 bp, synthetic construct
  misc_feature 1..20: note = Description of Artificial Sequence: Synthetic oligonucleotide
  source 1..20: mol_type = other DNA
tctcggggtgcttttcttgg

SEQ ID NO: 8908 - DNA, 20 bp, synthetic construct
  misc_feature 1..20: note = Description of Artificial Sequence: Synthetic oligonucleotide
  source 1..20: mol_type = other DNA
ctcggggtgcttttcttggt

SEQ ID NO: 8909 - DNA, 20 bp, synthetic construct
  misc_feature 1..20: note = Description of Artificial Sequence: Synthetic oligonucleotide
  source 1..20: mol_type = other DNA
tcggggtgcttttcttggtg

SEQ ID NO: 8910 - DNA, 20 bp, synthetic construct
  misc_feature 1..20: note = Description of Artificial Sequence: Synthetic oligonucleotide
  source 1..20: mol_type = other DNA
cggggtgcttttcttggtga

SEQ ID NO: 8911 - DNA, 20 bp, synthetic construct
  misc_feature 1..20: note = Description of Artificial Sequence: Synthetic oligonucleotide
  source 1..20: mol_type = other DNA
ggggtgcttttcttggtgac

SEQ ID NO: 8912 - DNA, 20 bp, synthetic construct
  misc_feature 1..20: note = Description of Artificial Sequence: Synthetic oligonucleotide
  source 1..20: mol_type = other DNA
gggtgcttttcttggtgacc

SEQ ID NO: 8913 - DNA, 20 bp, synthetic construct
  misc_feature 1..20: note = Description of Artificial Sequence: Synthetic oligonucleotide
  source 1..20: mol_type = other DNA
ggtgcttttcttggtgacca

SEQ ID NO: 8914 - DNA, 20 bp, synthetic construct
  misc_feature 1..20: note = Description of Artificial Sequence: Synthetic oligonucleotide
  source 1..20: mol_type = other DNA
gtgcttttcttggtgaccac

SEQ ID NO: 8915 - DNA, 20 bp, synthetic construct
  misc_feature 1..20: note = Description of Artificial Sequence: Synthetic oligonucleotide
  source 1..20: mol_type = other DNA
tgcttttcttggtgaccact

SEQ ID NO: 8916 - DNA, 20 bp, synthetic construct
  misc_feature 1..20: note = Description of Artificial Sequence: Synthetic oligonucleotide
  source 1..20: mol_type = other DNA
gcttttcttggtgaccactg

SEQ ID NO: 8917 - DNA, 20 bp, synthetic construct
  misc_feature 1..20: note = Description of Artificial Sequence: Synthetic oligonucleotide
  source 1..20: mol_type = other DNA
cttttcttggtgaccactgc

SEQ ID NO: 8918 - DNA, 20 bp, synthetic construct
  misc_feature 1..20: note = Description of Artificial Sequence: Synthetic oligonucleotide
  source 1..20: mol_type = other DNA
ttttcttggtgaccactgca

SEQ ID NO: 8919 - DNA, 20 bp, synthetic construct
  misc_feature 1..20: note = Description of Artificial Sequence: Synthetic oligonucleotide
  source 1..20: mol_type = other DNA
tttcttggtgaccactgcac

SEQ ID NO: 8920 - DNA, 20 bp, synthetic construct
  misc_feature 1..20: note = Description of Artificial Sequence: Synthetic oligonucleotide
  source 1..20: mol_type = other DNA
ttcttggtgaccactgcact

SEQ ID NO: 8921 - DNA, 20 bp, synthetic construct
  misc_feature 1..20: note = Description of Artificial Sequence: Synthetic oligonucleotide
  source 1..20: mol_type = other DNA
tcttggtgaccactgcactg

SEQ ID NO: 8922 - DNA, 20 bp, synthetic construct
  misc_feature 1..20: note = Description of Artificial Sequence: Synthetic oligonucleotide
  source 1..20: mol_type = other DNA
cttggtgaccactgcactgg

SEQ ID NO: 8923 - DNA, 20 bp, synthetic construct
  misc_feature 1..20: note = Description of Artificial Sequence: Synthetic oligonucleotide
  source 1..20: mol_type = other DNA
ttggtgaccactgcactggg

SEQ ID NO: 8924 - DNA, 20 bp, synthetic construct
  misc_feature 1..20: note = Description of Artificial Sequence: Synthetic oligonucleotide
  source 1..20: mol_type = other DNA
tggtgaccactgcactggga

SEQ ID NO: 8925 - DNA, 20 bp, synthetic construct
  misc_feature 1..20: note = Description of Artificial Sequence: Synthetic oligonucleotide
  source 1..20: mol_type = other DNA
ggtgaccactgcactgggac

SEQ ID NO: 8926 - DNA, 20 bp, synthetic construct
  misc_feature 1..20: note = Description of Artificial Sequence: Synthetic oligonucleotide
  source 1..20: mol_type = other DNA
gtgaccactgcactgggacc

SEQ ID NO: 8927 - DNA, 20 bp, synthetic construct
  misc_feature 1..20: note = Description of Artificial Sequence: Synthetic oligonucleotide
  source 1..20: mol_type = other DNA
tgaccactgcactgggacct

SEQ ID NO: 8928 - DNA, 20 bp, synthetic construct
  misc_feature 1..20: note = Description of Artificial Sequence: Synthetic oligonucleotide
  source 1..20: mol_type = other DNA
gaccactgcactgggacctt

SEQ ID NO: 8929 - DNA, 20 bp, synthetic construct
  misc_feature 1..20: note = Description of Artificial Sequence: Synthetic oligonucleotide
  source 1..20: mol_type = other DNA
accactgcactgggacctta

SEQ ID NO: 8930 - DNA, 20 bp, synthetic construct
  misc_feature 1..20: note = Description of Artificial Sequence: Synthetic oligonucleotide
  source 1..20: mol_type = other DNA
ccactgcactgggaccttag

SEQ ID NO: 8931 - DNA, 20 bp, synthetic construct
  misc_feature 1..20: note = Description of Artificial Sequence: Synthetic oligonucleotide
  source 1..20: mol_type = other DNA
cactgcactgggaccttaga

SEQ ID NO: 8932 - DNA, 20 bp, synthetic construct
  misc_feature 1..20: note = Description of Artificial Sequence: Synthetic oligonucleotide
  source 1..20: mol_type = other DNA
actgcactgggaccttagag

SEQ ID NO: 8933 - DNA, 20 bp, synthetic construct
  misc_feature 1..20: note = Description of Artificial Sequence: Synthetic oligonucleotide
  source 1..20: mol_type = other DNA
ctgcactgggaccttagaga

SEQ ID NO: 8934 - DNA, 20 bp, synthetic construct
  misc_feature 1..20: note = Description of Artificial Sequence: Synthetic oligonucleotide
  source 1..20: mol_type = other DNA
tgcactgggaccttagagag

SEQ ID NO: 8935 - DNA, 20 bp, synthetic construct
  misc_feature 1..20: note = Description of Artificial Sequence: Synthetic oligonucleotide
  source 1..20: mol_type = other DNA
gcactgggaccttagagagg

SEQ ID NO: 8936 - DNA, 20 bp, synthetic construct
  misc_feature 1..20: note = Description of Artificial Sequence: Synthetic oligonucleotide
  source 1..20: mol_type = other DNA
cactgggaccttagagagga

SEQ ID NO: 8937 - DNA, 20 bp, synthetic construct
  misc_feature 1..20: note = Description of Artificial Sequence: Synthetic oligonucleotide
  source 1..20: mol_type = other DNA
actgggaccttagagaggag

SEQ ID NO: 8938 - DNA, 20 bp, synthetic construct
  misc_feature 1..20: note = Description of Artificial Sequence: Synthetic oligonucleotide
  source 1..20: mol_type = other DNA
ctgggaccttagagaggagc

SEQ ID NO: 8939 - DNA, 20 bp, synthetic construct
  misc_feature 1..20: note = Description of Artificial Sequence: Synthetic oligonucleotide
  source 1..20: mol_type = other DNA
tgggaccttagagaggagca

SEQ ID NO: 8940 - DNA, 20 bp, synthetic construct
  misc_feature 1..20: note = Description of Artificial Sequence: Synthetic oligonucleotide
  source 1..20: mol_type = other DNA
gggaccttagagaggagcac

SEQ ID NO: 8941 - DNA, 20 bp, synthetic construct
  misc_feature 1..20: note = Description of Artificial Sequence: Synthetic oligonucleotide
  source 1..20: mol_type = other DNA
ggaccttagagaggagcacc

SEQ ID NO: 8942 - DNA, 20 bp, synthetic construct
  misc_feature 1..20: note = Description of Artificial Sequence: Synthetic oligonucleotide
  source 1..20: mol_type = other DNA
gaccttagagaggagcacca

SEQ ID NO: 8943 - DNA, 20 bp, synthetic construct
  misc_feature 1..20: note = Description of Artificial Sequence: Synthetic oligonucleotide
  source 1..20: mol_type = other DNA
accttagagaggagcaccaa

SEQ ID NO: 8944 - DNA, 20 bp, synthetic construct
  misc_feature 1..20: note = Description of Artificial Sequence: Synthetic oligonucleotide
  source 1..20: mol_type = other DNA
ccttagagaggagcaccaag

SEQ ID NO: 8945 - DNA, 20 bp, synthetic construct
  misc_feature 1..20: note = Description of Artificial Sequence: Synthetic oligonucleotide
  source 1..20: mol_type = other DNA
cttagagaggagcaccaaga

SEQ ID NO: 8946 - DNA, 20 bp, synthetic construct
  misc_feature 1..20: note = Description of Artificial Sequence: Synthetic oligonucleotide
  source 1..20: mol_type = other DNA
ttagagaggagcaccaagat

SEQ ID NO: 8947 - DNA, 20 bp, synthetic construct
  misc_feature 1..20: note = Description of Artificial Sequence: Synthetic oligonucleotide
  source 1..20: mol_type = other DNA
tagagaggagcaccaagatg

SEQ ID NO: 8948 - DNA, 20 bp, synthetic construct
  misc_feature 1..20: note = Description of Artificial Sequence: Synthetic oligonucleotide
  source 1..20: mol_type = other DNA
agagaggagcaccaagatgg

SEQ ID NO: 8949 - DNA, 20 bp, synthetic construct
  misc_feature 1..20: note = Description of Artificial Sequence: Synthetic oligonucleotide
  source 1..20: mol_type = other DNA
gagaggagcaccaagatggc

SEQ ID NO: 8950 - DNA, 20 bp, synthetic construct
  misc_feature 1..20: note = Description of Artificial Sequence: Synthetic oligonucleotide
  source 1..20: mol_type = other DNA
agaggagcaccaagatggca

SEQ ID NO: 8951 - DNA, 20 bp, synthetic construct
  misc_feature 1..20: note = Description of Artificial Sequence: Synthetic oligonucleotide
  source 1..20: mol_type = other DNA
gaggagcaccaagatggcag

SEQ ID NO: 8952 - DNA, 20 bp, synthetic construct
  misc_feature 1..20: note = Description of Artificial Sequence: Synthetic oligonucleotide
  source 1..20: mol_type = other DNA
aggagcaccaagatggcaga

SEQ ID NO: 8953 - DNA, 20 bp, synthetic construct
  misc_feature 1..20: note = Description of Artificial Sequence: Synthetic oligonucleotide
  source 1..20: mol_type = other DNA
ggagcaccaagatggcagat

SEQ ID NO: 8954 - DNA, 20 bp, synthetic construct
  misc_feature 1..20: note = Description of Artificial Sequence: Synthetic oligonucleotide
  source 1..20: mol_type = other DNA
gagcaccaagatggcagatg

SEQ ID NO: 8955 - DNA, 20 bp, synthetic construct
  misc_feature 1..20: note = Description of Artificial Sequence: Synthetic oligonucleotide
  source 1..20: mol_type = other DNA
agcaccaagatggcagatgg

SEQ ID NO: 8956 - DNA, 20 bp, synthetic construct
  misc_feature 1..20: note = Description of Artificial Sequence: Synthetic oligonucleotide
  source 1..20: mol_type = other DNA
gcaccaagatggcagatggg

SEQ ID NO: 8957 - DNA, 20 bp, synthetic construct
  misc_feature 1..20: note = Description of Artificial Sequence: Synthetic oligonucleotide
  source 1..20: mol_type = other DNA
caccaagatggcagatggga

SEQ ID NO: 8958 - DNA, 20 bp, synthetic construct
  misc_feature 1..20: note = Description of Artificial Sequence: Synthetic oligonucleotide
  source 1..20: mol_type = other DNA
accaagatggcagatgggag

SEQ ID NO: 8959 - DNA, 20 bp, synthetic construct
  misc_feature 1..20: note = Description of Artificial Sequence: Synthetic oligonucleotide
  source 1..20: mol_type = other DNA
ccaagatggcagatgggagt

SEQ ID NO: 8960 - DNA, 20 bp, synthetic construct
  misc_feature 1..20: note = Description of Artificial Sequence: Synthetic oligonucleotide
  source 1..20: mol_type = other DNA
caagatggcagatgggagtt

SEQ ID NO: 8961 - DNA, 20 bp, synthetic construct
  misc_feature 1..20: note = Description of Artificial Sequence: Synthetic oligonucleotide
  source 1..20: mol_type = other DNA
aagatggcagatgggagttg

SEQ ID NO: 8962 - DNA, 20 bp, synthetic construct
  misc_feature 1..20: note = Description of Artificial Sequence: Synthetic oligonucleotide
  source 1..20: mol_type = other DNA
agatggcagatgggagttgt

SEQ ID NO: 8963 - DNA, 20 bp, synthetic construct
  misc_feature 1..20: note = Description of Artificial Sequence: Synthetic oligonucleotide
  source 1..20: mol_type = other DNA
gatggcagatgggagttgtc

SEQ ID NO: 8964 - DNA, 20 bp, synthetic construct
  misc_feature 1..20: note = Description of Artificial Sequence: Synthetic oligonucleotide
  source 1..20: mol_type = other DNA
atggcagatgggagttgtct

SEQ ID NO: 8965 - DNA, 20 bp, synthetic construct
  misc_feature 1..20: note = Description of Artificial Sequence: Synthetic oligonucleotide
  source 1..20: mol_type = other DNA
tggcagatgggagttgtctg

SEQ ID NO: 8966 - DNA, 20 bp, synthetic construct
  misc_feature 1..20: note = Description of Artificial Sequence: Synthetic oligonucleotide
  source 1..20: mol_type = other DNA
ggcagatgggagttgtctga

SEQ ID NO: 8967 - DNA, 20 bp, synthetic construct
  misc_feature 1..20: note = Description of Artificial Sequence: Synthetic oligonucleotide
  source 1..20: mol_type = other DNA
gcagatgggagttgtctgag

SEQ ID NO: 8968 - DNA, 20 bp, synthetic construct
  misc_feature 1..20: note = Description of Artificial Sequence: Synthetic oligonucleotide
  source 1..20: mol_type = other DNA
cagatgggagttgtctgagg

SEQ ID NO: 8969 - DNA, 20 bp, synthetic construct
  misc_feature 1..20: note = Description of Artificial Sequence: Synthetic oligonucleotide
  source 1..20: mol_type = other DNA
agatgggagttgtctgaggc

SEQ ID NO: 8970 - DNA, 20 bp, synthetic construct
  misc_feature 1..20: note = Description of Artificial Sequence: Synthetic oligonucleotide
  source 1..20: mol_type = other DNA
gatgggagttgtctgaggca

SEQ ID NO: 8971 - DNA, 20 bp, synthetic construct
  misc_feature 1..20: note = Description of Artificial Sequence: Synthetic oligonucleotide
  source 1..20: mol_type = other DNA
atgggagttgtctgaggcac

SEQ ID NO: 8972 - DNA, 20 bp, synthetic construct
  misc_feature 1..20: note = Description of Artificial Sequence: Synthetic oligonucleotide
  source 1..20: mol_type = other DNA
tgggagttgtctgaggcaca

SEQ ID NO: 8973 - DNA, 20 bp, synthetic construct
  misc_feature 1..20: note = Description of Artificial Sequence: Synthetic oligonucleotide
  source 1..20: mol_type = other DNA
gggagttgtctgaggcacat

SEQ ID NO: 8974 - DNA, 20 bp, synthetic construct
  misc_feature 1..20: note = Description of Artificial Sequence: Synthetic oligonucleotide
  source 1..20: mol_type = other DNA
ggagttgtctgaggcacata

SEQ ID NO: 8975 - DNA, 20 bp, synthetic construct
  misc_feature 1..20: note = Description of Artificial Sequence: Synthetic oligonucleotide
  source 1..20: mol_type = other DNA
gagttgtctgaggcacatag

SEQ ID NO: 8976 - DNA, 20 bp, synthetic construct
  misc_feature 1..20: note = Description of Artificial Sequence: Synthetic oligonucleotide
  source 1..20: mol_type = other DNA
agttgtctgaggcacatagg

SEQ ID NO: 8977 - DNA, 20 bp, synthetic construct
  misc_feature 1..20: note = Description of Artificial Sequence: Synthetic oligonucleotide
  source 1..20: mol_type = other DNA
gttgtctgaggcacataggt

SEQ ID NO: 8978 - DNA, 20 bp, synthetic construct
  misc_feature 1..20: note = Description of Artificial Sequence: Synthetic oligonucleotide
  source 1..20: mol_type = other DNA
ttgtctgaggcacataggtt

SEQ ID NO: 8979 - DNA, 20 bp, synthetic construct
  misc_feature 1..20: note = Description of Artificial Sequence: Synthetic oligonucleotide
  source 1..20: mol_type = other DNA
tgtctgaggcacataggttc

SEQ ID NO: 8980 - DNA, 20 bp, synthetic construct
  misc_feature 1..20: note = Description of Artificial Sequence: Synthetic oligonucleotide
  source 1..20: mol_type = other DNA
gtctgaggcacataggttct

SEQ ID NO: 8981 - DNA, 20 bp, synthetic construct
  misc_feature 1..20: note = Description of Artificial Sequence: Synthetic oligonucleotide
  source 1..20: mol_type = other DNA
tctgaggcacataggttctc

SEQ ID NO: 8982 - DNA, 20 bp, synthetic construct
  misc_feature 1..20: note = Description of Artificial Sequence: Synthetic oligonucleotide
  source 1..20: mol_type = other DNA
ctgaggcacataggttctct

SEQ ID NO: 8983 - DNA, 20 bp, synthetic construct
  misc_feature 1..20: note = Description of Artificial Sequence: Synthetic oligonucleotide
  source 1..20: mol_type = other DNA
tgaggcacataggttctctt

SEQ ID NO: 8984 - DNA, 20 bp, synthetic construct
  misc_feature 1..20: note = Description of Artificial Sequence: Synthetic oligonucleotide
  source 1..20: mol_type = other DNA
gaggcacataggttctcttg

SEQ ID NO: 8985 - DNA, 20 bp, synthetic construct
  misc_feature 1..20: note = Description of Artificial Sequence: Synthetic oligonucleotide
  source 1..20: mol_type = other DNA
aggcacataggttctcttgc

SEQ ID NO: 8986 - DNA, 20 bp, synthetic construct
  misc_feature 1..20: note = Description of Artificial Sequence: Synthetic oligonucleotide
  source 1..20: mol_type = other DNA
ggcacataggttctcttgca

SEQ ID NO: 8987 - DNA, 20 bp, synthetic construct
  misc_feature 1..20: note = Description of Artificial Sequence: Synthetic oligonucleotide
  source 1..20: mol_type = other DNA
gcacataggttctcttgcag

SEQ ID NO: 8988 - DNA, 20 bp, synthetic construct
  misc_feature 1..20: note = Description of Artificial Sequence: Synthetic oligonucleotide
  source 1..20: mol_type = other DNA
cacataggttctcttgcaga

SEQ ID NO: 8989 - DNA, 20 bp, synthetic construct
  misc_feature 1..20: note = Description of Artificial Sequence: Synthetic oligonucleotide
  source 1..20: mol_type = other DNA
acataggttctcttgcagag

SEQ ID NO: 8990 - DNA, 20 bp, synthetic construct
  misc_feature 1..20: note = Description of Artificial Sequence: Synthetic oligonucleotide
  source 1..20: mol_type = other DNA
cataggttctcttgcagagc

SEQ ID NO: 8991 - DNA, 20 bp, synthetic construct
  misc_feature 1..20: note = Description of Artificial Sequence: Synthetic oligonucleotide
  source 1..20: mol_type = other DNA
ataggttctcttgcagagca

SEQ ID NO: 8992 - DNA, 20 bp, synthetic construct
  misc_feature 1..20: note = Description of Artificial Sequence: Synthetic oligonucleotide
  source 1..20: mol_type = other DNA
taggttctcttgcagagcac

SEQ ID NO: 8993 - DNA, 20 bp, synthetic construct
  misc_feature 1..20: note = Description of Artificial Sequence: Synthetic oligonucleotide
  source 1..20: mol_type = other DNA
aggttctcttgcagagcacc

SEQ ID NO: 8994 - DNA, 20 bp, synthetic construct
  misc_feature 1..20: note = Description of Artificial Sequence: Synthetic oligonucleotide
  source 1..20: mol_type = other DNA
ggttctcttgcagagcacct

SEQ ID NO: 8995 - DNA, 20 bp, synthetic construct
  misc_feature 1..20: note = Description of Artificial Sequence: Synthetic oligonucleotide
  source 1..20: mol_type = other DNA
gttctcttgcagagcacctt

SEQ ID NO: 8996 - DNA, 20 bp, synthetic construct
  misc_feature 1..20: note = Description of Artificial Sequence: Synthetic oligonucleotide
  source 1..20: mol_type = other DNA
ttctcttgcagagcaccttg

SEQ ID NO: 8997 - DNA, 20 bp, synthetic construct
  misc_feature 1..20: note = Description of Artificial Sequence: Synthetic oligonucleotide
  source 1..20: mol_type = other DNA
tctcttgcagagcaccttgg

SEQ ID NO: 8998 - DNA, 20 bp, synthetic construct
  misc_feature 1..20: note = Description of Artificial Sequence: Synthetic oligonucleotide
  source 1..20: mol_type = other DNA
ctcttgcagagcaccttggg

SEQ ID NO: 8999 - DNA, 20 bp, synthetic construct
  misc_feature 1..20: note = Description of Artificial Sequence: Synthetic oligonucleotide
  source 1..20: mol_type = other DNA
tcttgcagagcaccttggga

SEQ ID NO: 9000 - DNA, 20 bp, synthetic construct
  misc_feature 1..20: note = Description of Artificial Sequence: Synthetic oligonucleotide
  source 1..20: mol_type = other DNA
cttgcagagcaccttgggaa

SEQ ID NO: 9001 - DNA, 20 bp, synthetic construct
  misc_feature 1..20: note = Description of Artificial Sequence: Synthetic oligonucleotide
  source 1..20: mol_type = other DNA
ttgcagagcaccttgggaaa

SEQ ID NO: 9002 - DNA, 20 bp, synthetic construct
  misc_feature 1..20: note = Description of Artificial Sequence: Synthetic oligonucleotide
  source 1..20: mol_type = other DNA
tgcagagcaccttgggaaag

SEQ ID NO: 9003 - DNA, 20 bp, synthetic construct
  misc_feature 1..20: note = Description of Artificial Sequence: Synthetic oligonucleotide
  source 1..20: mol_type = other DNA
gcagagcaccttgggaaagg

SEQ ID NO: 9004 - DNA, 20 bp, synthetic construct
  misc_feature 1..20: note = Description of Artificial Sequence: Synthetic oligonucleotide
  source 1..20: mol_type = other DNA
cagagcaccttgggaaaggg

SEQ ID NO: 9005 - DNA, 20 bp, synthetic construct
  misc_feature 1..20: note = Description of Artificial Sequence: Synthetic oligonucleotide
  source 1..20: mol_type = other DNA
agagcaccttgggaaaggga

SEQ ID NO: 9006 - DNA, 20 bp, synthetic construct
  misc_feature 1..20: note = Description of Artificial Sequence: Synthetic oligonucleotide
  source 1..20: mol_type = other DNA
gagcaccttgggaaagggag

SEQ ID NO: 9007 - DNA, 20 bp, synthetic construct
  misc_feature 1..20: note = Description of Artificial Sequence: Synthetic oligonucleotide
  source 1..20: mol_type = other DNA
agcaccttgggaaagggagg

SEQ ID NO: 9008 - DNA, 20 bp, synthetic construct
  misc_feature 1..20: note = Description of Artificial Sequence: Synthetic oligonucleotide
  source 1..20: mol_type = other DNA
gcaccttgggaaagggaggt

SEQ ID NO: 9009 - DNA, 20 bp, synthetic construct
  misc_feature 1..20: note = Description of Artificial Sequence: Synthetic oligonucleotide
  source 1..20: mol_type = other DNA
caccttgggaaagggaggta

SEQ ID NO: 9010 - DNA, 20 bp, synthetic construct
  misc_feature 1..20: note = Description of Artificial Sequence: Synthetic oligonucleotide
  source 1..20: mol_type = other DNA
accttgggaaagggaggtag

SEQ ID NO: 9011 - DNA, 20 bp, synthetic construct
  misc_feature 1..20: note = Description of Artificial Sequence: Synthetic oligonucleotide
  source 1..20: mol_type = other DNA
ccttgggaaagggaggtaga

SEQ ID NO: 9012 - DNA, 20 bp, synthetic construct
  misc_feature 1..20: note = Description of Artificial Sequence: Synthetic oligonucleotide
  source 1..20: mol_type = other DNA
cttgggaaagggaggtagag

SEQ ID NO: 9013 - DNA, 20 bp, synthetic construct
  misc_feature 1..20: note = Description of Artificial Sequence: Synthetic oligonucleotide
  source 1..20: mol_type = other DNA
ttgggaaagggaggtagagt

SEQ ID NO: 9014 - DNA, 20 bp, synthetic construct
  misc_feature 1..20: note = Description of Artificial Sequence: Synthetic oligonucleotide
  source 1..20: mol_type = other DNA
tgggaaagggaggtagagta

SEQ ID NO: 9015 - DNA, 20 bp, synthetic construct
  misc_feature 1..20: note = Description of Artificial Sequence: Synthetic oligonucleotide
  source 1..20: mol_type = other DNA
gggaaagggaggtagagtac

SEQ ID NO: 9016 - DNA, 20 bp, synthetic construct
  misc_feature 1..20: note = Description of Artificial Sequence: Synthetic oligonucleotide
  source 1..20: mol_type = other DNA
ggaaagggaggtagagtacg

SEQ ID NO: 9017 - DNA, 20 bp, synthetic construct
  misc_feature 1..20: note = Description of Artificial Sequence: Synthetic oligonucleotide
  source 1..20: mol_type = other DNA
gaaagggaggtagagtacgt

SEQ ID NO: 9018 - DNA, 20 bp, synthetic construct
  misc_feature 1..20: note = Description of Artificial Sequence: Synthetic oligonucleotide
  source 1..20: mol_type = other DNA
aaagggaggtagagtacgtg

SEQ ID NO: 9019 - DNA, 20 bp, synthetic construct
  misc_feature 1..20: note = Description of Artificial Sequence: Synthetic oligonucleotide
  source 1..20: mol_type = other DNA
aagggaggtagagtacgtgt

SEQ ID NO: 9020 - DNA, 20 bp, synthetic construct
  misc_feature 1..20: note = Description of Artificial Sequence: Synthetic oligonucleotide
  source 1..20: mol_type = other DNA
agggaggtagagtacgtgtg

SEQ ID NO: 9021 - DNA, 20 bp, synthetic construct
  misc_feature 1..20: note = Description of Artificial Sequence: Synthetic oligonucleotide
  source 1..20: mol_type = other DNA
gggaggtagagtacgtgtgc

SEQ ID NO: 9022 - DNA, 20 bp, synthetic construct
  misc_feature 1..20: note = Description of Artificial Sequence: Synthetic oligonucleotide
  source 1..20: mol_type = other DNA
ggaggtagagtacgtgtgcc

SEQ ID NO: 9023 - DNA, 20 bp, synthetic construct
  misc_feature 1..20: note = Description of Artificial Sequence: Synthetic oligonucleotide
  source 1..20: mol_type = other DNA
gaggtagagtacgtgtgcct

SEQ ID NO: 9024 - DNA, 20 bp, synthetic construct
  misc_feature 1..20: note = Description of Artificial Sequence: Synthetic oligonucleotide
  source 1..20: mol_type = other DNA
aggtagagtacgtgtgcctt

SEQ ID NO: 9025 - DNA, 20 bp, synthetic construct
  misc_feature 1..20: note = Description of Artificial Sequence: Synthetic oligonucleotide
  source 1..20: mol_type = other DNA
ggtagagtacgtgtgccttc

SEQ ID NO: 9026 - DNA, 20 bp, synthetic construct
  misc_feature 1..20: note = Description of Artificial Sequence: Synthetic oligonucleotide
  source 1..20: mol_type = other DNA
gtagagtacgtgtgccttcg

SEQ ID NO: 9027 - DNA, 20 bp, synthetic construct
  misc_feature 1..20: note = Description of Artificial Sequence: Synthetic oligonucleotide
  source 1..20: mol_type = other DNA
tagagtacgtgtgccttcgc

SEQ ID NO: 9028 - DNA, 20 bp, synthetic construct
  misc_feature 1..20: note = Description of Artificial Sequence: Synthetic oligonucleotide
  source 1..20: mol_type = other DNA
agagtacgtgtgccttcgcc

SEQ ID NO: 9029 - DNA, 20 bp, synthetic construct
  misc_feature 1..20: note = Description of Artificial Sequence: Synthetic oligonucleotide
  source 1..20: mol_type = other DNA
gagtacgtgtgccttcgcca

SEQ ID NO: 9030 - DNA, 20 bp, synthetic construct
  misc_feature 1..20: note = Description of Artificial Sequence: Synthetic oligonucleotide
  source 1..20: mol_type = other DNA
agtacgtgtgccttcgccat

SEQ ID NO: 9031 - DNA, 20 bp, synthetic construct
  misc_feature 1..20: note = Description of Artificial Sequence: Synthetic oligonucleotide
  source 1..20: mol_type = other DNA
gtacgtgtgccttcgccatc

SEQ ID NO: 9032 - DNA, 20 bp, synthetic construct
  misc_feature 1..20: note = Description of Artificial Sequence: Synthetic oligonucleotide
  source 1..20: mol_type = other DNA
tacgtgtgccttcgccatca

SEQ ID NO: 9033 - DNA, 20 bp, synthetic construct
  misc_feature 1..20: note = Description of Artificial Sequence: Synthetic oligonucleotide
  source 1..20: mol_type = other DNA
acgtgtgccttcgccatcac

SEQ ID NO: 9034 - DNA, 20 bp, synthetic construct
  misc_feature 1..20: note = Description of Artificial Sequence: Synthetic oligonucleotide
  source 1..20: mol_type = other DNA
cgtgtgccttcgccatcact

SEQ ID NO: 9035 - DNA, 20 bp, synthetic construct
  misc_feature 1..20: note = Description of Artificial Sequence: Synthetic oligonucleotide
  source 1..20: mol_type = other DNA
gtgtgccttcgccatcacta

SEQ ID NO: 9036 - DNA, 20 bp, synthetic construct
  misc_feature 1..20: note = Description of Artificial Sequence: Synthetic oligonucleotide
  source 1..20: mol_type = other DNA
tgtgccttcgccatcactat

SEQ ID NO: 9037 - DNA, 20 bp, synthetic construct
  misc_feature 1..20: note = Description of Artificial Sequence: Synthetic oligonucleotide
  source 1..20: mol_type = other DNA
gtgccttcgccatcactatt

SEQ ID NO: 9038 - DNA, 20 bp, synthetic construct
  misc_feature 1..20: note = Description of Artificial Sequence: Synthetic oligonucleotide
  source 1..20: mol_type = other DNA
tgccttcgccatcactattc

SEQ ID NO: 9039 - DNA, 20 bp, synthetic construct
  misc_feature 1..20: note = Description of Artificial Sequence: Synthetic oligonucleotide
  source 1..20: mol_type = other DNA
gccttcgccatcactattct

SEQ ID NO: 9040 - DNA, 20 bp, synthetic construct
  misc_feature 1..20: note = Description of Artificial Sequence: Synthetic oligonucleotide
  source 1..20: mol_type = other DNA
ccttcgccatcactattctt

SEQ ID NO: 9041 - DNA, 20 bp, synthetic construct
  misc_feature 1..20: note = Description of Artificial Sequence: Synthetic oligonucleotide
  source 1..20: mol_type = other DNA
cttcgccatcactattcttc

SEQ ID NO: 9042 - DNA, 20 bp, synthetic construct
  misc_feature 1..20: note = Description of Artificial Sequence: Synthetic oligonucleotide
  source 1..20: mol_type = other DNA
ttcgccatcactattcttca

SEQ ID NO: 9043 - DNA, 20 bp, synthetic construct
  misc_feature 1..20: note = Description of Artificial Sequence: Synthetic oligonucleotide
  source 1..20: mol_type = other DNA
tcgccatcactattcttcat

SEQ ID NO: 9044 - DNA, 20 bp, synthetic construct
  misc_feature 1..20: note = Description of Artificial Sequence: Synthetic oligonucleotide
  source 1..20: mol_type = other DNA
cgccatcactattcttcatt

SEQ ID NO: 9045 - DNA, 20 bp, synthetic construct
  misc_feature 1..20: note = Description of Artificial Sequence: Synthetic oligonucleotide
  source 1..20: mol_type = other DNA
gccatcactattcttcattt

SEQ ID NO: 9046 - DNA, 20 bp, synthetic construct
  misc_feature 1..20: note = Description of Artificial Sequence: Synthetic oligonucleotide
  source 1..20: mol_type = other DNA
ccatcactattcttcatttc

SEQ ID NO: 9047 - DNA, 20 bp, synthetic construct
  misc_feature 1..20: note = Description of Artificial Sequence: Synthetic oligonucleotide
  source 1..20: mol_type = other DNA
catcactattcttcatttcg

SEQ ID NO: 9048 - DNA, 20 bp, synthetic construct
  misc_feature 1..20: note = Description of Artificial Sequence: Synthetic oligonucleotide
  source 1..20: mol_type = other DNA
atcactattcttcatttcgt

SEQ ID NO: 9049 - DNA, 20 bp, synthetic construct
  misc_feature 1..20: note = Description of Artificial Sequence: Synthetic oligonucleotide
  source 1..20: mol_type = other DNA
tcactattcttcatttcgtc

SEQ ID NO: 9050 - DNA, 20 bp, synthetic construct
  misc_feature 1..20: note = Description of Artificial Sequence: Synthetic oligonucleotide
  source 1..20: mol_type = other DNA
cactattcttcatttcgtct

SEQ ID NO: 9051 - DNA, 20 bp, synthetic construct
  misc_feature 1..20: note = Description of Artificial Sequence: Synthetic oligonucleotide
  source 1..20: mol_type = other DNA
actattcttcatttcgtctt

SEQ ID NO: 9052 - DNA, 20 bp, synthetic construct
  misc_feature 1..20: note = Description of Artificial Sequence: Synthetic oligonucleotide
  source 1..20: mol_type = other DNA
ctattcttcatttcgtctta

SEQ ID NO: 9053 - DNA, 20 bp, synthetic construct
  misc_feature 1..20: note = Description of Artificial Sequence: Synthetic oligonucleotide
  source 1..20: mol_type = other DNA
tattcttcatttcgtcttag

SEQ ID NO: 9054 - DNA, 20 bp, synthetic construct
  misc_feature 1..20: note = Description of Artificial Sequence: Synthetic oligonucleotide
  source 1..20: mol_type = other DNA
attcttcatttcgtcttagt

SEQ ID NO: 9055 - DNA, 20 bp, synthetic construct
  misc_feature 1..20: note = Description of Artificial Sequence: Synthetic oligonucleotide
  source 1..20: mol_type = other DNA
ttcttcatttcgtcttagtg

SEQ ID NO: 9056 - DNA, 20 bp, synthetic construct
  misc_feature 1..20: note = Description of Artificial Sequence: Synthetic oligonucleotide
  source 1..20: mol_type = other DNA
tcttcatttcgtcttagtgg

SEQ ID NO: 9057 - DNA, 20 bp, synthetic construct
  misc_feature 1..20: note = Description of Artificial Sequence: Synthetic oligonucleotide
  source 1..20: mol_type = other DNA
cttcatttcgtcttagtggt

SEQ ID NO: 9058 - DNA, 20 bp, synthetic construct
  misc_feature 1..20: note = Description of Artificial Sequence: Synthetic oligonucleotide
  source 1..20: mol_type = other DNA
ttcatttcgtcttagtggtg

SEQ ID NO: 9059 - DNA, 20 bp, synthetic construct
  misc_feature 1..20: note = Description of Artificial Sequence: Synthetic oligonucleotide
  source 1..20: mol_type = other DNA
tcatttcgtcttagtggtga

SEQ ID NO: 9060 - DNA, 20 bp, synthetic construct
  misc_feature 1..20: note = Description of Artificial Sequence: Synthetic oligonucleotide
  source 1..20: mol_type = other DNA
catttcgtcttagtggtgaa

SEQ ID NO: 9061 - DNA, 20 bp, synthetic construct
  misc_feature 1..20: note = Description of Artificial Sequence: Synthetic oligonucleotide
  source 1..20: mol_type = other DNA
atttcgtcttagtggtgaaa

SEQ ID NO: 9062 - DNA, 20 bp, synthetic construct
  misc_feature 1..20: note = Description of Artificial Sequence: Synthetic oligonucleotide
  source 1..20: mol_type = other DNA
tttcgtcttagtggtgaaag

SEQ ID NO: 9063 - DNA, 20 bp, synthetic construct
  misc_feature 1..20: note = Description of Artificial Sequence: Synthetic oligonucleotide
  source 1..20: mol_type = other DNA
ttcgtcttagtggtgaaagc

SEQ ID NO: 9064 - DNA, 20 bp, synthetic construct
  misc_feature 1..20: note = Description of Artificial Sequence: Synthetic oligonucleotide
  source 1..20: mol_type = other DNA
tcgtcttagtggtgaaagca

SEQ ID NO: 9065 - DNA, 20 bp, synthetic construct
  misc_feature 1..20: note = Description of Artificial Sequence: Synthetic oligonucleotide
  source 1..20: mol_type = other DNA
cgtcttagtggtgaaagcac

SEQ ID NO: 9066 - DNA, 20 bp, synthetic construct
  misc_feature 1..20: note = Description of Artificial Sequence: Synthetic oligonucleotide
  source 1..20: mol_type = other DNA
gtcttagtggtgaaagcacc

SEQ ID NO: 9067 - DNA, 20 bp, synthetic construct
  misc_feature 1..20: note = Description of Artificial Sequence: Synthetic oligonucleotide
  source 1..20: mol_type = other DNA
tcttagtggtgaaagcacca

SEQ ID NO: 9068 - DNA, 20 bp, synthetic construct
  misc_feature 1..20: note = Description of Artificial Sequence: Synthetic oligonucleotide
  source 1..20: mol_type = other DNA
cttagtggtgaaagcaccaa

SEQ ID NO: 9069 - DNA, 20 bp, synthetic construct
  misc_feature 1..20: note = Description of Artificial Sequence: Synthetic oligonucleotide
  source 1..20: mol_type = other DNA
ttagtggtgaaagcaccaac

SEQ ID NO: 9070 - DNA, 20 bp, synthetic construct
  misc_feature 1..20: note = Description of Artificial Sequence: Synthetic oligonucleotide
  source 1..20: mol_type = other DNA
tagtggtgaaagcaccaact

SEQ ID NO: 9071 - DNA, 20 bp, synthetic construct
  misc_feature 1..20: note = Description of Artificial Sequence: Synthetic oligonucleotide
  source 1..20: mol_type = other DNA
agtggtgaaagcaccaactt

SEQ ID NO: 9072 - DNA, 20 bp, synthetic construct
  misc_feature 1..20: note = Description of Artificial Sequence: Synthetic oligonucleotide
  source 1..20: mol_type = other DNA
gtggtgaaagcaccaactta

SEQ ID NO: 9073 - DNA, 20 bp, synthetic construct
  misc_feature 1..20: note = Description of Artificial Sequence: Synthetic oligonucleotide
  source 1..20: mol_type = other DNA
tggtgaaagcaccaacttac

SEQ ID NO: 9074 - DNA, 20 bp, synthetic construct
  misc_feature 1..20: note = Description of Artificial Sequence: Synthetic oligonucleotide
  source 1..20: mol_type = other DNA
ggtgaaagcaccaacttact

SEQ ID NO: 9075 - DNA, 20 bp, synthetic construct
  misc_feature 1..20: note = Description of Artificial Sequence: Synthetic oligonucleotide
  source 1..20: mol_type = other DNA
gtgaaagcaccaacttactg

SEQ ID NO: 9076 - DNA, 20 bp, synthetic construct
  misc_feature 1..20: note = Description of Artificial Sequence: Synthetic oligonucleotide
  source 1..20: mol_type = other DNA
tgaaagcaccaacttactgc

SEQ ID NO: 9077 - DNA, 20 bp, synthetic construct
  misc_feature 1..20: note = Description of Artificial Sequence: Synthetic oligonucleotide
  source 1..20: mol_type = other DNA
gaaagcaccaacttactgct

SEQ ID NO: 9078 - DNA, 20 bp, synthetic construct
  misc_feature 1..20: note = Description of Artificial Sequence: Synthetic oligonucleotide
  source 1..20: mol_type = other DNA
aaagcaccaacttactgctt

SEQ ID NO: 9079 - DNA, 20 bp, synthetic construct
  misc_feature 1..20: note = Description of Artificial Sequence: Synthetic oligonucleotide
  source 1..20: mol_type = other DNA
aagcaccaacttactgcttc

SEQ ID NO: 9080 - DNA, 20 bp, synthetic construct
  misc_feature 1..20: note = Description of Artificial Sequence: Synthetic oligonucleotide
  source 1..20: mol_type = other DNA
agcaccaacttactgcttcc

SEQ ID NO: 9081 - DNA, 20 bp, synthetic construct
  misc_feature 1..20: note = Description of Artificial Sequence: Synthetic oligonucleotide
  source 1..20: mol_type = other DNA
gcaccaacttactgcttcct

SEQ ID NO: 9082 - DNA, 20 bp, synthetic construct
  misc_feature 1..20: note = Description of Artificial Sequence: Synthetic oligonucleotide
  source 1..20: mol_type = other DNA
caccaacttactgcttcctc

SEQ ID NO: 9083 - DNA, 20 bp, synthetic construct
  misc_feature 1..20: note = Description of Artificial Sequence: Synthetic oligonucleotide
  source 1..20: mol_type = other DNA
accaacttactgcttcctct

SEQ ID NO: 9084 - DNA, 20 bp, synthetic construct
  misc_feature 1..20: note = Description of Artificial Sequence: Synthetic oligonucleotide
  source 1..20: mol_type = other DNA
ccaacttactgcttcctcta

SEQ ID NO: 9085 - DNA, 20 bp, synthetic construct
  misc_feature 1..20: note = Description of Artificial Sequence: Synthetic oligonucleotide
  source 1..20: mol_type = other DNA
caacttactgcttcctctaa

SEQ ID NO: 9086 - DNA, 20 bp, synthetic construct
  misc_feature 1..20: note = Description of Artificial Sequence: Synthetic oligonucleotide
  source 1..20: mol_type = other DNA
aacttactgcttcctctaag

SEQ ID NO: 9087 - DNA, 20 bp, synthetic construct
  misc_feature 1..20: note = Description of Artificial Sequence: Synthetic oligonucleotide
  source 1..20: mol_type = other DNA
acttactgcttcctctaagg

SEQ ID NO: 9088 - DNA, 20 bp, synthetic construct
  misc_feature 1..20: note = Description of Artificial Sequence: Synthetic oligonucleotide
  source 1..20: mol_type = other DNA
cttactgcttcctctaaggg

SEQ ID NO: 9089 - DNA, 20 bp, synthetic construct
  misc_feature 1..20: note = Description of Artificial Sequence: Synthetic oligonucleotide
  source 1..20: mol_type = other DNA
ttactgcttcctctaaggga

SEQ ID NO: 9090 - DNA, 20 bp, synthetic construct
  misc_feature 1..20: note = Description of Artificial Sequence: Synthetic oligonucleotide
  source 1..20: mol_type = other DNA
tactgcttcctctaagggac

SEQ ID NO: 9091 - DNA, 20 bp, synthetic construct
  misc_feature 1..20: note = Description of Artificial Sequence: Synthetic oligonucleotide
  source 1..20: mol_type = other DNA
actgcttcctctaagggact

SEQ ID NO: 9092 - DNA, 20 bp, synthetic construct
  misc_feature 1..20: note = Description of Artificial Sequence: Synthetic oligonucleotide
  source 1..20: mol_type = other DNA
ctgcttcctctaagggacta

SEQ ID NO: 9093 - DNA, 20 bp, synthetic construct
  misc_feature 1..20: note = Description of Artificial Sequence: Synthetic oligonucleotide
  source 1..20: mol_type = other DNA
tgcttcctctaagggactac

SEQ ID NO: 9094 - DNA, 20 bp, synthetic construct
  misc_feature 1..20: note = Description of Artificial Sequence: Synthetic oligonucleotide
  source 1..20: mol_type = other DNA
gcttcctctaagggactacc

SEQ ID NO: 9095 - DNA, 20 bp, synthetic construct
  misc_feature 1..20: note = Description of Artificial Sequence: Synthetic oligonucleotide
  source 1..20: mol_type = other DNA
cttcctctaagggactacct

SEQ ID NO: 9096 - DNA, 20 bp, synthetic construct
  misc_feature 1..20: note = Description of Artificial Sequence: Synthetic oligonucleotide
  source 1..20: mol_type = other DNA
ttcctctaagggactaccta

SEQ ID NO: 9097 - DNA, 20 bp, synthetic construct
  misc_feature 1..20: note = Description of Artificial Sequence: Synthetic oligonucleotide
  source 1..20: mol_type = other DNA
tcctctaagggactacctac

SEQ ID NO: 9098 - DNA, 20 bp, synthetic construct
  misc_feature 1..20: note = Description of Artificial Sequence: Synthetic oligonucleotide
  source 1..20: mol_type = other DNA
cctctaagggactacctact

SEQ ID NO: 9099 - DNA, 20 bp, synthetic construct
  misc_feature 1..20: note = Description of Artificial Sequence: Synthetic oligonucleotide
  source 1..20: mol_type = other DNA
ctctaagggactacctactt

SEQ ID NO: 9100 - DNA, 20 bp, synthetic construct
  misc_feature 1..20: note = Description of Artificial Sequence: Synthetic oligonucleotide
  source 1..20: mol_type = other DNA
tctaagggactacctactta

SEQ ID NO: 9101 - DNA, 20 bp, synthetic construct
  misc_feature 1..20: note = Description of Artificial Sequence: Synthetic oligonucleotide
  source 1..20: mol_type = other DNA
ctaagggactacctacttat

SEQ ID NO: 9102 - DNA, 20 bp, synthetic construct
  misc_feature 1..20: note = Description of Artificial Sequence: Synthetic oligonucleotide
  source 1..20: mol_type = other DNA
taagggactacctacttata

SEQ ID NO: 9103 - DNA, 20 bp, synthetic construct
  misc_feature 1..20: note = Description of Artificial Sequence: Synthetic oligonucleotide
  source 1..20: mol_type = other DNA
aagggactacctacttatag

SEQ ID NO: 9104 - DNA, 20 bp, synthetic construct
  misc_feature 1..20: note = Description of Artificial Sequence: Synthetic oligonucleotide
  source 1..20: mol_type = other DNA
agggactacctacttataga

SEQ ID NO: 9105 - DNA, 20 bp, synthetic construct
  misc_feature 1..20: note = Description of Artificial Sequence: Synthetic oligonucleotide
  source 1..20: mol_type = other DNA
gggactacctacttatagaa

SEQ ID NO: 9106 - DNA, 20 bp, synthetic construct
  misc_feature 1..20: note = Description of Artificial Sequence: Synthetic oligonucleotide
  source 1..20: mol_type = other DNA
ggactacctacttatagaat

SEQ ID NO: 9107 - DNA, 20 bp, synthetic construct
  misc_feature 1..20: note = Description of Artificial Sequence: Synthetic oligonucleotide
  source 1..20: mol_type = other DNA
gactacctacttatagaata

SEQ ID NO: 9108 - DNA, 20 bp, synthetic construct
  misc_feature 1..20: note = Description of Artificial Sequence: Synthetic oligonucleotide
  source 1..20: mol_type = other DNA
actacctacttatagaatat

SEQ ID NO: 9109 - DNA, 20 bp, synthetic construct
  misc_feature 1..20: note = Description of Artificial Sequence: Synthetic oligonucleotide
  source 1..20: mol_type = other DNA
ctacctacttatagaatata

SEQ ID NO: 9110 - DNA, 20 bp, synthetic construct
  misc_feature 1..20: note = Description of Artificial Sequence: Synthetic oligonucleotide
  source 1..20: mol_type = other DNA
tacctacttatagaatataa

SEQ ID NO: 9111 - DNA, 20 bp, synthetic construct
  misc_feature 1..20: note = Description of Artificial Sequence: Synthetic oligonucleotide
  source 1..20: mol_type = other DNA
acctacttatagaatataag

SEQ ID NO: 9112 - DNA, 20 bp, synthetic construct
  misc_feature 1..20: note = Description of Artificial Sequence: Synthetic oligonucleotide
  source 1..20: mol_type = other DNA
cctacttatagaatataagg

SEQ ID NO: 9113 - DNA, 20 bp, synthetic construct
  misc_feature 1..20: note = Description of Artificial Sequence: Synthetic oligonucleotide
  source 1..20: mol_type = other DNA
ctacttatagaatataaggg

SEQ ID NO: 9114 - DNA, 20 bp, synthetic construct
  misc_feature 1..20: note = Description of Artificial Sequence: Synthetic oligonucleotide
  source 1..20: mol_type = other DNA
tacttatagaatataagggt

SEQ ID NO: 9115 - DNA, 20 bp, synthetic construct
  misc_feature 1..20: note = Description of Artificial Sequence: Synthetic oligonucleotide
  source 1..20: mol_type = other DNA
acttatagaatataagggta

SEQ ID NO: 9116 - DNA, 20 bp, synthetic construct
  misc_feature 1..20: note = Description of Artificial Sequence: Synthetic oligonucleotide
  source 1..20: mol_type = other DNA
cttatagaatataagggtaa

SEQ ID NO: 9117 - DNA, 20 bp, synthetic construct
  misc_feature 1..20: note = Description of Artificial Sequence: Synthetic oligonucleotide
  source 1..20: mol_type = other DNA
ttatagaatataagggtaac

SEQ ID NO: 9118 - DNA, 20 bp, synthetic construct
  misc_feature 1..20: note = Description of Artificial Sequence: Synthetic oligonucleotide
  source 1..20: mol_type = other DNA
tatagaatataagggtaact

SEQ ID NO: 9119 - DNA, 20 bp, synthetic construct
  misc_feature 1..20: note = Description of Artificial Sequence: Synthetic oligonucleotide
  source 1..20: mol_type = other DNA
atagaatataagggtaactg

SEQ ID NO: 9120 - DNA, 20 bp, synthetic construct
  misc_feature 1..20: note = Description of Artificial Sequence: Synthetic oligonucleotide
  source 1..20: mol_type = other DNA
tagaatataagggtaactga

SEQ ID NO: 9121 - DNA, 20 bp, synthetic construct
  misc_feature 1..20: note = Description of Artificial Sequence: Synthetic oligonucleotide
  source 1..20: mol_type = other DNA
agaatataagggtaactgag

SEQ ID NO: 9122 - DNA, 20 bp, synthetic construct
  misc_feature 1..20: note = Description of Artificial Sequence: Synthetic oligonucleotide
  source 1..20: mol_type = other DNA
gaatataagggtaactgagc

SEQ ID NO: 9123 - DNA, 20 bp, synthetic construct
  misc_feature 1..20: note = Description of Artificial Sequence: Synthetic oligonucleotide
  source 1..20: mol_type = other DNA
aatataagggtaactgagca

SEQ ID NO: 9124 - DNA, 20 bp, synthetic construct
  misc_feature 1..20: note = Description of Artificial Sequence: Synthetic oligonucleotide
  source 1..20: mol_type = other DNA
atataagggtaactgagcac

SEQ ID NO: 9125 - DNA, 20 bp, synthetic construct
  misc_feature 1..20: note = Description of Artificial Sequence: Synthetic oligonucleotide
  source 1..20: mol_type = other DNA
tataagggtaactgagcact

SEQ ID NO: 9126 - DNA, 20 bp, synthetic construct
  misc_feature 1..20: note = Description of Artificial Sequence: Synthetic oligonucleotide
  source 1..20: mol_type = other DNA
ataagggtaactgagcactt

SEQ ID NO: 9127 - DNA, 20 bp, synthetic construct
  misc_feature 1..20: note = Description of Artificial Sequence: Synthetic oligonucleotide
  source 1..20: mol_type = other DNA
taagggtaactgagcacttg

SEQ ID NO: 9128 - DNA, 20 bp, synthetic construct
  misc_feature 1..20: note = Description of Artificial Sequence: Synthetic oligonucleotide
  source 1..20: mol_type = other DNA
aagggtaactgagcacttgg

SEQ ID NO: 9129 - DNA, 20 bp, synthetic construct
  misc_feature 1..20: note = Description of Artificial Sequence: Synthetic oligonucleotide
  source 1..20: mol_type = other DNA
agggtaactgagcacttggt

SEQ ID NO: 9130 - DNA, 20 bp, synthetic construct
  misc_feature 1..20: note = Description of Artificial Sequence: Synthetic oligonucleotide
  source 1..20: mol_type = other DNA
gggtaactgagcacttggtc

SEQ ID NO: 9131 - DNA, 20 bp, synthetic construct
  misc_feature 1..20: note = Description of Artificial Sequence: Synthetic oligonucleotide
  source 1..20: mol_type = other DNA
ggtaactgagcacttggtca

SEQ ID NO: 9132 - DNA, 20 bp, synthetic construct
  misc_feature 1..20: note = Description of Artificial Sequence: Synthetic oligonucleotide
  source 1..20: mol_type = other DNA
gtaactgagcacttggtcat

SEQ ID NO: 9133 - DNA, 20 bp, synthetic construct
  misc_feature 1..20: note = Description of Artificial Sequence: Synthetic oligonucleotide
  source 1..20: mol_type = other DNA
taactgagcacttggtcata

SEQ ID NO: 9134 - DNA, 20 bp, synthetic construct
  misc_feature 1..20: note = Description of Artificial Sequence: Synthetic oligonucleotide
  source 1..20: mol_type = other DNA
aactgagcacttggtcatag

SEQ ID NO: 9135 - DNA, 20 bp, synthetic construct
  misc_feature 1..20: note = Description of Artificial Sequence: Synthetic oligonucleotide
  source 1..20: mol_type = other DNA
actgagcacttggtcataga

SEQ ID NO: 9136 - DNA, 20 bp, synthetic construct
  misc_feature 1..20: note = Description of Artificial Sequence: Synthetic oligonucleotide
  source 1..20: mol_type = other DNA
ctgagcacttggtcatagag

SEQ ID NO: 9137 - DNA, 20 bp, synthetic construct
  misc_feature 1..20: note = Description of Artificial Sequence: Synthetic oligonucleotide
  source 1..20: mol_type = other DNA
tgagcacttggtcatagaga

SEQ ID NO: 9138 - DNA, 20 bp, synthetic construct
  misc_feature 1..20: note = Description of Artificial Sequence: Synthetic oligonucleotide
  source 1..20: mol_type = other DNA
gagcacttggtcatagagaa

SEQ ID NO: 9139 - DNA, 20 bp, synthetic construct
  misc_feature 1..20: note = Description of Artificial Sequence: Synthetic oligonucleotide
  source 1..20: mol_type = other DNA
agcacttggtcatagagaag

SEQ ID NO: 9140 - DNA, 20 bp, synthetic construct
  misc_feature 1..20: note = Description of Artificial Sequence: Synthetic oligonucleotide
  source 1..20: mol_type = other DNA
gcacttggtcatagagaaga

SEQ ID NO: 9141 - DNA, 20 bp, synthetic construct
  misc_feature 1..20: note = Description of Artificial Sequence: Synthetic oligonucleotide
  source 1..20: mol_type = other DNA
cacttggtcatagagaagaa

SEQ ID NO: 9142 - DNA, 20 bp, synthetic construct
  misc_feature 1..20: note = Description of Artificial Sequence: Synthetic oligonucleotide
  source 1..20: mol_type = other DNA
acttggtcatagagaagaaa

SEQ ID NO: 9143 - DNA, 20 bp, synthetic construct
  misc_feature 1..20: note = Description of Artificial Sequence: Synthetic oligonucleotide
  source 1..20: mol_type = other DNA
cttggtcatagagaagaaaa

SEQ ID NO: 9144 - DNA, 20 bp, synthetic construct
  misc_feature 1..20: note = Description of Artificial Sequence: Synthetic oligonucleotide
  source 1..20: mol_type = other DNA
ttggtcatagagaagaaaaa

SEQ ID NO: 9145 - DNA, 20 bp, synthetic construct
  misc_feature 1..20: note = Description of Artificial Sequence: Synthetic oligonucleotide
  source 1..20: mol_type = other DNA
tggtcatagagaagaaaaat

SEQ ID NO: 9146 - DNA, 20 bp, synthetic construct
  misc_feature 1..20: note = Description of Artificial Sequence: Synthetic oligonucleotide
  source 1..20: mol_type = other DNA
ggtcatagagaagaaaaata

SEQ ID NO: 9147 - DNA, 20 bp, synthetic construct
  misc_feature 1..20: note = Description of Artificial Sequence: Synthetic oligonucleotide
  source 1..20: mol_type = other DNA
gtcatagagaagaaaaataa

SEQ ID NO: 9148 - DNA, 20 bp, synthetic construct
  misc_feature 1..20: note = Description of Artificial Sequence: Synthetic oligonucleotide
  source 1..20: mol_type = other DNA
tcatagagaagaaaaataag

SEQ ID NO: 9149 - DNA, 20 bp, synthetic construct
  misc_feature 1..20: note = Description of Artificial Sequence: Synthetic oligonucleotide
  source 1..20: mol_type = other DNA
catagagaagaaaaataagg

SEQ ID NO: 9150 - DNA, 20 bp, synthetic construct
  misc_feature 1..20: note = Description of Artificial Sequence: Synthetic oligonucleotide
  source 1..20: mol_type = other DNA
atagagaagaaaaataagga

SEQ ID NO: 9151 - DNA, 20 bp, synthetic construct
  misc_feature 1..20: note = Description of Artificial Sequence: Synthetic oligonucleotide
  source 1..20: mol_type = other DNA
tagagaagaaaaataaggaa

SEQ ID NO: 9152 - DNA, 20 bp, synthetic construct
  misc_feature 1..20: note = Description of Artificial Sequence: Synthetic oligonucleotide
  source 1..20: mol_type = other DNA
agagaagaaaaataaggaat

SEQ ID NO: 9153 - DNA, 20 bp, synthetic construct
  misc_feature 1..20: note = Description of Artificial Sequence: Synthetic oligonucleotide
  source 1..20: mol_type = other DNA
gagaagaaaaataaggaatg

SEQ ID NO: 9154 - DNA, 20 bp, synthetic construct
  misc_feature 1..20: note = Description of Artificial Sequence: Synthetic oligonucleotide
  source 1..20: mol_type = other DNA
agaagaaaaataaggaatga

SEQ ID NO: 9155 - DNA, 20 bp, synthetic construct
  misc_feature 1..20: note = Description of Artificial Sequence: Synthetic oligonucleotide
  source 1..20: mol_type = other DNA
gaagaaaaataaggaatgat

SEQ ID NO: 9156 - DNA, 20 bp, synthetic construct
  misc_feature 1..20: note = Description of Artificial Sequence: Synthetic oligonucleotide
  source 1..20: mol_type = other DNA
aagaaaaataaggaatgatg

SEQ ID NO: 9157 - DNA, 20 bp, synthetic construct
  misc_feature 1..20: note = Description of Artificial Sequence: Synthetic oligonucleotide
  source 1..20: mol_type = other DNA
agaaaaataaggaatgatgt

SEQ ID NO: 9158 - DNA, 20 bp, synthetic construct
  misc_feature 1..20: note = Description of Artificial Sequence: Synthetic oligonucleotide
  source 1..20: mol_type = other DNA
gaaaaataaggaatgatgtc

SEQ ID NO: 9159 - DNA, 20 bp, synthetic construct
  misc_feature 1..20: note = Description of Artificial Sequence: Synthetic oligonucleotide
  source 1..20: mol_type = other DNA
aaaaataaggaatgatgtcc

SEQ ID NO: 9160 - DNA, 20 bp, synthetic construct
  misc_feature 1..20: note = Description of Artificial Sequence: Synthetic oligonucleotide
  source 1..20: mol_type = other DNA
aaaataaggaatgatgtcct

SEQ ID NO: 9161 - DNA, 20 bp, synthetic construct
  misc_feature 1..20: note = Description of Artificial Sequence: Synthetic oligonucleotide
  source 1..20: mol_type = other DNA
aaataaggaatgatgtcctg

SEQ ID NO: 9162 - DNA, 20 bp, synthetic construct
  misc_feature 1..20: note = Description of Artificial Sequence: Synthetic oligonucleotide
  source 1..20: mol_type = other DNA
aataaggaatgatgtcctgg

SEQ ID NO: 9163 - DNA, 20 bp, synthetic construct
  misc_feature 1..20: note = Description of Artificial Sequence: Synthetic oligonucleotide
  source 1..20: mol_type = other DNA
ataaggaatgatgtcctggg

SEQ ID NO: 9164 - DNA, 20 bp, synthetic construct
  misc_feature 1..20: note = Description of Artificial Sequence: Synthetic oligonucleotide
  source 1..20: mol_type = other DNA
taaggaatgatgtcctgggc

SEQ ID NO: 9165 - DNA, 20 bp, synthetic construct
  misc_feature 1..20: note = Description of Artificial Sequence: Synthetic oligonucleotide
  source 1..20: mol_type = other DNA
aaggaatgatgtcctgggca

SEQ ID NO: 9166 - DNA, 20 bp, synthetic construct
  misc_feature 1..20: note = Description of Artificial Sequence: Synthetic oligonucleotide
  source 1..20: mol_type = other DNA
aggaatgatgtcctgggcaa

SEQ ID NO: 9167 - DNA, 20 bp, synthetic construct
  misc_feature 1..20: note = Description of Artificial Sequence: Synthetic oligonucleotide
  source 1..20: mol_type = other DNA
ggaatgatgtcctgggcaag

SEQ ID NO: 9168 - DNA, 20 bp, synthetic construct
  misc_feature 1..20: note = Description of Artificial Sequence: Synthetic oligonucleotide
  source 1..20: mol_type = other DNA
gaatgatgtcctgggcaaga

SEQ ID NO: 9169 - DNA, 20 bp, synthetic construct
  misc_feature 1..20: note = Description of Artificial Sequence: Synthetic oligonucleotide
  source 1..20: mol_type = other DNA
aatgatgtcctgggcaagaa

SEQ ID NO: 9170 - DNA, 20 bp, synthetic construct
  misc_feature 1..20: note = Description of Artificial Sequence: Synthetic oligonucleotide
  source 1..20: mol_type = other DNA
atgatgtcctgggcaagaag

SEQ ID NO: 9171 - DNA, 20 bp, synthetic construct
  misc_feature 1..20: note = Description of Artificial Sequence: Synthetic oligonucleotide
  source 1..20: mol_type = other DNA
tgatgtcctgggcaagaaga

SEQ ID NO: 9172 - DNA, 20 bp, synthetic construct
  misc_feature 1..20: note = Description of Artificial Sequence: Synthetic oligonucleotide
  source 1..20: mol_type = other DNA
gatgtcctgggcaagaagag

SEQ ID NO: 9173 - DNA, 20 bp, synthetic construct
  misc_feature 1..20: note = Description of Artificial Sequence: Synthetic oligonucleotide
  source 1..20: mol_type = other DNA
atgtcctgggcaagaagagc

SEQ ID NO: 9174 - DNA, 20 bp, synthetic construct
  misc_feature 1..20: note = Description of Artificial Sequence: Synthetic oligonucleotide
  source 1..20: mol_type = other DNA
tgtcctgggcaagaagagca

SEQ ID NO: 9175 - DNA, 20 bp, synthetic construct
  misc_feature 1..20: note = Description of Artificial Sequence: Synthetic oligonucleotide
  source 1..20: mol_type = other DNA
gtcctgggcaagaagagcaa

SEQ ID NO: 9176 - DNA, 20 bp, synthetic construct
  misc_feature 1..20: note = Description of Artificial Sequence: Synthetic oligonucleotide
  source 1..20: mol_type = other DNA
tcctgggcaagaagagcaag

SEQ ID NO: 9177 - DNA, 20 bp, synthetic construct
  misc_feature 1..20: note = Description of Artificial Sequence: Synthetic oligonucleotide
  source 1..20: mol_type = other DNA
cctgggcaagaagagcaaga

SEQ ID NO: 9178 - DNA, 20 bp, synthetic construct
  misc_feature 1..20: note = Description of Artificial Sequence: Synthetic oligonucleotide
  source 1..20: mol_type = other DNA
ctgggcaagaagagcaagag

SEQ ID NO: 9179 - DNA, 20 bp, synthetic construct
  misc_feature 1..20: note = Description of Artificial Sequence: Synthetic oligonucleotide
  source 1..20: mol_type = other DNA
tgggcaagaagagcaagaga

SEQ ID NO: 9180 - DNA, 20 bp, synthetic construct
  misc_feature 1..20: note = Description of Artificial Sequence: Synthetic oligonucleotide
  source 1..20: mol_type = other DNA
gggcaagaagagcaagagac

SEQ ID NO: 9181 - DNA, 20 bp, synthetic construct
  misc_feature 1..20: note = Description of Artificial Sequence: Synthetic oligonucleotide
  source 1..20: mol_type = other DNA
ggcaagaagagcaagagacc

SEQ ID NO: 9182 - DNA, 20 bp, synthetic construct
  misc_feature 1..20: note = Description of Artificial Sequence: Synthetic oligonucleotide
  source 1..20: mol_type = other DNA
gcaagaagagcaagagacct

SEQ ID NO: 9183 - DNA, 20 bp, synthetic construct
  misc_feature 1..20: note = Description of Artificial Sequence: Synthetic oligonucleotide
  source 1..20: mol_type = other DNA
caagaagagcaagagacctg

SEQ ID NO: 9184 - DNA, 20 bp, synthetic construct
  misc_feature 1..20: note = Description of Artificial Sequence: Synthetic oligonucleotide
  source 1..20: mol_type = other DNA
aagaagagcaagagacctgg

SEQ ID NO: 9185 - DNA, 20 bp, synthetic construct
  misc_feature 1..20: note = Description of Artificial Sequence: Synthetic oligonucleotide
  source 1..20: mol_type = other DNA
agaagagcaagagacctggt

SEQ ID NO: 9186 - DNA, 20 bp, synthetic construct
  misc_feature 1..20: note = Description of Artificial Sequence: Synthetic oligonucleotide
  source 1..20: mol_type = other DNA
gaagagcaagagacctggtg

SEQ ID NO: 9187 - DNA, 20 bp, synthetic construct
  misc_feature 1..20: note = Description of Artificial Sequence: Synthetic oligonucleotide
  source 1..20: mol_type = other DNA
aagagcaagagacctggtgg

SEQ ID NO: 9188 - DNA, 20 bp, synthetic construct
  misc_feature 1..20: note = Description of Artificial Sequence: Synthetic oligonucleotide
  source 1..20: mol_type = other DNA
agagcaagagacctggtggg

SEQ ID NO: 9189 - DNA, 20 bp, synthetic construct
  misc_feature 1..20: note = Description of Artificial Sequence: Synthetic oligonucleotide
  source 1..20: mol_type = other DNA
gagcaagagacctggtggga

SEQ ID NO: 9190 - DNA, 20 bp, synthetic construct
  misc_feature 1..20: note = Description of Artificial Sequence: Synthetic oligonucleotide
  source 1..20: mol_type = other DNA
agcaagagacctggtgggag

SEQ ID NO: 9191 - DNA, 20 bp, synthetic construct
  misc_feature 1..20: note = Description of Artificial Sequence: Synthetic oligonucleotide
  source 1..20: mol_type = other DNA
gcaagagacctggtgggaga

SEQ ID NO: 9192 - DNA, 20 bp, synthetic construct
  misc_feature 1..20: note = Description of Artificial Sequence: Synthetic oligonucleotide
  source 1..20: mol_type = other DNA
caagagacctggtgggagag

SEQ ID NO: 9193 - DNA, 20 bp, synthetic construct
  misc_feature 1..20: note = Description of Artificial Sequence: Synthetic oligonucleotide
  source 1..20: mol_type = other DNA
aagagacctggtgggagagc

SEQ ID NO: 9194 - DNA, 20 bp, synthetic construct
  misc_feature 1..20: note = Description of Artificial Sequence: Synthetic oligonucleotide
  source 1..20: mol_type = other DNA
agagacctggtgggagagct

SEQ ID NO: 9195 - DNA, 20 bp, synthetic construct
  misc_feature 1..20: note = Description of Artificial Sequence: Synthetic oligonucleotide
  source 1..20: mol_type = other DNA
gagacctggtgggagagctg

SEQ ID NO: 9196 - DNA, 20 bp, synthetic construct
  misc_feature 1..20: note = Description of Artificial Sequence: Synthetic oligonucleotide
  source 1..20: mol_type = other DNA
agacctggtgggagagctgc

SEQ ID NO: 9197 - DNA, 20 bp, synthetic construct
  misc_feature 1..20: note = Description of Artificial Sequence: Synthetic oligonucleotide
  source 1..20: mol_type = other DNA
gacctggtgggagagctgca

SEQ ID NO: 9198 - DNA, 20 bp, synthetic construct
  misc_feature 1..20: note = Description of Artificial Sequence: Synthetic oligonucleotide
  source 1..20: mol_type = other DNA
acctggtgggagagctgcac

SEQ ID NO: 9199 - DNA, 20 bp, synthetic construct
  misc_feature 1..20: note = Description of Artificial Sequence: Synthetic oligonucleotide
  source 1..20: mol_type = other DNA
cctggtgggagagctgcact

SEQ ID NO: 9200 - DNA, 20 bp, synthetic construct
  misc_feature 1..20: note = Description of Artificial Sequence: Synthetic oligonucleotide
  source 1..20: mol_type = other DNA
ctggtgggagagctgcactt

SEQ ID NO: 9201 - DNA, 20 bp, synthetic construct
  misc_feature 1..20: note = Description of Artificial Sequence: Synthetic oligonucleotide
  source 1..20: mol_type = other DNA
tggtgggagagctgcacttg

SEQ ID NO: 9202 - DNA, 20 bp, synthetic construct
  misc_feature 1..20: note = Description of Artificial Sequence: Synthetic oligonucleotide
  source 1..20: mol_type = other DNA
ggtgggagagctgcacttga

SEQ ID NO: 9203 - DNA, 20 bp, synthetic construct
  misc_feature 1..20: note = Description of Artificial Sequence: Synthetic oligonucleotide
  source 1..20: mol_type = other DNA
gtgggagagctgcacttgac

SEQ ID NO: 9204 - DNA, 20 bp, synthetic construct
  misc_feature 1..20: note = Description of Artificial Sequence: Synthetic oligonucleotide
  source 1..20: mol_type = other DNA
tgggagagctgcacttgacc

SEQ ID NO: 9205 - DNA, 20 bp, synthetic construct
  misc_feature 1..20: note = Description of Artificial Sequence: Synthetic oligonucleotide
  source 1..20: mol_type = other DNA
gggagagctgcacttgaccc

SEQ ID NO: 9206 - DNA, 20 bp, synthetic construct
  misc_feature 1..20: note = Description of Artificial Sequence: Synthetic oligonucleotide
  source 1..20: mol_type = other DNA
ggagagctgcacttgacccc

SEQ ID NO: 9207 - DNA, 20 bp, synthetic construct
  misc_feature 1..20: note = Description of Artificial Sequence: Synthetic oligonucleotide
  source 1..20: mol_type = other DNA
gagagctgcacttgacccca

SEQ ID NO: 9208 - DNA, 20 bp, synthetic construct
  misc_feature 1..20: note = Description of Artificial Sequence: Synthetic oligonucleotide
  source 1..20: mol_type = other DNA
agagctgcacttgaccccaa

SEQ ID NO: 9209 - DNA, 20 bp, synthetic construct
  misc_feature 1..20: note = Description of Artificial Sequence: Synthetic oligonucleotide
  source 1..20: mol_type = other DNA
gagctgcacttgaccccaag

SEQ ID NO: 9210 - DNA, 20 bp, synthetic construct
  misc_feature 1..20: note = Description of Artificial Sequence: Synthetic oligonucleotide
  source 1..20: mol_type = other DNA
agctgcacttgaccccaaga

SEQ ID NO: 9211 - DNA, 20 bp, synthetic construct
  misc_feature 1..20: note = Description of Artificial Sequence: Synthetic oligonucleotide
  source 1..20: mol_type = other DNA
gctgcacttgaccccaagaa

SEQ ID NO: 9212 - DNA, 20 bp, synthetic construct
  misc_feature 1..20: note = Description of Artificial Sequence: Synthetic oligonucleotide
  source 1..20: mol_type = other DNA
ctgcacttgaccccaagaac

SEQ ID NO: 9213 - DNA, 20 bp, synthetic construct
  misc_feature 1..20: note = Description of Artificial Sequence: Synthetic oligonucleotide
  source 1..20: mol_type = other DNA
tgcacttgaccccaagaacc

SEQ ID NO: 9214 - DNA, 20 bp, synthetic construct
  misc_feature 1..20: note = Description of Artificial Sequence: Synthetic oligonucleotide
  source 1..20: mol_type = other DNA
gcacttgaccccaagaacct

SEQ ID NO: 9215 - DNA, 20 bp, synthetic construct
  misc_feature 1..20: note = Description of Artificial Sequence: Synthetic oligonucleotide
  source 1..20: mol_type = other DNA
cacttgaccccaagaacctc

SEQ ID NO: 9216 - DNA, 20 bp, synthetic construct
  misc_feature 1..20: note = Description of Artificial Sequence: Synthetic oligonucleotide
  source 1..20: mol_type = other DNA
acttgaccccaagaacctcc

SEQ ID NO: 9217 - DNA, 20 bp, synthetic construct
  misc_feature 1..20: note = Description of Artificial Sequence: Synthetic oligonucleotide
  source 1..20: mol_type = other DNA
cttgaccccaagaacctcct

SEQ ID NO: 9218 - DNA, 20 bp, synthetic construct
  misc_feature 1..20: note = Description of Artificial Sequence: Synthetic oligonucleotide
  source 1..20: mol_type = other DNA
ttgaccccaagaacctcctt

SEQ ID NO: 9219 - DNA, 20 bp, synthetic construct
  misc_feature 1..20: note = Description of Artificial Sequence: Synthetic oligonucleotide
  source 1..20: mol_type = other DNA
tgaccccaagaacctccttg

SEQ ID NO: 9220 - DNA, 20 bp, synthetic construct
  misc_feature 1..20: note = Description of Artificial Sequence: Synthetic oligonucleotide
  source 1..20: mol_type = other DNA
gaccccaagaacctccttgc

SEQ ID NO: 9221 - DNA, 20 bp, synthetic construct
  misc_feature 1..20: note = Description of Artificial Sequence: Synthetic oligonucleotide
  source 1..20: mol_type = other DNA
accccaagaacctccttgca

SEQ ID NO: 9222 - DNA, 20 bp, synthetic construct
  misc_feature 1..20: note = Description of Artificial Sequence: Synthetic oligonucleotide
  source 1..20: mol_type = other DNA
ccccaagaacctccttgcag

SEQ ID NO: 9223 - DNA, 20 bp, synthetic construct
  misc_feature 1..20: note = Description of Artificial Sequence: Synthetic oligonucleotide
  source 1..20: mol_type = other DNA
cccaagaacctccttgcagg

SEQ ID NO: 9224 - DNA, 20 bp, synthetic construct
  misc_feature 1..20: note = Description of Artificial Sequence: Synthetic oligonucleotide
  source 1..20: mol_type = other DNA
ccaagaacctccttgcagga

SEQ ID NO: 9225 - DNA, 20 bp, synthetic construct
  misc_feature 1..20: note = Description of Artificial Sequence: Synthetic oligonucleotide
  source 1..20: mol_type = other DNA
caagaacctccttgcaggat

SEQ ID NO: 9226 - DNA, 20 bp, synthetic construct
  misc_feature 1..20: note = Description of Artificial Sequence: Synthetic oligonucleotide
  source 1..20: mol_type = other DNA
aagaacctccttgcaggatg

SEQ ID NO: 9227 - DNA, 20 bp, synthetic construct
  misc_feature 1..20: note = Description of Artificial Sequence: Synthetic oligonucleotide
  source 1..20: mol_type = other DNA
agaacctccttgcaggatgg

SEQ ID NO: 9228 - DNA, 20 bp, synthetic construct
  misc_feature 1..20: note = Description of Artificial Sequence: Synthetic oligonucleotide
  source 1..20: mol_type = other DNA
gaacctccttgcaggatggt

SEQ ID NO: 9229 - DNA, 20 bp, synthetic construct
  misc_feature 1..20: note = Description of Artificial Sequence: Synthetic oligonucleotide
  source 1..20: mol_type = other DNA
aacctccttgcaggatggtg

SEQ ID NO: 9230 - DNA, 20 bp, synthetic construct
  misc_feature 1..20: note = Description of Artificial Sequence: Synthetic oligonucleotide
  source 1..20: mol_type = other DNA
acctccttgcaggatggtga

SEQ ID NO: 9231 - DNA, 20 bp, synthetic construct
  misc_feature 1..20: note = Description of Artificial Sequence: Synthetic oligonucleotide
  source 1..20: mol_type = other DNA
cctccttgcaggatggtgag

SEQ ID NO: 9232 - DNA, 20 bp, synthetic construct
  misc_feature 1..20: note = Description of Artificial Sequence: Synthetic oligonucleotide
  source 1..20: mol_type = other DNA
ctccttgcaggatggtgaga

SEQ ID NO: 9233 - DNA, 20 bp, synthetic construct
  misc_feature 1..20: note = Description of Artificial Sequence: Synthetic oligonucleotide
  source 1..20: mol_type = other DNA
tccttgcaggatggtgagaa

SEQ ID NO: 9234 - DNA, 20 bp, synthetic construct
  misc_feature 1..20: note = Description of Artificial Sequence: Synthetic oligonucleotide
  source 1..20: mol_type = other DNA
ccttgcaggatggtgagaaa

SEQ ID NO: 9235 - DNA, 20 bp, synthetic construct
  misc_feature 1..20: note = Description of Artificial Sequence: Synthetic oligonucleotide
  source 1..20: mol_type = other DNA
cttgcaggatggtgagaaag

SEQ ID NO: 9236 - DNA, 20 bp, synthetic construct
  misc_feature 1..20: note = Description of Artificial Sequence: Synthetic oligonucleotide
  source 1..20: mol_type = other DNA
ttgcaggatggtgagaaagc

SEQ ID NO: 9237 - DNA, 20 bp, synthetic construct
  misc_feature 1..20: note = Description of Artificial Sequence: Synthetic oligonucleotide
  source 1..20: mol_type = other DNA
tgcaggatggtgagaaagcc

SEQ ID NO: 9238 - DNA, 20 bp, synthetic construct
  misc_feature 1..20: note = Description of Artificial Sequence: Synthetic oligonucleotide
  source 1..20: mol_type = other DNA
gcaggatggtgagaaagcct

SEQ ID NO: 9239 - DNA, 20 bp, synthetic construct
  misc_feature 1..20: note = Description of Artificial Sequence: Synthetic oligonucleotide
  source 1..20: mol_type = other DNA
caggatggtgagaaagcctc

SEQ ID NO: 9240 - DNA, 20 bp, synthetic construct
  misc_feature 1..20: note = Description of Artificial Sequence: Synthetic oligonucleotide
  source 1..20: mol_type = other DNA
aggatggtgagaaagcctcc

SEQ ID NO: 9241 - DNA, 20 bp, synthetic construct
  misc_feature 1..20: note = Description of Artificial Sequence: Synthetic oligonucleotide
  source 1..20: mol_type = other DNA
ggatggtgagaaagcctcct

SEQ ID NO: 9242 - DNA, 20 bp, synthetic construct
  misc_feature 1..20: note = Description of Artificial Sequence: Synthetic oligonucleotide
  source 1..20: mol_type = other DNA
gatggtgagaaagcctcctg

SEQ ID NO: 9243 - DNA, 20 bp, synthetic construct
  misc_feature 1..20: note = Description of Artificial Sequence: Synthetic oligonucleotide
  source 1..20: mol_type = other DNA
atggtgagaaagcctcctgt

SEQ ID NO: 9244 - DNA, 20 bp, synthetic construct
  misc_feature 1..20: note = Description of Artificial Sequence: Synthetic oligonucleotide
  source 1..20: mol_type = other DNA
tggtgagaaagcctcctgtt

SEQ ID NO: 9245 - DNA, 20 bp, synthetic construct
  misc_feature 1..20: note = Description of Artificial Sequence: Synthetic oligonucleotide
  source 1..20: mol_type = other DNA
ggtgagaaagcctcctgttt

SEQ ID NO: 9246 - DNA, 20 bp, synthetic construct
  misc_feature 1..20: note = Description of Artificial Sequence: Synthetic oligonucleotide
  source 1..20: mol_type = other DNA
gtgagaaagcctcctgtttg

SEQ ID NO: 9247 - DNA, 20 bp, synthetic construct
  misc_feature 1..20: note = Description of Artificial Sequence: Synthetic oligonucleotide
  source 1..20: mol_type = other DNA
tgagaaagcctcctgtttgg

SEQ ID NO: 9248 - DNA, 20 bp, synthetic construct
  misc_feature 1..20: note = Description of Artificial Sequence: Synthetic oligonucleotide
  source 1..20: mol_type = other DNA
gagaaagcctcctgtttgga

SEQ ID NO: 9249 - DNA, 20 bp, synthetic construct
  misc_feature 1..20: note = Description of Artificial Sequence: Synthetic oligonucleotide
  source 1..20: mol_type = other DNA
agaaagcctcctgtttggat

SEQ ID NO: 9250 - DNA, 20 bp, synthetic construct
  misc_feature 1..20: note = Description of Artificial Sequence: Synthetic oligonucleotide
  source 1..20: mol_type = other DNA
gaaagcctcctgtttggatg

SEQ ID NO: 9251 - DNA, 20 bp, synthetic construct
  misc_feature 1..20: note = Description of Artificial Sequence: Synthetic oligonucleotide
  source 1..20: mol_type = other DNA
aaagcctcctgtttggatga

SEQ ID NO: 9252 - DNA, 20 bp, synthetic construct
  misc_feature 1..20: note = Description of Artificial Sequence: Synthetic oligonucleotide
  source 1..20: mol_type = other DNA
aagcctcctgtttggatgag

SEQ ID NO: 9253 - DNA, 20 bp, synthetic construct
  misc_feature 1..20: note = Description of Artificial Sequence: Synthetic oligonucleotide
  source 1..20: mol_type = other DNA
agcctcctgtttggatgagc

SEQ ID NO: 9254 - DNA, 20 bp, synthetic construct
  misc_feature 1..20: note = Description of Artificial Sequence: Synthetic oligonucleotide
  source 1..20: mol_type = other DNA
gcctcctgtttggatgagca

SEQ ID NO: 9255 - DNA, 20 bp, synthetic construct
  misc_feature 1..20: note = Description of Artificial Sequence: Synthetic oligonucleotide
  source 1..20: mol_type = other DNA
cctcctgtttggatgagcag

SEQ ID NO: 9256 - DNA, 20 bp, synthetic construct
  misc_feature 1..20: note = Description of Artificial Sequence: Synthetic oligonucleotide
  source 1..20: mol_type = other DNA
ctcctgtttggatgagcagg

SEQ ID NO: 9257 - DNA, 20 bp, synthetic construct
  misc_feature 1..20: note = Description of Artificial Sequence: Synthetic oligonucleotide
  source 1..20: mol_type = other DNA
tcctgtttggatgagcagga

SEQ ID NO: 9258 - DNA, 20 bp, synthetic construct
  misc_feature 1..20: note = Description of Artificial Sequence: Synthetic oligonucleotide
  source 1..20: mol_type = other DNA
cctgtttggatgagcaggaa

SEQ ID NO: 9259 - DNA, 20 bp, synthetic construct
  misc_feature 1..20: note = Description of Artificial Sequence: Synthetic oligonucleotide
  source 1..20: mol_type = other DNA
ctgtttggatgagcaggaag

SEQ ID NO: 9260 - DNA, 20 bp, synthetic construct
  misc_feature 1..20: note = Description of Artificial Sequence: Synthetic oligonucleotide
  source 1..20: mol_type = other DNA
tgtttggatgagcaggaagt

SEQ ID NO: 9261 - DNA, 20 bp, synthetic construct
  misc_feature 1..20: note = Description of Artificial Sequence: Synthetic oligonucleotide
  source 1..20: mol_type = other DNA
gtttggatgagcaggaagtg

SEQ ID NO: 9262 - DNA, 20 bp, synthetic construct
  misc_feature 1..20: note = Description of Artificial Sequence: Synthetic oligonucleotide
  source 1..20: mol_type = other DNA
tttggatgagcaggaagtgg

SEQ ID NO: 9263 - DNA, 20 bp, synthetic construct
  misc_feature 1..20: note = Description of Artificial Sequence: Synthetic oligonucleotide
  source 1..20: mol_type = other DNA
ttggatgagcaggaagtggc

SEQ ID NO: 9264 - DNA, 20 bp, synthetic construct
  misc_feature 1..20: note = Description of Artificial Sequence: Synthetic oligonucleotide
  source 1..20: mol_type = other DNA
tggatgagcaggaagtggca

SEQ ID NO: 9265 - DNA, 20 bp, synthetic construct
  misc_feature 1..20: note = Description of Artificial Sequence: Synthetic oligonucleotide
  source 1..20: mol_type = other DNA
ggatgagcaggaagtggcac

SEQ ID NO: 9266 - DNA, 20 bp, synthetic construct
  misc_feature 1..20: note = Description of Artificial Sequence: Synthetic oligonucleotide
  source 1..20: mol_type = other DNA
gatgagcaggaagtggcacg

SEQ ID NO: 9267 - DNA, 20 bp, synthetic construct
  misc_feature 1..20: note = Description of Artificial Sequence: Synthetic oligonucleotide
  source 1..20: mol_type = other DNA
atgagcaggaagtggcacgg

SEQ ID NO: 9268 - DNA, 20 bp, synthetic construct
  misc_feature 1..20: note = Description of Artificial Sequence: Synthetic oligonucleotide
  source 1..20: mol_type = other DNA
tgagcaggaagtggcacggt

SEQ ID NO: 9269 - DNA, 20 bp, synthetic construct
  misc_feature 1..20: note = Description of Artificial Sequence: Synthetic oligonucleotide
  source 1..20: mol_type = other DNA
gagcaggaagtggcacggtc

SEQ ID NO: 9270 - DNA, 20 bp, synthetic construct
  misc_feature 1..20: note = Description of Artificial Sequence: Synthetic oligonucleotide
  source 1..20: mol_type = other DNA
agcaggaagtggcacggtca

SEQ ID NO: 9271 - DNA, 20 bp, synthetic construct
  misc_feature 1..20: note = Description of Artificial Sequence: Synthetic oligonucleotide
  source 1..20: mol_type = other DNA
gcaggaagtggcacggtcag

SEQ ID NO: 9272 - DNA, 20 bp, synthetic construct
  misc_feature 1..20: note = Description of Artificial Sequence: Synthetic oligonucleotide
  source 1..20: mol_type = other DNA
caggaagtggcacggtcaga

SEQ ID NO: 9273 - DNA, 20 bp, synthetic construct
  misc_feature 1..20: note = Description of Artificial Sequence: Synthetic oligonucleotide
  source 1..20: mol_type = other DNA
aggaagtggcacggtcagat

SEQ ID NO: 9274 - DNA, 20 bp, synthetic construct
  misc_feature 1..20: note = Description of Artificial Sequence: Synthetic oligonucleotide
  source 1..20: mol_type = other DNA
ggaagtggcacggtcagatt

SEQ ID NO: 9275 - DNA, 20 bp, synthetic construct
  misc_feature 1..20: note = Description of Artificial Sequence: Synthetic oligonucleotide
  source 1..20: mol_type = other DNA
gaagtggcacggtcagattc

SEQ ID NO: 9276 - DNA, 20 bp, synthetic construct
  misc_feature 1..20: note = Description of Artificial Sequence: Synthetic oligonucleotide
  source 1..20: mol_type = other DNA
aagtggcacggtcagattcc

SEQ ID NO: 9277 - DNA, 20 bp, synthetic construct
  misc_feature 1..20: note = Description of Artificial Sequence: Synthetic oligonucleotide
  source 1..20: mol_type = other DNA
agtggcacggtcagattcct

SEQ ID NO: 9278 - DNA, 20 bp, synthetic construct
  misc_feature 1..20: note = Description of Artificial Sequence: Synthetic oligonucleotide
  source 1..20: mol_type = other DNA
gtggcacggtcagattcctc

SEQ ID NO: 9279 - DNA, 20 bp, synthetic construct
  misc_feature 1..20: note = Description of Artificial Sequence: Synthetic oligonucleotide
  source 1..20: mol_type = other DNA
tggcacggtcagattcctct

SEQ ID NO: 9280 - DNA, 20 bp, synthetic construct
  misc_feature 1..20: note = Description of Artificial Sequence: Synthetic oligonucleotide
  source 1..20: mol_type = other DNA
ggcacggtcagattcctctg

SEQ ID NO: 9281 - DNA, 20 bp, synthetic construct
  misc_feature 1..20: note = Description of Artificial Sequence: Synthetic oligonucleotide
  source 1..20: mol_type = other DNA
gcacggtcagattcctctgt

SEQ ID NO: 9282 - DNA, 20 bp, synthetic construct
  misc_feature 1..20: note = Description of Artificial Sequence: Synthetic oligonucleotide
  source 1..20: mol_type = other DNA
cacggtcagattcctctgtc

SEQ ID NO: 9283 - DNA, 20 bp, synthetic construct
  misc_feature 1..20: note = Description of Artificial Sequence: Synthetic oligonucleotide
  source 1..20: mol_type = other DNA
acggtcagattcctctgtct

SEQ ID NO: 9284 - DNA, 20 bp, synthetic construct
  misc_feature 1..20: note = Description of Artificial Sequence: Synthetic oligonucleotide
  source 1..20: mol_type = other DNA
cggtcagattcctctgtctg

SEQ ID NO: 9285 - DNA, 20 bp, synthetic construct
  misc_feature 1..20: note = Description of Artificial Sequence: Synthetic oligonucleotide
  source 1..20: mol_type = other DNA
ggtcagattcctctgtctgg

SEQ ID NO: 9286 - DNA, 20 bp, synthetic construct
  misc_feature 1..20: note = Description of Artificial Sequence: Synthetic oligonucleotide
  source 1..20: mol_type = other DNA
gtcagattcctctgtctggc

SEQ ID NO: 9287 - DNA, 20 bp, synthetic construct
  misc_feature 1..20: note = Description of Artificial Sequence: Synthetic oligonucleotide
  source 1..20: mol_type = other DNA
tcagattcctctgtctggcc

SEQ ID NO: 9288 - DNA, 20 bp, synthetic construct
  misc_feature 1..20: note = Description of Artificial Sequence: Synthetic oligonucleotide
  source 1..20: mol_type = other DNA
cagattcctctgtctggcct

SEQ ID NO: 9289 - DNA, 20 bp, synthetic construct
  misc_feature 1..20: note = Description of Artificial Sequence: Synthetic oligonucleotide
  source 1..20: mol_type = other DNA
agattcctctgtctggcctg

SEQ ID NO: 9290 - DNA, 20 bp, synthetic construct
  misc_feature 1..20: note = Description of Artificial Sequence: Synthetic oligonucleotide
  source 1..20: mol_type = other DNA
gattcctctgtctggcctgg

SEQ ID NO: 9291 - DNA, 20 bp, synthetic construct
  misc_feature 1..20: note = Description of Artificial Sequence: Synthetic oligonucleotide
  source 1..20: mol_type = other DNA
attcctctgtctggcctggt

SEQ ID NO: 9292 - DNA, 20 bp, synthetic construct
  misc_feature 1..20: note = Description of Artificial Sequence: Synthetic oligonucleotide
  source 1..20: mol_type = other DNA
ttcctctgtctggcctggtc

SEQ ID NO: 9293 - DNA, 20 bp, synthetic construct
  misc_feature 1..20: note = Description of Artificial Sequence: Synthetic oligonucleotide
  source 1..20: mol_type = other DNA
tcctctgtctggcctggtct

SEQ ID NO: 9294 - DNA, 20 bp, synthetic construct
  misc_feature 1..20: note = Description of Artificial Sequence: Synthetic oligonucleotide
  source 1..20: mol_type = other DNA
cctctgtctggcctggtctt

SEQ ID NO: 9295 - DNA, 20 bp, synthetic construct
  misc_feature 1..20: note = Description of Artificial Sequence: Synthetic oligonucleotide
  source 1..20: mol_type = other DNA
ctctgtctggcctggtcttc

SEQ ID NO: 9296 - DNA, 20 bp, synthetic construct
  misc_feature 1..20: note = Description of Artificial Sequence: Synthetic oligonucleotide
  source 1..20: mol_type = other DNA
tctgtctggcctggtcttcc

SEQ ID NO: 9297 - DNA, 20 bp, synthetic construct
  misc_feature 1..20: note = Description of Artificial Sequence: Synthetic oligonucleotide
  source 1..20: mol_type = other DNA
ctgtctggcctggtcttccg

SEQ ID NO: 9298 - DNA, 20 bp, synthetic construct
  misc_feature 1..20: note = Description of Artificial Sequence: Synthetic oligonucleotide
  source 1..20: mol_type = other DNA
tgtctggcctggtcttccgc

SEQ ID NO: 9299 - DNA, 20 bp, synthetic construct
  misc_feature 1..20: note = Description of Artificial Sequence: Synthetic oligonucleotide
  source 1..20: mol_type = other DNA
gtctggcctggtcttccgca

SEQ ID NO: 9300 - DNA, 20 bp, synthetic construct
  misc_feature 1..20: note = Description of Artificial Sequence: Synthetic oligonucleotide
  source 1..20: mol_type = other DNA
tctggcctggtcttccgcat

SEQ ID NO: 9301 - DNA, 20 bp, synthetic construct
  misc_feature 1..20: note = Description of Artificial Sequence: Synthetic oligonucleotide
  source 1..20: mol_type = other DNA
ctggcctggtcttccgcatg

SEQ ID NO: 9302 - DNA, 20 bp, synthetic construct
  misc_feature 1..20: note = Description of Artificial Sequence: Synthetic oligonucleotide
  source 1..20: mol_type = other DNA
tggcctggtcttccgcatgt

SEQ ID NO: 9303 - DNA, 20 bp, synthetic construct
  misc_feature 1..20: note = Description of Artificial Sequence: Synthetic oligonucleotide
  source 1..20: mol_type = other DNA
ggcctggtcttccgcatgtc

SEQ ID NO: 9304 - DNA, 20 bp, synthetic construct
  misc_feature 1..20: note = Description of Artificial Sequence: Synthetic oligonucleotide
  source 1..20: mol_type = other DNA
gcctggtcttccgcatgtct

SEQ ID NO: 9305 - DNA, 20 bp, synthetic construct
  misc_feature 1..20: note = Description of Artificial Sequence: Synthetic oligonucleotide
  source 1..20: mol_type = other DNA
cctggtcttccgcatgtctg

SEQ ID NO: 9306 - DNA, 20 bp, synthetic construct
  misc_feature 1..20: note = Description of Artificial Sequence: Synthetic oligonucleotide
  source 1..20: mol_type = other DNA
ctggtcttccgcatgtctgg

SEQ ID NO: 9307 - DNA, 20 bp, synthetic construct
  misc_feature 1..20: note = Description of Artificial Sequence: Synthetic oligonucleotide
  source 1..20: mol_type = other DNA
tggtcttccgcatgtctggt

SEQ ID NO: 9308 - DNA, 20 bp, synthetic construct
  misc_feature 1..20: note = Description of Artificial Sequence: Synthetic oligonucleotide
  source 1..20: mol_type = other DNA
ggtcttccgcatgtctggtt

SEQ ID NO: 9309 - DNA, 20 bp, synthetic construct
  misc_feature 1..20: note = Description of Artificial Sequence: Synthetic oligonucleotide
  source 1..20: mol_type = other DNA
gtcttccgcatgtctggttt

SEQ ID NO: 9310 - DNA, 20 bp, synthetic construct
  misc_feature 1..20: note = Description of Artificial Sequence: Synthetic oligonucleotide
  source 1..20: mol_type = other DNA
tcttccgcatgtctggtttc

SEQ ID NO: 9311 - DNA, 20 bp, synthetic construct
  misc_feature 1..20: note = Description of Artificial Sequence: Synthetic oligonucleotide
  source 1..20: mol_type = other DNA
cttccgcatgtctggtttca

SEQ ID NO: 9312 - DNA, 20 bp, synthetic construct
  misc_feature 1..20: note = Description of Artificial Sequence: Synthetic oligonucleotide
  source 1..20: mol_type = other DNA
ttccgcatgtctggtttcat

SEQ ID NO: 9313 - DNA, 20 bp, synthetic construct
  misc_feature 1..20: note = Description of Artificial Sequence: Synthetic oligonucleotide
  source 1..20: mol_type = other DNA
tccgcatgtctggtttcatc

SEQ ID NO: 9314 - DNA, 20 bp, synthetic construct
  misc_feature 1..20: note = Description of Artificial Sequence: Synthetic oligonucleotide
  source 1..20: mol_type = other DNA
ccgcatgtctggtttcatct

SEQ ID NO: 9315 - DNA, 20 bp, synthetic construct
  misc_feature 1..20: note = Description of Artificial Sequence: Synthetic oligonucleotide
  source 1..20: mol_type = other DNA
cgcatgtctggtttcatctc

SEQ ID NO: 9316 - DNA, 20 bp, synthetic construct
  misc_feature 1..20: note = Description of Artificial Sequence: Synthetic oligonucleotide
  source 1..20: mol_type = other DNA
gcatgtctggtttcatctca

SEQ ID NO: 9317 - DNA, 20 bp, synthetic construct
  misc_feature 1..20: note = Description of Artificial Sequence: Synthetic oligonucleotide
  source 1..20: mol_type = other DNA
catgtctggtttcatctcac

SEQ ID NO: 9318 - DNA, 20 bp, synthetic construct
  misc_feature 1..20: note = Description of Artificial Sequence: Synthetic oligonucleotide
  source 1..20: mol_type = other DNA
atgtctggtttcatctcaca

SEQ ID NO: 9319 - DNA, 20 bp, synthetic construct
  misc_feature 1..20: note = Description of Artificial Sequence: Synthetic oligonucleotide
  source 1..20: mol_type = other DNA
tgtctggtttcatctcacag

SEQ ID NO: 9320 - DNA, 20 bp, synthetic construct
  misc_feature 1..20: note = Description of Artificial Sequence: Synthetic oligonucleotide
  source 1..20: mol_type = other DNA
gtctggtttcatctcacaga

SEQ ID NO: 9321 - DNA, 20 bp, synthetic construct
  misc_feature 1..20: note = Description of Artificial Sequence: Synthetic oligonucleotide
  source 1..20: mol_type = other DNA
tctggtttcatctcacagac

SEQ ID NO: 9322 - DNA, 20 bp, synthetic construct
  misc_feature 1..20: note = Description of Artificial Sequence: Synthetic oligonucleotide
  source 1..20: mol_type = other DNA
ctggtttcatctcacagacc

SEQ ID NO: 9323 - DNA, 20 bp, synthetic construct
  misc_feature 1..20: note = Description of Artificial Sequence: Synthetic oligonucleotide
  source 1..20: mol_type = other DNA
tggtttcatctcacagacca

SEQ ID NO: 9324 - DNA, 20 bp, synthetic construct
  misc_feature 1..20: note = Description of Artificial Sequence: Synthetic oligonucleotide
  source 1..20: mol_type = other DNA
ggtttcatctcacagaccaa

SEQ ID NO: 9325 - DNA, 20 bp, synthetic construct
  misc_feature 1..20: note = Description of Artificial Sequence: Synthetic oligonucleotide
  source 1..20: mol_type = other DNA
gtttcatctcacagaccaaa

SEQ ID NO: 9326 - DNA, 20 bp, synthetic construct
  misc_feature 1..20: note = Description of Artificial Sequence: Synthetic oligonucleotide
  source 1..20: mol_type = other DNA
tttcatctcacagaccaaat

SEQ ID NO: 9327 - DNA, 20 bp, synthetic construct
  misc_feature 1..20: note = Description of Artificial Sequence: Synthetic oligonucleotide
  source 1..20: mol_type = other DNA
ttcatctcacagaccaaatc

SEQ ID NO: 9328 - DNA, 20 bp, synthetic construct
  misc_feature 1..20: note = Description of Artificial Sequence: Synthetic oligonucleotide
  source 1..20: mol_type = other DNA
tcatctcacagaccaaatca

SEQ ID NO: 9329 - DNA, 20 bp, synthetic construct
  misc_feature 1..20: note = Description of Artificial Sequence: Synthetic oligonucleotide
  source 1..20: mol_type = other DNA
catctcacagaccaaatcag

SEQ ID NO: 9330 - DNA, 20 bp, synthetic construct
  misc_feature 1..20: note = Description of Artificial Sequence: Synthetic oligonucleotide
  source 1..20: mol_type = other DNA
atctcacagaccaaatcagg

SEQ ID NO: 9331 - DNA, 20 bp, synthetic construct
  misc_feature 1..20: note = Description of Artificial Sequence: Synthetic oligonucleotide
  source 1..20: mol_type = other DNA
tctcacagaccaaatcagga

SEQ ID NO: 9332 - DNA, 20 bp, synthetic construct
  misc_feature 1..20: note = Description of Artificial Sequence: Synthetic oligonucleotide
  source 1..20: mol_type = other DNA
ctcacagaccaaatcaggac

SEQ ID NO: 9333 - DNA, 20 bp, synthetic construct
  misc_feature 1..20: note = Description of Artificial Sequence: Synthetic oligonucleotide
  source 1..20: mol_type = other DNA
tcacagaccaaatcaggact

SEQ ID NO: 9334 - DNA, 20 bp, synthetic construct
  misc_feature 1..20: note = Description of Artificial Sequence: Synthetic oligonucleotide
  source 1..20: mol_type = other DNA
cacagaccaaatcaggactc

SEQ ID NO: 9335 - DNA, 20 bp, synthetic construct
  misc_feature 1..20: note = Description of Artificial Sequence: Synthetic oligonucleotide
  source 1..20: mol_type = other DNA
acagaccaaatcaggactca

SEQ ID NO: 9336 - DNA, 20 bp, synthetic construct
  misc_feature 1..20: note = Description of Artificial Sequence: Synthetic oligonucleotide
  source 1..20: mol_type = other DNA
cagaccaaatcaggactcac

SEQ ID NO: 9337 - DNA, 20 bp, synthetic construct
  misc_feature 1..20: note = Description of Artificial Sequence: Synthetic oligonucleotide
  source 1..20: mol_type = other DNA
agaccaaatcaggactcact

SEQ ID NO: 9338 - DNA, 20 bp, synthetic construct
  misc_feature 1..20: note = Description of Artificial Sequence: Synthetic oligonucleotide
  source 1..20: mol_type = other DNA
gaccaaatcaggactcactt

SEQ ID NO: 9339 - DNA, 20 bp, synthetic construct
  misc_feature 1..20: note = Description of Artificial Sequence: Synthetic oligonucleotide
  source 1..20: mol_type = other DNA
accaaatcaggactcacttg

SEQ ID NO: 9340 - DNA, 20 bp, synthetic construct
  misc_feature 1..20: note = Description of Artificial Sequence: Synthetic oligonucleotide
  source 1..20: mol_type = other DNA
ccaaatcaggactcacttgt

SEQ ID NO: 9341 - DNA, 20 bp, synthetic construct
  misc_feature 1..20: note = Description of Artificial Sequence: Synthetic oligonucleotide
  source 1..20: mol_type = other DNA
caaatcaggactcacttgtc

SEQ ID NO: 9342 - DNA, 20 bp, synthetic construct
  misc_feature 1..20: note = Description of Artificial Sequence: Synthetic oligonucleotide
  source 1..20: mol_type = other DNA
aaatcaggactcacttgtct

SEQ ID NO: 9343 - DNA, 20 bp, synthetic construct
  misc_feature 1..20: note = Description of Artificial Sequence: Synthetic oligonucleotide
  source 1..20: mol_type = other DNA
aatcaggactcacttgtctg

SEQ ID NO: 9344 - DNA, 20 bp, synthetic construct
  misc_feature 1..20: note = Description of Artificial Sequence: Synthetic oligonucleotide
  source 1..20: mol_type = other DNA
atcaggactcacttgtctgg

SEQ ID NO: 9345 - DNA, 20 bp, synthetic construct
  misc_feature 1..20: note = Description of Artificial Sequence: Synthetic oligonucleotide
  source 1..20: mol_type = other DNA
tcaggactcacttgtctgga

SEQ ID NO: 9346 - DNA, 20 bp, synthetic construct
  misc_feature 1..20: note = Description of Artificial Sequence: Synthetic oligonucleotide
  source 1..20: mol_type = other DNA
caggactcacttgtctggaa

SEQ ID NO: 9347 - DNA, 20 bp, synthetic construct
  misc_feature 1..20: note = Description of Artificial Sequence: Synthetic oligonucleotide
  source 1..20: mol_type = other DNA
aggactcacttgtctggaaa

SEQ ID NO: 9348 - DNA, 20 bp, synthetic construct
  misc_feature 1..20: note = Description of Artificial Sequence: Synthetic oligonucleotide
  source 1..20: mol_type = other DNA
ggactcacttgtctggaaaa

SEQ ID NO: 9349 - DNA, 20 bp, synthetic construct
  misc_feature 1..20: note = Description of Artificial Sequence: Synthetic oligonucleotide
  source 1..20: mol_type = other DNA
gactcacttgtctggaaaat

SEQ ID NO: 9350 - DNA, 20 bp, synthetic construct
  misc_feature 1..20: note = Description of Artificial Sequence: Synthetic oligonucleotide
  source 1..20: mol_type = other DNA
actcacttgtctggaaaatg

SEQ ID NO: 9351 - DNA, 20 bp, synthetic construct
  misc_feature 1..20: note = Description of Artificial Sequence: Synthetic oligonucleotide
  source 1..20: mol_type = other DNA
ctcacttgtctggaaaatgg

SEQ ID NO: 9352 - DNA, 20 bp, synthetic construct
  misc_feature 1..20: note = Description of Artificial Sequence: Synthetic oligonucleotide
  source 1..20: mol_type = other DNA
tcacttgtctggaaaatggc

SEQ ID NO: 9353 - DNA, 20 bp, synthetic construct
  misc_feature 1..20: note = Description of Artificial Sequence: Synthetic oligonucleotide
  source 1..20: mol_type = other DNA
cacttgtctggaaaatggcc

SEQ ID NO: 9354 - DNA, 20 bp, synthetic construct
  misc_feature 1..20: note = Description of Artificial Sequence: Synthetic oligonucleotide
  source 1..20: mol_type = other DNA
acttgtctggaaaatggcct

SEQ ID NO: 9355 - DNA, 20 bp, synthetic construct
  misc_feature 1..20: note = Description of Artificial Sequence: Synthetic oligonucleotide
  source 1..20: mol_type = other DNA
cttgtctggaaaatggcctg

SEQ ID NO: 9356 - DNA, 20 bp, synthetic construct
  misc_feature 1..20: note = Description of Artificial Sequence: Synthetic oligonucleotide
  source 1..20: mol_type = other DNA
ttgtctggaaaatggcctga

SEQ ID NO: 9357 - DNA, 20 bp, synthetic construct
  misc_feature 1..20: note = Description of Artificial Sequence: Synthetic oligonucleotide
  source 1..20: mol_type = other DNA
tgtctggaaaatggcctgag

SEQ ID NO: 9358 - DNA, 20 bp, synthetic construct
  misc_feature 1..20: note = Description of Artificial Sequence: Synthetic oligonucleotide
  source 1..20: mol_type = other DNA
gtctggaaaatggcctgaga

SEQ ID NO: 9359 - DNA, 20 bp, synthetic construct
  misc_feature 1..20: note = Description of Artificial Sequence: Synthetic oligonucleotide
  source 1..20: mol_type = other DNA
tctggaaaatggcctgagaa

SEQ ID NO: 9360 - DNA, 20 bp, synthetic construct
  misc_feature 1..20: note = Description of Artificial Sequence: Synthetic oligonucleotide
  source 1..20: mol_type = other DNA
ctggaaaatggcctgagaat

SEQ ID NO: 9361 - DNA, 20 bp, synthetic construct
  misc_feature 1..20: note = Description of Artificial Sequence: Synthetic oligonucleotide
  source 1..20: mol_type = other DNA
tggaaaatggcctgagaata

SEQ ID NO: 9362 - DNA, 20 bp, synthetic construct
  misc_feature 1..20: note = Description of Artificial Sequence: Synthetic oligonucleotide
  source 1..20: mol_type = other DNA
ggaaaatggcctgagaatac

SEQ ID NO: 9363 - DNA, 20 bp, synthetic construct
  misc_feature 1..20: note = Description of Artificial Sequence: Synthetic oligonucleotide
  source 1..20: mol_type = other DNA
gaaaatggcctgagaatacc

SEQ ID NO: 9364 - DNA, 20 bp, synthetic construct
  misc_feature 1..20: note = Description of Artificial Sequence: Synthetic oligonucleotide
  source 1..20: mol_type = other DNA
aaaatggcctgagaatacct

SEQ ID NO: 9365 - DNA, 20 bp, synthetic construct
  misc_feature 1..20: note = Description of Artificial Sequence: Synthetic oligonucleotide
  source 1..20: mol_type = other DNA
aaatggcctgagaatacctt

SEQ ID NO: 9366 - DNA, 20 bp, synthetic construct
  misc_feature 1..20: note = Description of Artificial Sequence: Synthetic oligonucleotide
  source 1..20: mol_type = other DNA
aatggcctgagaataccttt

SEQ ID NO: 9367 - DNA, 20 bp, synthetic construct
  misc_feature 1..20: note = Description of Artificial Sequence: Synthetic oligonucleotide
  source 1..20: mol_type = other DNA
atggcctgagaatacctttc

SEQ ID NO: 9368 - DNA, 20 bp, synthetic construct
  misc_feature 1..20: note = Description of Artificial Sequence: Synthetic oligonucleotide
  source 1..20: mol_type = other DNA
tggcctgagaatacctttct

SEQ ID NO: 9369 - DNA, 20 bp, synthetic construct
  misc_feature 1..20: note = Description of Artificial Sequence: Synthetic oligonucleotide
  source 1..20: mol_type = other DNA
ggcctgagaatacctttcta

SEQ ID NO: 9370 - DNA, 20 bp, synthetic construct
  misc_feature 1..20: note = Description of Artificial Sequence: Synthetic oligonucleotide
  source 1..20: mol_type = other DNA
gcctgagaatacctttctaa

SEQ ID NO: 9371 - DNA, 20 bp, synthetic construct
  misc_feature 1..20: note = Description of Artificial Sequence: Synthetic oligonucleotide
  source 1..20: mol_type = other DNA
cctgagaatacctttctaat

SEQ ID NO: 9372 - DNA, 20 bp, synthetic construct
  misc_feature 1..20: note = Description of Artificial Sequence: Synthetic oligonucleotide
  source 1..20: mol_type = other DNA
ctgagaatacctttctaatc

SEQ ID NO: 9373 - DNA, 20 bp, synthetic construct
  misc_feature 1..20: note = Description of Artificial Sequence: Synthetic oligonucleotide
  source 1..20: mol_type = other DNA
tgagaatacctttctaatcc

SEQ ID NO: 9374 - DNA, 20 bp, synthetic construct
  misc_feature 1..20: note = Description of Artificial Sequence: Synthetic oligonucleotide
  source 1..20: mol_type = other DNA
gagaatacctttctaatccc

SEQ ID NO: 9375 - DNA, 20 bp, synthetic construct
  misc_feature 1..20: note = Description of Artificial Sequence: Synthetic oligonucleotide
  source 1..20: mol_type = other DNA
agaatacctttctaatccca

SEQ ID NO: 9376 - DNA, 20 bp, synthetic construct
  misc_feature 1..20: note = Description of Artificial Sequence: Synthetic oligonucleotide
  source 1..20: mol_type = other DNA
gaatacctttctaatcccaa

SEQ ID NO: 9377 - DNA, 20 bp, synthetic construct
  misc_feature 1..20: note = Description of Artificial Sequence: Synthetic oligonucleotide
  source 1..20: mol_type = other DNA
aatacctttctaatcccaaa

SEQ ID NO: 9378 - DNA, 20 bp, synthetic construct
  misc_feature 1..20: note = Description of Artificial Sequence: Synthetic oligonucleotide
  source 1..20: mol_type = other DNA
atacctttctaatcccaaac

SEQ ID NO: 9379 - DNA, 20 bp, synthetic construct
  misc_feature 1..20: note = Description of Artificial Sequence: Synthetic oligonucleotide
  source 1..20: mol_type = other DNA
tacctttctaatcccaaact

SEQ ID NO: 9380 - DNA, 20 bp, synthetic construct
  misc_feature 1..20: note = Description of Artificial Sequence: Synthetic oligonucleotide
  source 1..20: mol_type = other DNA
acctttctaatcccaaactg

SEQ ID NO: 9381 - DNA, 20 bp, synthetic construct
  misc_feature 1..20: note = Description of Artificial Sequence: Synthetic oligonucleotide
  source 1..20: mol_type = other DNA
cctttctaatcccaaactga

SEQ ID NO: 9382 - DNA, 20 bp, synthetic construct
  misc_feature 1..20: note = Description of Artificial Sequence: Synthetic oligonucleotide
  source 1..20: mol_type = other DNA
ctttctaatcccaaactgag

SEQ ID NO: 9383 - DNA, 20 bp, synthetic construct
  misc_feature 1..20: note = Description of Artificial Sequence: Synthetic oligonucleotide
  source 1..20: mol_type = other DNA
tttctaatcccaaactgagg

SEQ ID NO: 9384 - DNA, 20 bp, synthetic construct
  misc_feature 1..20: note = Description of Artificial Sequence: Synthetic oligonucleotide
  source 1..20: mol_type = other DNA
ttctaatcccaaactgaggg

SEQ ID NO: 9385 - DNA, 20 bp, synthetic construct
  misc_feature 1..20: note = Description of Artificial Sequence: Synthetic oligonucleotide
  source 1..20: mol_type = other DNA
tctaatcccaaactgagggc

SEQ ID NO: 9386 - DNA, 20 bp, synthetic construct
  misc_feature 1..20: note = Description of Artificial Sequence: Synthetic oligonucleotide
  source 1..20: mol_type = other DNA
ctaatcccaaactgagggcc

SEQ ID NO: 9387 - DNA, 20 bp, synthetic construct
  misc_feature 1..20: note = Description of Artificial Sequence: Synthetic oligonucleotide
  source 1..20: mol_type = other DNA
taatcccaaactgagggccc

SEQ ID NO: 9388 - DNA, 20 bp, synthetic construct
  misc_feature 1..20: note = Description of Artificial Sequence: Synthetic oligonucleotide
  source 1..20: mol_type = other DNA
aatcccaaactgagggcccg

SEQ ID NO: 9389 - DNA, 20 bp, synthetic construct
  misc_feature 1..20: note = Description of Artificial Sequence: Synthetic oligonucleotide
  source 1..20: mol_type = other DNA
atcccaaactgagggcccgg

SEQ ID NO: 9390 - DNA, 20 bp, synthetic construct
  misc_feature 1..20: note = Description of Artificial Sequence: Synthetic oligonucleotide
  source 1..20: mol_type = other DNA
tcccaaactgagggcccgga

SEQ ID NO: 9391 - DNA, 20 bp, synthetic construct
  misc_feature 1..20: note = Description of Artificial Sequence: Synthetic oligonucleotide
  source 1..20: mol_type = other DNA
cccaaactgagggcccggaa

SEQ ID NO: 9392 - DNA, 20 bp, synthetic construct
  misc_feature 1..20: note = Description of Artificial Sequence: Synthetic oligonucleotide
  source 1..20: mol_type = other DNA
ccaaactgagggcccggaag

SEQ ID NO: 9393 - DNA, 20 bp, synthetic construct
  misc_feature 1..20: note = Description of Artificial Sequence: Synthetic oligonucleotide
  source 1..20: mol_type = other DNA
caaactgagggcccggaagt

SEQ ID NO: 9394 - DNA, 20 bp, synthetic construct
  misc_feature 1..20: note = Description of Artificial Sequence: Synthetic oligonucleotide
  source 1..20: mol_type = other DNA
aaactgagggcccggaagtc

SEQ ID NO: 9395 - DNA, 20 bp, synthetic construct
  misc_feature 1..20: note = Description of Artificial Sequence: Synthetic oligonucleotide
  source 1..20: mol_type = other DNA
aactgagggcccggaagtcc

SEQ ID NO: 9396 - DNA, 20 bp, synthetic construct
  misc_feature 1..20: note = Description of Artificial Sequence: Synthetic oligonucleotide
  source 1..20: mol_type = other DNA
actgagggcccggaagtcca

SEQ ID NO: 9397 - DNA, 20 bp, synthetic construct
  misc_feature 1..20: note = Description of Artificial Sequence: Synthetic oligonucleotide
  source 1..20: mol_type = other DNA
ctgagggcccggaagtccat

SEQ ID NO: 9398 - DNA, 20 bp, synthetic construct
  misc_feature 1..20: note = Description of Artificial Sequence: Synthetic oligonucleotide
  source 1..20: mol_type = other DNA
tgagggcccggaagtccatg

SEQ ID NO: 9399 - DNA, 20 bp, synthetic construct
  misc_feature 1..20: note = Description of Artificial Sequence: Synthetic oligonucleotide
  source 1..20: mol_type = other DNA
gagggcccggaagtccatgc

SEQ ID NO: 9400 - DNA, 20 bp, synthetic construct
  misc_feature 1..20: note = Description of Artificial Sequence: Synthetic oligonucleotide
  source 1..20: mol_type = other DNA
agggcccggaagtccatgct

SEQ ID NO: 9401 - DNA, 20 bp, synthetic construct
  misc_feature 1..20: note = Description of Artificial Sequence: Synthetic oligonucleotide
  source 1..20: mol_type = other DNA
gggcccggaagtccatgctt

SEQ ID NO: 9402 - DNA, 20 bp, synthetic construct
  misc_feature 1..20: note = Description of Artificial Sequence: Synthetic oligonucleotide
  source 1..20: mol_type = other DNA
ggcccggaagtccatgctta

SEQ ID NO: 9403 - DNA, 20 bp, synthetic construct
  misc_feature 1..20: note = Description of Artificial Sequence: Synthetic oligonucleotide
  source 1..20: mol_type = other DNA
gcccggaagtccatgcttag

SEQ ID NO: 9404 - DNA, 20 bp, synthetic construct
  misc_feature 1..20: note = Description of Artificial Sequence: Synthetic oligonucleotide
  source 1..20: mol_type = other DNA
cccggaagtccatgcttaga

SEQ ID NO: 9405 - DNA, 20 bp, synthetic construct
  misc_feature 1..20: note = Description of Artificial Sequence: Synthetic oligonucleotide
  source 1..20: mol_type = other DNA
ccggaagtccatgcttagaa

SEQ ID NO: 9406 - DNA, 20 bp, synthetic construct
  misc_feature 1..20: note = Description of Artificial Sequence: Synthetic oligonucleotide
  source 1..20: mol_type = other DNA
cggaagtccatgcttagaaa

SEQ ID NO: 9407 - DNA, 20 bp, synthetic construct
  misc_feature 1..20: note = Description of Artificial Sequence: Synthetic oligonucleotide
  source 1..20: mol_type = other DNA
ggaagtccatgcttagaaag

SEQ ID NO: 9408 - DNA, 20 bp, synthetic construct
  misc_feature 1..20: note = Description of Artificial Sequence: Synthetic oligonucleotide
  source 1..20: mol_type = other DNA
gaagtccatgcttagaaagt

SEQ ID NO: 9409 - DNA, 20 bp, synthetic construct
  misc_feature 1..20: note = Description of Artificial Sequence: Synthetic oligonucleotide
  source 1..20: mol_type = other DNA
aagtccatgcttagaaagtg

SEQ ID NO: 9410 - DNA, 20 bp, synthetic construct
  misc_feature 1..20: note = Description of Artificial Sequence: Synthetic oligonucleotide
  source 1..20: mol_type = other DNA
agtccatgcttagaaagtga

SEQ ID NO: 9411 - DNA, 20 bp, synthetic construct
  misc_feature 1..20: note = Description of Artificial Sequence: Synthetic oligonucleotide
  source 1..20: mol_type = other DNA
gtccatgcttagaaagtgat

SEQ ID NO: 9412 - DNA, 20 bp, synthetic construct
  misc_feature 1..20: note = Description of Artificial Sequence: Synthetic oligonucleotide
  source 1..20: mol_type = other DNA
tccatgcttagaaagtgatt

SEQ ID NO: 9413 - DNA, 20 bp, synthetic construct
  misc_feature 1..20: note = Description of Artificial Sequence: Synthetic oligonucleotide
  source 1..20: mol_type = other DNA
ccatgcttagaaagtgattg

SEQ ID NO: 9414 - DNA, 20 bp, synthetic construct
  misc_feature 1..20: note = Description of Artificial Sequence: Synthetic oligonucleotide
  source 1..20: mol_type = other DNA
catgcttagaaagtgattga

SEQ ID NO: 9415 - DNA, 20 bp, synthetic construct
  misc_feature 1..20: note = Description of Artificial Sequence: Synthetic oligonucleotide
  source 1..20: mol_type = other DNA
atgcttagaaagtgattgat

SEQ ID NO: 9416 - DNA, 20 bp, synthetic construct
  misc_feature 1..20: note = Description of Artificial Sequence: Synthetic oligonucleotide
  source 1..20: mol_type = other DNA
tgcttagaaagtgattgata

SEQ ID NO: 9417 - DNA, 20 bp, synthetic construct
  misc_feature 1..20: note = Description of Artificial Sequence: Synthetic oligonucleotide
  source 1..20: mol_type = other DNA
gcttagaaagtgattgatac

SEQ ID NO: 9418 - DNA, 20 bp, synthetic construct
  misc_feature 1..20: note = Description of Artificial Sequence: Synthetic oligonucleotide
  source 1..20: mol_type = other DNA
cttagaaagtgattgataca

SEQ ID NO: 9419 - DNA, 20 bp, synthetic construct
  misc_feature 1..20: note = Description of Artificial Sequence: Synthetic oligonucleotide
  source 1..20: mol_type = other DNA
ttagaaagtgattgatacat

SEQ ID NO: 9420 - DNA, 20 bp, synthetic construct
  misc_feature 1..20: note = Description of Artificial Sequence: Synthetic oligonucleotide
  source 1..20: mol_type = other DNA
tagaaagtgattgatacatg

SEQ ID NO: 9421 - DNA, 20 bp, synthetic construct
  misc_feature 1..20: note = Description of Artificial Sequence: Synthetic oligonucleotide
  source 1..20: mol_type = other DNA
agaaagtgattgatacatgt

SEQ ID NO: 9422 - DNA, 20 bp, synthetic construct
  misc_feature 1..20: note = Description of Artificial Sequence: Synthetic oligonucleotide
  source 1..20: mol_type = other DNA
gaaagtgattgatacatgtt

SEQ ID NO: 9423 - DNA, 20 bp, synthetic construct
  misc_feature 1..20: note = Description of Artificial Sequence: Synthetic oligonucleotide
  source 1..20: mol_type = other DNA
aaagtgattgatacatgttg

SEQ ID NO: 9424 - DNA, 20 bp, synthetic construct
  misc_feature 1..20: note = Description of Artificial Sequence: Synthetic oligonucleotide
  source 1..20: mol_type = other DNA
aagtgattgatacatgttgg

SEQ ID NO: 9425 - DNA, 20 bp, synthetic construct
  misc_feature 1..20: note = Description of Artificial Sequence: Synthetic oligonucleotide
  source 1..20: mol_type = other DNA
agtgattgatacatgttggt

SEQ ID NO: 9426 - DNA, 20 bp, synthetic construct
  misc_feature 1..20: note = Description of Artificial Sequence: Synthetic oligonucleotide
  source 1..20: mol_type = other DNA
gtgattgatacatgttggtt

SEQ ID NO: 9427 - DNA, 20 bp, synthetic construct
  misc_feature 1..20: note = Description of Artificial Sequence: Synthetic oligonucleotide
  source 1..20: mol_type = other DNA
tgattgatacatgttggttc

SEQ ID NO: 9428 - DNA, 20 bp, synthetic construct
  misc_feature 1..20: note = Description of Artificial Sequence: Synthetic oligonucleotide
  source 1..20: mol_type = other DNA
gattgatacatgttggttca

SEQ ID NO: 9429 - DNA, 20 bp, synthetic construct
  misc_feature 1..20: note = Description of Artificial Sequence: Synthetic oligonucleotide
  source 1..20: mol_type = other DNA
attgatacatgttggttcag

SEQ ID NO: 9430 - DNA, 20 bp, synthetic construct
  misc_feature 1..20: note = Description of Artificial Sequence: Synthetic oligonucleotide
  source 1..20: mol_type = other DNA
ttgatacatgttggttcagg

SEQ ID NO: 9431 - DNA, 20 bp, synthetic construct
  misc_feature 1..20: note = Description of Artificial Sequence: Synthetic oligonucleotide
  source 1..20: mol_type = other DNA
tgatacatgttggttcaggt

SEQ ID NO: 9432 - DNA, 20 bp, synthetic construct
  misc_feature 1..20: note = Description of Artificial Sequence: Synthetic oligonucleotide
  source 1..20: mol_type = other DNA
gatacatgttggttcaggta

SEQ ID NO: 9433 - DNA, 20 bp, synthetic construct
  misc_feature 1..20: note = Description of Artificial Sequence: Synthetic oligonucleotide
  source 1..20: mol_type = other DNA
atacatgttggttcaggtaa

SEQ ID NO: 9434 - DNA, 20 bp, synthetic construct
  misc_feature 1..20: note = Description of Artificial Sequence: Synthetic oligonucleotide
  source 1..20: mol_type = other DNA
tacatgttggttcaggtaac

SEQ ID NO: 9435 - DNA, 20 bp, synthetic construct
  misc_feature 1..20: note = Description of Artificial Sequence: Synthetic oligonucleotide
  source 1..20: mol_type = other DNA
acatgttggttcaggtaaca

SEQ ID NO: 9436 - DNA, 20 bp, synthetic construct
  misc_feature 1..20: note = Description of Artificial Sequence: Synthetic oligonucleotide
  source 1..20: mol_type = other DNA
catgttggttcaggtaacag

SEQ ID NO: 9437 - DNA, 20 bp, synthetic construct
  misc_feature 1..20: note = Description of Artificial Sequence: Synthetic oligonucleotide
  source 1..20: mol_type = other DNA
atgttggttcaggtaacaga

SEQ ID NO: 9438 - DNA, 20 bp, synthetic construct
  misc_feature 1..20: note = Description of Artificial Sequence: Synthetic oligonucleotide
  source 1..20: mol_type = other DNA
tgttggttcaggtaacagaa

SEQ ID NO: 9439 - DNA, 20 bp, synthetic construct
  misc_feature 1..20: note = Description of Artificial Sequence: Synthetic oligonucleotide
  source 1..20: mol_type = other DNA
gttggttcaggtaacagaat

SEQ ID NO: 9440 - DNA, 20 bp, synthetic construct
  misc_feature 1..20: note = Description of Artificial Sequence: Synthetic oligonucleotide
  source 1..20: mol_type = other DNA
ttggttcaggtaacagaatt

SEQ ID NO: 9441 - DNA, 20 bp, synthetic construct
  misc_feature 1..20: note = Description of Artificial Sequence: Synthetic oligonucleotide
  source 1..20: mol_type = other DNA
tggttcaggtaacagaattt

SEQ ID NO: 9442 - DNA, 20 bp, synthetic construct
  misc_feature 1..20: note = Description of Artificial Sequence: Synthetic oligonucleotide
  source 1..20: mol_type = other DNA
ggttcaggtaacagaatttt

SEQ ID NO: 9443 - DNA, 20 bp, synthetic construct
  misc_feature 1..20: note = Description of Artificial Sequence: Synthetic oligonucleotide
  source 1..20: mol_type = other DNA
gttcaggtaacagaattttc

SEQ ID NO: 9444 - DNA, 20 bp, synthetic construct
  misc_feature 1..20: note = Description of Artificial Sequence: Synthetic oligonucleotide
  source 1..20: mol_type = other DNA
ttcaggtaacagaattttca

SEQ ID NO: 9445 - DNA, 20 bp, synthetic construct
  misc_feature 1..20: note = Description of Artificial Sequence: Synthetic oligonucleotide
  source 1..20: mol_type = other DNA
tcaggtaacagaattttcaa

SEQ ID NO: 9446 - DNA, 20 bp, synthetic construct
  misc_feature 1..20: note = Description of Artificial Sequence: Synthetic oligonucleotide
  source 1..20: mol_type = other DNA
caggtaacagaattttcaag

SEQ ID NO: 9447 - DNA, 20 bp, synthetic construct
  misc_feature 1..20: note = Description of Artificial Sequence: Synthetic oligonucleotide
  source 1..20: mol_type = other DNA
aggtaacagaattttcaagc

SEQ ID NO: 9448 - DNA, 20 bp, synthetic construct
  misc_feature 1..20: note = Description of Artificial Sequence: Synthetic oligonucleotide
  source 1..20: mol_type = other DNA
ggtaacagaattttcaagct

SEQ ID NO: 9449 - DNA, 20 bp, synthetic construct
  misc_feature 1..20: note = Description of Artificial Sequence: Synthetic oligonucleotide
  source 1..20: mol_type = other DNA
gtaacagaattttcaagctt

SEQ ID NO: 9450 - DNA, 20 bp, synthetic construct
  misc_feature 1..20: note = Description of Artificial Sequence: Synthetic oligonucleotide
  source 1..20: mol_type = other DNA
taacagaattttcaagcttg

SEQ ID NO: 9451 - DNA, 20 bp, synthetic construct
  misc_feature 1..20: note = Description of Artificial Sequence: Synthetic oligonucleotide
  source 1..20: mol_type = other DNA
aacagaattttcaagcttgg

SEQ ID NO: 9452 - DNA, 20 bp, synthetic construct
  misc_feature 1..20: note = Description of Artificial Sequence: Synthetic oligonucleotide
  source 1..20: mol_type = other DNA
acagaattttcaagcttggt

SEQ ID NO: 9453 - DNA, 20 bp, synthetic construct
  misc_feature 1..20: note = Description of Artificial Sequence: Synthetic oligonucleotide
  source 1..20: mol_type = other DNA
cagaattttcaagcttggtt

SEQ ID NO: 9454 - DNA, 20 bp, synthetic construct
  misc_feature 1..20: note = Description of Artificial Sequence: Synthetic oligonucleotide
  source 1..20: mol_type = other DNA
agaattttcaagcttggttt

SEQ ID NO: 9455 - DNA, 20 bp, synthetic construct
  misc_feature 1..20: note = Description of Artificial Sequence: Synthetic oligonucleotide
  source 1..20: mol_type = other DNA
gaattttcaagcttggtttc

SEQ ID NO: 9456 - DNA, 20 bp, synthetic construct
  misc_feature 1..20: note = Description of Artificial Sequence: Synthetic oligonucleotide
  source 1..20: mol_type = other DNA
aattttcaagcttggtttca

SEQ ID NO: 9457 - DNA, 20 bp, synthetic construct
  misc_feature 1..20: note = Description of Artificial Sequence: Synthetic oligonucleotide
  source 1..20: mol_type = other DNA
attttcaagcttggtttcat

SEQ ID NO: 9458 - DNA, 20 bp, synthetic construct
  misc_feature 1..20: note = Description of Artificial Sequence: Synthetic oligonucleotide
  source 1..20: mol_type = other DNA
ttttcaagcttggtttcatg

SEQ ID NO: 9459 - DNA, 20 bp, synthetic construct
  misc_feature 1..20: note = Description of Artificial Sequence: Synthetic oligonucleotide
  source 1..20: mol_type = other DNA
tttcaagcttggtttcatgt

SEQ ID NO: 9460 - DNA, 20 bp, synthetic construct
  misc_feature 1..20: note = Description of Artificial Sequence: Synthetic oligonucleotide
  source 1..20: mol_type = other DNA
ttcaagcttggtttcatgtt

SEQ ID NO: 9461 - DNA, 20 bp, synthetic construct
  misc_feature 1..20: note = Description of Artificial Sequence: Synthetic oligonucleotide
  source 1..20: mol_type = other DNA
tcaagcttggtttcatgtta

SEQ ID NO: 9462 - DNA, 20 bp, synthetic construct
  misc_feature 1..20: note = Description of Artificial Sequence: Synthetic oligonucleotide
  source 1..20: mol_type = other DNA
caagcttggtttcatgttaa

SEQ ID NO: 9463 - DNA, 20 bp, synthetic construct
  misc_feature 1..20: note = Description of Artificial Sequence: Synthetic oligonucleotide
  source 1..20: mol_type = other DNA
aagcttggtttcatgttaaa

SEQ ID NO: 9464 - DNA, 20 bp, synthetic construct
  misc_feature 1..20: note = Description of Artificial Sequence: Synthetic oligonucleotide
  source 1..20: mol_type = other DNA
agcttggtttcatgttaaaa

SEQ ID NO: 9465 - DNA, 20 bp, synthetic construct
  misc_feature 1..20: note = Description of Artificial Sequence: Synthetic oligonucleotide
  source 1..20: mol_type = other DNA
gcttggtttcatgttaaaac

SEQ ID NO: 9466 - DNA, 20 bp, synthetic construct
  misc_feature 1..20: note = Description of Artificial Sequence: Synthetic oligonucleotide
  source 1..20: mol_type = other DNA
cttggtttcatgttaaaact

SEQ ID NO: 9467 - DNA, 20 bp, synthetic construct
  misc_feature 1..20: note = Description of Artificial Sequence: Synthetic oligonucleotide
  source 1..20: mol_type = other DNA
ttggtttcatgttaaaactt

SEQ ID NO: 9468 - DNA, 20 bp, synthetic construct
  misc_feature 1..20: note = Description of Artificial Sequence: Synthetic oligonucleotide
  source 1..20: mol_type = other DNA
tggtttcatgttaaaacttt

SEQ ID NO: 9469 - DNA, 20 bp, synthetic construct
  misc_feature 1..20: note = Description of Artificial Sequence: Synthetic oligonucleotide
  source 1..20: mol_type = other DNA
ggtttcatgttaaaactttt

SEQ ID NO: 9470 - DNA, 20 bp, synthetic construct
  misc_feature 1..20: note = Description of Artificial Sequence: Synthetic oligonucleotide
  source 1..20: mol_type = other DNA
gtttcatgttaaaacttttt

SEQ ID NO: 9471 - DNA, 20 bp, synthetic construct
  misc_feature 1..20: note = Description of Artificial Sequence: Synthetic oligonucleotide
  source 1..20: mol_type = other DNA
tttcatgttaaaactttttc

SEQ ID NO: 9472 - DNA, 20 bp, synthetic construct
  misc_feature 1..20: note = Description of Artificial Sequence: Synthetic oligonucleotide
  source 1..20: mol_type = other DNA
ttcatgttaaaactttttct

SEQ ID NO: 9473 - DNA, 20 bp, synthetic construct
  misc_feature 1..20: note = Description of Artificial Sequence: Synthetic oligonucleotide
  source 1..20: mol_type = other DNA
tcatgttaaaactttttctt

SEQ ID NO: 9474 - DNA, 20 bp, synthetic construct
  misc_feature 1..20: note = Description of Artificial Sequence: Synthetic oligonucleotide
  source 1..20: mol_type = other DNA
catgttaaaactttttctta

SEQ ID NO: 9475 - DNA, 20 bp, synthetic construct
  misc_feature 1..20: note = Description of Artificial Sequence: Synthetic oligonucleotide
  source 1..20: mol_type = other DNA
atgttaaaactttttcttaa

SEQ ID NO: 9476 - DNA, 20 bp, synthetic construct
  misc_feature 1..20: note = Description of Artificial Sequence: Synthetic oligonucleotide
  source 1..20: mol_type = other DNA
tgttaaaactttttcttaat

SEQ ID NO: 9477 - DNA, 20 bp, synthetic construct
  misc_feature 1..20: note = Description of Artificial Sequence: Synthetic oligonucleotide
  source 1..20: mol_type = other DNA
gttaaaactttttcttaatt

SEQ ID NO: 9478 - DNA, 20 bp, synthetic construct
  misc_feature 1..20: note = Description of Artificial Sequence: Synthetic oligonucleotide
  source 1..20: mol_type = other DNA
ttaaaactttttcttaattt

SEQ ID NO: 9479 - DNA, 20 bp, synthetic construct
  misc_feature 1..20: note = Description of Artificial Sequence: Synthetic oligonucleotide
  source 1..20: mol_type = other DNA
taaaactttttcttaatttg

SEQ ID NO: 9480 - DNA, 20 bp, synthetic construct
  misc_feature 1..20: note = Description of Artificial Sequence: Synthetic oligonucleotide
  source 1..20: mol_type = other DNA
aaaactttttcttaatttga

SEQ ID NO: 9481 - DNA, 20 bp, synthetic construct
  misc_feature 1..20: note = Description of Artificial Sequence: Synthetic oligonucleotide
  source 1..20: mol_type = other DNA
aaactttttcttaatttgag

SEQ ID NO: 9482 - DNA, 20 bp, synthetic construct
  misc_feature 1..20: note = Description of Artificial Sequence: Synthetic oligonucleotide
  source 1..20: mol_type = other DNA
aactttttcttaatttgagc

SEQ ID NO: 9483 - DNA, 20 bp, synthetic construct
  misc_feature 1..20: note = Description of Artificial Sequence: Synthetic oligonucleotide
  source 1..20: mol_type = other DNA
actttttcttaatttgagct

SEQ ID NO: 9484 - DNA, 20 bp, synthetic construct
  misc_feature 1..20: note = Description of Artificial Sequence: Synthetic oligonucleotide
  source 1..20: mol_type = other DNA
ctttttcttaatttgagctg

SEQ ID NO: 9485 - DNA, 20 bp, synthetic construct
  misc_feature 1..20: note = Description of Artificial Sequence: Synthetic oligonucleotide
  source 1..20: mol_type = other DNA
tttttcttaatttgagctga

SEQ ID NO: 9486 - DNA, 20 bp, synthetic construct
  misc_feature 1..20: note = Description of Artificial Sequence: Synthetic oligonucleotide
  source 1..20: mol_type = other DNA
ttttcttaatttgagctgag

SEQ ID NO: 9487 - DNA, 20 bp, synthetic construct
  misc_feature 1..20: note = Description of Artificial Sequence: Synthetic oligonucleotide
  source 1..20: mol_type = other DNA
tttcttaatttgagctgagg

SEQ ID NO: 9488 - DNA, 20 bp, synthetic construct
  misc_feature 1..20: note = Description of Artificial Sequence: Synthetic oligonucleotide
  source 1..20: mol_type = other DNA
ttcttaatttgagctgaggt

SEQ ID NO: 9489 - DNA, 20 bp, synthetic construct
  misc_feature 1..20: note = Description of Artificial Sequence: Synthetic oligonucleotide
  source 1..20: mol_type = other DNA
tcttaatttgagctgaggtt

SEQ ID NO: 9490 - DNA, 20 bp, synthetic construct
  misc_feature 1..20: note = Description of Artificial Sequence: Synthetic oligonucleotide
  source 1..20: mol_type = other DNA
cttaatttgagctgaggtta

SEQ ID NO: 9491 - DNA, 20 bp, synthetic construct
  misc_feature 1..20: note = Description of Artificial Sequence: Synthetic oligonucleotide
  source 1..20: mol_type = other DNA
ttaatttgagctgaggttaa

SEQ ID NO: 9492 - DNA, 20 bp, synthetic construct
  misc_feature 1..20: note = Description of Artificial Sequence: Synthetic oligonucleotide
  source 1..20: mol_type = other DNA
taatttgagctgaggttaac

SEQ ID NO: 9493 - DNA, 20 bp, synthetic construct
  misc_feature 1..20: note = Description of Artificial Sequence: Synthetic oligonucleotide
  source 1..20: mol_type = other DNA
aatttgagctgaggttaacc

SEQ ID NO: 9494 - DNA, 20 bp, synthetic construct
  misc_feature 1..20: note = Description of Artificial Sequence: Synthetic oligonucleotide
  source 1..20: mol_type = other DNA
atttgagctgaggttaacca

SEQ ID NO: 9495 - DNA, 20 bp, synthetic construct
  misc_feature 1..20: note = Description of Artificial Sequence: Synthetic oligonucleotide
  source 1..20: mol_type = other DNA
tttgagctgaggttaaccat

SEQ ID NO: 9496 - DNA, 20 bp, synthetic construct
  misc_feature 1..20: note = Description of Artificial Sequence: Synthetic oligonucleotide
  source 1..20: mol_type = other DNA
ttgagctgaggttaaccatt

SEQ ID NO: 9497 - DNA, 20 bp, synthetic construct
  misc_feature 1..20: note = Description of Artificial Sequence: Synthetic oligonucleotide
  source 1..20: mol_type = other DNA
tgagctgaggttaaccattg

SEQ ID NO: 9498 - DNA, 20 bp, synthetic construct
  misc_feature 1..20: note = Description of Artificial Sequence: Synthetic oligonucleotide
  source 1..20: mol_type = other DNA
gagctgaggttaaccattga

SEQ ID NO: 9499 - DNA, 20 bp, synthetic construct
  misc_feature 1..20: note = Description of Artificial Sequence: Synthetic oligonucleotide
  source 1..20: mol_type = other DNA
agctgaggttaaccattgac

SEQ ID NO: 9500 - DNA, 20 bp, synthetic construct
  misc_feature 1..20: note = Description of Artificial Sequence: Synthetic oligonucleotide
  source 1..20: mol_type = other DNA
gctgaggttaaccattgact

SEQ ID NO: 9501 - DNA, 20 bp, synthetic construct
  misc_feature 1..20: note = Description of Artificial Sequence: Synthetic oligonucleotide
  source 1..20: mol_type = other DNA
ctgaggttaaccattgactt

SEQ ID NO: 9502 - DNA, 20 bp, synthetic construct
  misc_feature 1..20: note = Description of Artificial Sequence: Synthetic oligonucleotide
  source 1..20: mol_type = other DNA
tgaggttaaccattgactta

SEQ ID NO: 9503 - DNA, 20 bp, synthetic construct
  misc_feature 1..20: note = Description of Artificial Sequence: Synthetic oligonucleotide
  source 1..20: mol_type = other DNA
gaggttaaccattgacttag

SEQ ID NO: 9504 - DNA, 20 bp, synthetic construct
  misc_feature 1..20: note = Description of Artificial Sequence: Synthetic oligonucleotide
  source 1..20: mol_type = other DNA
aggttaaccattgacttagt

SEQ ID NO: 9505 - DNA, 20 bp, synthetic construct
  misc_feature 1..20: note = Description of Artificial Sequence: Synthetic oligonucleotide
  source 1..20: mol_type = other DNA
ggttaaccattgacttagtc

SEQ ID NO: 9506 - DNA, 20 bp, synthetic construct
  misc_feature 1..20: note = Description of Artificial Sequence: Synthetic oligonucleotide
  source 1..20: mol_type = other DNA
gttaaccattgacttagtca

SEQ ID NO: 9507 - DNA, 20 bp, synthetic construct
  misc_feature 1..20: note = Description of Artificial Sequence: Synthetic oligonucleotide
  source 1..20: mol_type = other DNA
ttaaccattgacttagtcag

SEQ ID NO: 9508 - DNA, 20 bp, synthetic construct
  misc_feature 1..20: note = Description of Artificial Sequence: Synthetic oligonucleotide
  source 1..20: mol_type = other DNA
taaccattgacttagtcagt

SEQ ID NO: 9509 - DNA, 20 bp, synthetic construct
  misc_feature 1..20: note = Description of Artificial Sequence: Synthetic oligonucleotide
  source 1..20: mol_type = other DNA
aaccattgacttagtcagta

SEQ ID NO: 9510 - DNA, 20 bp, synthetic construct
  misc_feature 1..20: note = Description of Artificial Sequence: Synthetic oligonucleotide
  source 1..20: mol_type = other DNA
accattgacttagtcagtag

SEQ ID NO: 9511 - DNA, 20 bp, synthetic construct
  misc_feature 1..20: note = Description of Artificial Sequence: Synthetic oligonucleotide
  source 1..20: mol_type = other DNA
ccattgacttagtcagtaga

SEQ ID NO: 9512 - DNA, 20 bp, synthetic construct
  misc_feature 1..20: note = Description of Artificial Sequence: Synthetic oligonucleotide
  source 1..20: mol_type = other DNA
cattgacttagtcagtagaa

SEQ ID NO: 9513 - DNA, 20 bp, synthetic construct
  misc_feature 1..20: note = Description of Artificial Sequence: Synthetic oligonucleotide
  source 1..20: mol_type = other DNA
attgacttagtcagtagaag

SEQ ID NO: 9514 - DNA, 20 bp, synthetic construct
  misc_feature 1..20: note = Description of Artificial Sequence: Synthetic oligonucleotide
  source 1..20: mol_type = other DNA
ttgacttagtcagtagaagc

SEQ ID NO: 9515 - DNA, 20 bp, synthetic construct
  misc_feature 1..20: note = Description of Artificial Sequence: Synthetic oligonucleotide
  source 1..20: mol_type = other DNA
tgacttagtcagtagaagct

SEQ ID NO: 9516 - DNA, 20 bp, synthetic construct
  misc_feature 1..20: note = Description of Artificial Sequence: Synthetic oligonucleotide
  source 1..20: mol_type = other DNA
gacttagtcagtagaagctg

SEQ ID NO: 9517 - DNA, 20 bp, synthetic construct
  misc_feature 1..20: note = Description of Artificial Sequence: Synthetic oligonucleotide
  source 1..20: mol_type = other DNA
acttagtcagtagaagctga

SEQ ID NO: 9518 - DNA, 20 bp, synthetic construct
  misc_feature 1..20: note = Description of Artificial Sequence: Synthetic oligonucleotide
  source 1..20: mol_type = other DNA
cttagtcagtagaagctgat

SEQ ID NO: 9519 - DNA, 20 bp, synthetic construct
  misc_feature 1..20: note = Description of Artificial Sequence: Synthetic oligonucleotide
  source 1..20: mol_type = other DNA
ttagtcagtagaagctgatc

SEQ ID NO: 9520 - DNA, 20 bp, synthetic construct
  misc_feature 1..20: note = Description of Artificial Sequence: Synthetic oligonucleotide
  source 1..20: mol_type = other DNA
tagtcagtagaagctgatca

SEQ ID NO: 9521 - DNA, 20 bp, synthetic construct
  misc_feature 1..20: note = Description of Artificial Sequence: Synthetic oligonucleotide
  source 1..20: mol_type = other DNA
agtcagtagaagctgatcat

SEQ ID NO: 9522 - DNA, 20 bp, synthetic construct
  misc_feature 1..20: note = Description of Artificial Sequence: Synthetic oligonucleotide
  source 1..20: mol_type = other DNA
gtcagtagaagctgatcatg

SEQ ID NO: 9523 - DNA, 20 bp, synthetic construct
  misc_feature 1..20: note = Description of Artificial Sequence: Synthetic oligonucleotide
  source 1..20: mol_type = other DNA
tcagtagaagctgatcatgt

SEQ ID NO: 9524 - DNA, 20 bp, synthetic construct
  misc_feature 1..20: note = Description of Artificial Sequence: Synthetic oligonucleotide
  source 1..20: mol_type = other DNA
cagtagaagctgatcatgtc

SEQ ID NO: 9525 - DNA, 20 bp, synthetic construct
  misc_feature 1..20: note = Description of Artificial Sequence: Synthetic oligonucleotide
  source 1..20: mol_type = other DNA
agtagaagctgatcatgtct

SEQ ID NO: 9526 - DNA, 20 bp, synthetic construct
  misc_feature 1..20: note = Description of Artificial Sequence: Synthetic oligonucleotide
  source 1..20: mol_type = other DNA
gtagaagctgatcatgtctt

SEQ ID NO: 9527 - DNA, 20 bp, synthetic construct
  misc_feature 1..20: note = Description of Artificial Sequence: Synthetic oligonucleotide
  source 1..20: mol_type = other DNA
tagaagctgatcatgtcttt

SEQ ID NO: 9528 - DNA, 20 bp, synthetic construct
  misc_feature 1..20: note = Description of Artificial Sequence: Synthetic oligonucleotide
  source 1..20: mol_type = other DNA
agaagctgatcatgtctttg

SEQ ID NO: 9529 - DNA, 20 bp, synthetic construct
  misc_feature 1..20: note = Description of Artificial Sequence: Synthetic oligonucleotide
  source 1..20: mol_type = other DNA
gaagctgatcatgtctttgt

SEQ ID NO: 9530 - DNA, 20 bp, synthetic construct
  misc_feature 1..20: note = Description of Artificial Sequence: Synthetic oligonucleotide
  source 1..20: mol_type = other DNA
aagctgatcatgtctttgtt

SEQ ID NO: 9531 - DNA, 20 bp, synthetic construct
  misc_feature 1..20: note = Description of Artificial Sequence: Synthetic oligonucleotide
  source 1..20: mol_type = other DNA
agctgatcatgtctttgttc

SEQ ID NO: 9532 - DNA, 20 bp, synthetic construct
  misc_feature 1..20: note = Description of Artificial Sequence: Synthetic oligonucleotide
  source 1..20: mol_type = other DNA
gctgatcatgtctttgttct

SEQ ID NO: 9533 - DNA, 20 bp, synthetic construct
  misc_feature 1..20: note = Description of Artificial Sequence: Synthetic oligonucleotide
  source 1..20: mol_type = other DNA
ctgatcatgtctttgttctt

SEQ ID NO: 9534 - DNA, 20 bp, synthetic construct
  misc_feature 1..20: note = Description of Artificial Sequence: Synthetic oligonucleotide
  source 1..20: mol_type = other DNA
tgatcatgtctttgttcttc

SEQ ID NO: 9535 - DNA, 20 bp, synthetic construct
  misc_feature 1..20: note = Description of Artificial Sequence: Synthetic oligonucleotide
  source 1..20: mol_type = other DNA
gatcatgtctttgttcttca

SEQ ID NO: 9536 - DNA, 20 bp, synthetic construct
  misc_feature 1..20: note = Description of Artificial Sequence: Synthetic oligonucleotide
  source 1..20: mol_type = other DNA
atcatgtctttgttcttcat

SEQ ID NO: 9537 - DNA, 20 bp, synthetic construct
  misc_feature 1..20: note = Description of Artificial Sequence: Synthetic oligonucleotide
  source 1..20: mol_type = other DNA
tcatgtctttgttcttcatg

SEQ ID NO: 9538 - DNA, 20 bp, synthetic construct
  misc_feature 1..20: note = Description of Artificial Sequence: Synthetic oligonucleotide
  source 1..20: mol_type = other DNA
catgtctttgttcttcatgt

SEQ ID NO: 9539 - DNA, 20 bp, synthetic construct
  misc_feature 1..20: note = Description of Artificial Sequence: Synthetic oligonucleotide
  source 1..20: mol_type = other DNA
atgtctttgttcttcatgta

SEQ ID NO: 9540 - DNA, 20 bp, synthetic construct
  misc_feature 1..20: note = Description of Artificial Sequence: Synthetic oligonucleotide
  source 1..20: mol_type = other DNA
tgtctttgttcttcatgtag

SEQ ID NO: 9541 - DNA, 20 bp, synthetic construct
  misc_feature 1..20: note = Description of Artificial Sequence: Synthetic oligonucleotide
  source 1..20: mol_type = other DNA
gtctttgttcttcatgtagt

SEQ ID NO: 9542 - DNA, 20 bp, synthetic construct
  misc_feature 1..20: note = Description of Artificial Sequence: Synthetic oligonucleotide
  source 1..20: mol_type = other DNA
tctttgttcttcatgtagtt

SEQ ID NO: 9543 - DNA, 20 bp, synthetic construct
  misc_feature 1..20: note = Description of Artificial Sequence: Synthetic oligonucleotide
  source 1..20: mol_type = other DNA
ctttgttcttcatgtagttt

SEQ ID NO: 9544 - DNA, 20 bp, synthetic construct
  misc_feature 1..20: note = Description of Artificial Sequence: Synthetic oligonucleotide
  source 1..20: mol_type = other DNA
tttgttcttcatgtagttta

SEQ ID NO: 9545 - DNA, 20 bp, synthetic construct
  misc_feature 1..20: note = Description of Artificial Sequence: Synthetic oligonucleotide
  source 1..20: mol_type = other DNA
ttgttcttcatgtagtttat

SEQ ID NO: 9546 - DNA, 20 bp, synthetic construct
  misc_feature 1..20: note = Description of Artificial Sequence: Synthetic oligonucleotide
  source 1..20: mol_type = other DNA
tgttcttcatgtagtttata

SEQ ID NO: 9547 - DNA, 20 bp, synthetic construct
  misc_feature 1..20: note = Description of Artificial Sequence: Synthetic oligonucleotide
  source 1..20: mol_type = other DNA
gttcttcatgtagtttataa

SEQ ID NO: 9548 - DNA, 20 bp, synthetic construct
  misc_feature 1..20: note = Description of Artificial Sequence: Synthetic oligonucleotide
  source 1..20: mol_type = other DNA
ttcttcatgtagtttataat

SEQ ID NO: 9549 - DNA, 20 bp, synthetic construct
  misc_feature 1..20: note = Description of Artificial Sequence: Synthetic oligonucleotide
  source 1..20: mol_type = other DNA
tcttcatgtagtttataatg

SEQ ID NO: 9550 - DNA, 20 bp, synthetic construct
  misc_feature 1..20: note = Description of Artificial Sequence: Synthetic oligonucleotide
  source 1..20: mol_type = other DNA
cttcatgtagtttataatgg

SEQ ID NO: 9551 - DNA, 20 bp, synthetic construct
  misc_feature 1..20: note = Description of Artificial Sequence: Synthetic oligonucleotide
  source 1..20: mol_type = other DNA
ttcatgtagtttataatggg

SEQ ID NO: 9552 - DNA, 20 bp, synthetic construct
  misc_feature 1..20: note = Description of Artificial Sequence: Synthetic oligonucleotide
  source 1..20: mol_type = other DNA
tcatgtagtttataatggga

SEQ ID NO: 9553 - DNA, 20 bp, synthetic construct
  misc_feature 1..20: note = Description of Artificial Sequence: Synthetic oligonucleotide
  source 1..20: mol_type = other DNA
catgtagtttataatgggac

SEQ ID NO: 9554 - DNA, 20 bp, synthetic construct
  misc_feature 1..20: note = Description of Artificial Sequence: Synthetic oligonucleotide
  source 1..20: mol_type = other DNA
atgtagtttataatgggacc

SEQ ID NO: 9555 - DNA, 20 bp, synthetic construct
  misc_feature 1..20: note = Description of Artificial Sequence: Synthetic oligonucleotide
  source 1..20: mol_type = other DNA
tgtagtttataatgggacca

SEQ ID NO: 9556 - DNA, 20 bp, synthetic construct
  misc_feature 1..20: note = Description of Artificial Sequence: Synthetic oligonucleotide
  source 1..20: mol_type = other DNA
gtagtttataatgggaccaa

SEQ ID NO: 9557 - DNA, 20 bp, synthetic construct
  misc_feature 1..20: note = Description of Artificial Sequence: Synthetic oligonucleotide
  source 1..20: mol_type = other DNA
tagtttataatgggaccaat

SEQ ID NO: 9558 - DNA, 20 bp, synthetic construct
  misc_feature 1..20: note = Description of Artificial Sequence: Synthetic oligonucleotide
  source 1..20: mol_type = other DNA
agtttataatgggaccaatg

SEQ ID NO: 9559 - DNA, 20 bp, synthetic construct
  misc_feature 1..20: note = Description of Artificial Sequence: Synthetic oligonucleotide
  source 1..20: mol_type = other DNA
gtttataatgggaccaatgg

SEQ ID NO: 9560 - DNA, 20 bp, synthetic construct
  misc_feature 1..20: note = Description of Artificial Sequence: Synthetic oligonucleotide
  source 1..20: mol_type = other DNA
tttataatgggaccaatggt

SEQ ID NO: 9561 - DNA, 20 bp, synthetic construct
  misc_feature 1..20: note = Description of Artificial Sequence: Synthetic oligonucleotide
  source 1..20: mol_type = other DNA
ttataatgggaccaatggtt

SEQ ID NO: 9562 - DNA, 20 bp, synthetic construct
  misc_feature 1..20: note = Description of Artificial Sequence: Synthetic oligonucleotide
  source 1..20: mol_type = other DNA
tataatgggaccaatggttt

SEQ ID NO: 9563 - DNA, 20 bp, synthetic construct
  misc_feature 1..20: note = Description of Artificial Sequence: Synthetic oligonucleotide
  source 1..20: mol_type = other DNA
ataatgggaccaatggtttt

SEQ ID NO: 9564 - DNA, 20 bp, synthetic construct
  misc_feature 1..20: note = Description of Artificial Sequence: Synthetic oligonucleotide
  source 1..20: mol_type = other DNA
taatgggaccaatggttttt

SEQ ID NO: 9565 - DNA, 20 bp, synthetic construct
  misc_feature 1..20: note = Description of Artificial Sequence: Synthetic oligonucleotide
  source 1..20: mol_type = other DNA
aatgggaccaatggttttta

SEQ ID NO: 9566 - DNA, 20 bp, synthetic construct
  misc_feature 1..20: note = Description of Artificial Sequence: Synthetic oligonucleotide
  source 1..20: mol_type = other DNA
atgggaccaatggtttttat

SEQ ID NO: 9567 - DNA, 20 bp, synthetic construct
  misc_feature 1..20: note = Description of Artificial Sequence: Synthetic oligonucleotide
  source 1..20: mol_type = other DNA
tgggaccaatggtttttata

SEQ ID NO: 9568 - DNA, 20 bp, synthetic construct
  misc_feature 1..20: note = Description of Artificial Sequence: Synthetic oligonucleotide
  source 1..20: mol_type = other DNA
gggaccaatggtttttatat

SEQ ID NO: 9569 - DNA, 20 bp, synthetic construct
  misc_feature 1..20: note = Description of Artificial Sequence: Synthetic oligonucleotide
  source 1..20: mol_type = other DNA
ggaccaatggtttttatatc

SEQ ID NO: 9570 - DNA, 20 bp, synthetic construct
  misc_feature 1..20: note = Description of Artificial Sequence: Synthetic oligonucleotide
  source 1..20: mol_type = other DNA
gaccaatggtttttatatca

SEQ ID NO: 9571 - DNA, 20 bp, synthetic construct
  misc_feature 1..20: note = Description of Artificial Sequence: Synthetic oligonucleotide
  source 1..20: mol_type = other DNA
accaatggtttttatatcag

SEQ ID NO: 9572 - DNA, 20 bp, synthetic construct
  misc_feature 1..20: note = Description of Artificial Sequence: Synthetic oligonucleotide
  source 1..20: mol_type = other DNA
ccaatggtttttatatcagc

SEQ ID NO: 9573 - DNA, 20 bp, synthetic construct
  misc_feature 1..20: note = Description of Artificial Sequence: Synthetic oligonucleotide
  source 1..20: mol_type = other DNA
caatggtttttatatcagca

SEQ ID NO: 9574 - DNA, 20 bp, synthetic construct
  misc_feature 1..20: note = Description of Artificial Sequence: Synthetic oligonucleotide
  source 1..20: mol_type = other DNA
aatggtttttatatcagcaa

SEQ ID NO: 9575 - DNA, 20 bp, synthetic construct
  misc_feature 1..20: note = Description of Artificial Sequence: Synthetic oligonucleotide
  source 1..20: mol_type = other DNA
atggtttttatatcagcaag

SEQ ID NO: 9576 - DNA, 20 bp, synthetic construct
  misc_feature 1..20: note = Description of Artificial Sequence: Synthetic oligonucleotide
  source 1..20: mol_type = other DNA
tggtttttatatcagcaaga

SEQ ID NO: 9577 - DNA, 20 bp, synthetic construct
  misc_feature 1..20: note = Description of Artificial Sequence: Synthetic oligonucleotide
  source 1..20: mol_type = other DNA
ggtttttatatcagcaagaa

SEQ ID NO: 9578 - DNA, 20 bp, synthetic construct
  misc_feature 1..20: note = Description of Artificial Sequence: Synthetic oligonucleotide
  source 1..20: mol_type = other DNA
gtttttatatcagcaagaaa

SEQ ID NO: 9579 - DNA, 20 bp, synthetic construct
  misc_feature 1..20: note = Description of Artificial Sequence: Synthetic oligonucleotide
  source 1..20: mol_type = other DNA
tttttatatcagcaagaaat

SEQ ID NO: 9580 - DNA, 20 bp, synthetic construct
  misc_feature 1..20: note = Description of Artificial Sequence: Synthetic oligonucleotide
  source 1..20: mol_type = other DNA
ttttatatcagcaagaaatg

SEQ ID NO: 9581 - DNA, 20 bp, synthetic construct
  misc_feature 1..20: note = Description of Artificial Sequence: Synthetic oligonucleotide
  source 1..20: mol_type = other DNA
tttatatcagcaagaaatga

SEQ ID NO: 9582 - DNA, 20 bp, synthetic construct
  misc_feature 1..20: note = Description of Artificial Sequence: Synthetic oligonucleotide
  source 1..20: mol_type = other DNA
ttatatcagcaagaaatgac

SEQ ID NO: 9583 - DNA, 20 bp, synthetic construct
  misc_feature 1..20: note = Description of Artificial Sequence: Synthetic oligonucleotide
  source 1..20: mol_type = other DNA
tatatcagcaagaaatgaca

SEQ ID NO: 9584 - DNA, 20 bp, synthetic construct
  misc_feature 1..20: note = Description of Artificial Sequence: Synthetic oligonucleotide
  source 1..20: mol_type = other DNA
atatcagcaagaaatgacat

SEQ ID NO: 9585 - DNA, 20 bp, synthetic construct
  misc_feature 1..20: note = Description of Artificial Sequence: Synthetic oligonucleotide
  source 1..20: mol_type = other DNA
tatcagcaagaaatgacatg

SEQ ID NO: 9586 - DNA, 20 bp, synthetic construct
  misc_feature 1..20: note = Description of Artificial Sequence: Synthetic oligonucleotide
  source 1..20: mol_type = other DNA
atcagcaagaaatgacatgt

SEQ ID NO: 9587 - DNA, 20 bp, synthetic construct
  misc_feature 1..20: note = Description of Artificial Sequence: Synthetic oligonucleotide
  source 1..20: mol_type = other DNA
tcagcaagaaatgacatgtc

SEQ ID NO: 9588 - DNA, 20 bp, synthetic construct
  misc_feature 1..20: note = Description of Artificial Sequence: Synthetic oligonucleotide
  source 1..20: mol_type = other DNA
cagcaagaaatgacatgtct

SEQ ID NO: 9589 - DNA, 20 bp, synthetic construct
  misc_feature 1..20: note = Description of Artificial Sequence: Synthetic oligonucleotide
  source 1..20: mol_type = other DNA
agcaagaaatgacatgtcta

SEQ ID NO: 9590 - DNA, 20 bp, synthetic construct
  misc_feature 1..20: note = Description of Artificial Sequence: Synthetic oligonucleotide
  source 1..20: mol_type = other DNA
gcaagaaatgacatgtctat

SEQ ID NO: 9591 - DNA, 20 bp, synthetic construct
  misc_feature 1..20: note = Description of Artificial Sequence: Synthetic oligonucleotide
  source 1..20: mol_type = other DNA
caagaaatgacatgtctata

SEQ ID NO: 9592 - DNA, 20 bp, synthetic construct
  misc_feature 1..20: note = Description of Artificial Sequence: Synthetic oligonucleotide
  source 1..20: mol_type = other DNA
aagaaatgacatgtctatag

SEQ ID NO: 9593 - DNA, 20 bp, synthetic construct
  misc_feature 1..20: note = Description of Artificial Sequence: Synthetic oligonucleotide
  source 1..20: mol_type = other DNA
agaaatgacatgtctatagg

SEQ ID NO: 9594 - DNA, 20 bp, synthetic construct
  misc_feature 1..20: note = Description of Artificial Sequence: Synthetic oligonucleotide
  source 1..20: mol_type = other DNA
gaaatgacatgtctatagga

SEQ ID NO: 9595 - DNA, 20 bp, synthetic construct
  misc_feature 1..20: note = Description of Artificial Sequence: Synthetic oligonucleotide
  source 1..20: mol_type = other DNA
aaatgacatgtctataggat

SEQ ID NO: 9596 - DNA, 20 bp, synthetic construct
  misc_feature 1..20: note = Description of Artificial Sequence: Synthetic oligonucleotide
  source 1..20: mol_type = other DNA
aatgacatgtctataggata

SEQ ID NO: 9597 - DNA, 20 bp, synthetic construct
  misc_feature 1..20: note = Description of Artificial Sequence: Synthetic oligonucleotide
  source 1..20: mol_type = other DNA
atgacatgtctataggatat

SEQ ID NO: 9598 - DNA, 20 bp, synthetic construct
  misc_feature 1..20: note = Description of Artificial Sequence: Synthetic oligonucleotide
  source 1..20: mol_type = other DNA
tgacatgtctataggatatg

SEQ ID NO: 9599 - DNA, 20 bp, synthetic construct
  misc_feature 1..20: note = Description of Artificial Sequence: Synthetic oligonucleotide
  source 1..20: mol_type = other DNA
gacatgtctataggatatgc

SEQ ID NO: 9600 - DNA, 20 bp, synthetic construct
  misc_feature 1..20: note = Description of Artificial Sequence: Synthetic oligonucleotide
  source 1..20: mol_type = other DNA
acatgtctataggatatgct

SEQ ID NO: 9601 - DNA, 20 bp, synthetic construct
  misc_feature 1..20: note = Description of Artificial Sequence: Synthetic oligonucleotide
  source 1..20: mol_type = other DNA
catgtctataggatatgctc

SEQ ID NO: 9602 - DNA, 20 bp, synthetic construct
  misc_feature 1..20: note = Description of Artificial Sequence: Synthetic oligonucleotide
  source 1..20: mol_type = other DNA
atgtctataggatatgctcc

SEQ ID NO: 9603 - DNA, 20 bp, synthetic construct
  misc_feature 1..20: note = Description of Artificial Sequence: Synthetic oligonucleotide
  source 1..20: mol_type = other DNA
tgtctataggatatgctcct

SEQ ID NO: 9604 - DNA, 20 bp, synthetic construct
  misc_feature 1..20: note = Description of Artificial Sequence: Synthetic oligonucleotide
  source 1..20: mol_type = other DNA
gtctataggatatgctcctt

SEQ ID NO: 9605 - DNA, 20 bp, synthetic construct
  misc_feature 1..20: note = Description of Artificial Sequence: Synthetic oligonucleotide
  source 1..20: mol_type = other DNA
tctataggatatgctcctta

SEQ ID NO: 9606 - DNA, 20 bp, synthetic construct
  misc_feature 1..20: note = Description of Artificial Sequence: Synthetic oligonucleotide
  source 1..20: mol_type = other DNA
ctataggatatgctccttac

SEQ ID NO: 9607 - DNA, 20 bp, synthetic construct
  misc_feature 1..20: note = Description of Artificial Sequence: Synthetic oligonucleotide
  source 1..20: mol_type = other DNA
tataggatatgctccttaca

SEQ ID NO: 9608 - DNA, 20 bp, synthetic construct
  misc_feature 1..20: note = Description of Artificial Sequence: Synthetic oligonucleotide
  source 1..20: mol_type = other DNA
ataggatatgctccttacaa

SEQ ID NO: 9609 - DNA, 20 bp, synthetic construct
  misc_feature 1..20: note = Description of Artificial Sequence: Synthetic oligonucleotide
  source 1..20: mol_type = other DNA
taggatatgctccttacaac

SEQ ID NO: 9610 - DNA, 20 bp, synthetic construct
  misc_feature 1..20: note = Description of Artificial Sequence: Synthetic oligonucleotide
  source 1..20: mol_type = other DNA
aggatatgctccttacaact

SEQ ID NO: 9611 - DNA, 20 bp, synthetic construct
  misc_feature 1..20: note = Description of Artificial Sequence: Synthetic oligonucleotide
  source 1..20: mol_type = other DNA
ggatatgctccttacaacta

SEQ ID NO: 9612 - DNA, 20 bp, synthetic construct
  misc_feature 1..20: note = Description of Artificial Sequence: Synthetic oligonucleotide
  source 1..20: mol_type = other DNA
gatatgctccttacaactaa

SEQ ID NO: 9613 - DNA, 20 bp, synthetic construct
  misc_feature 1..20: note = Description of Artificial Sequence: Synthetic oligonucleotide
  source 1..20: mol_type = other DNA
atatgctccttacaactaat

SEQ ID NO: 9614 - DNA, 20 bp, synthetic construct
  misc_feature 1..20: note = Description of Artificial Sequence: Synthetic oligonucleotide
  source 1..20: mol_type = other DNA
tatgctccttacaactaata

SEQ ID NO: 9615 - DNA, 20 bp, synthetic construct
  misc_feature 1..20: note = Description of Artificial Sequence: Synthetic oligonucleotide
  source 1..20: mol_type = other DNA
atgctccttacaactaatat

SEQ ID NO: 9616 - DNA, 20 bp, synthetic construct
  misc_feature 1..20: note = Description of Artificial Sequence: Synthetic oligonucleotide
  source 1..20: mol_type = other DNA
tgctccttacaactaatatt

SEQ ID NO: 9617 - DNA, 20 bp, synthetic construct
  misc_feature 1..20: note = Description of Artificial Sequence: Synthetic oligonucleotide
  source 1..20: mol_type = other DNA
gctccttacaactaatattt

SEQ ID NO: 9618 - DNA, 20 bp, synthetic construct
  misc_feature 1..20: note = Description of Artificial Sequence: Synthetic oligonucleotide
  source 1..20: mol_type = other DNA
ctccttacaactaatatttt

SEQ ID NO: 9619 - DNA, 20 bp, synthetic construct
  misc_feature 1..20: note = Description of Artificial Sequence: Synthetic oligonucleotide
  source 1..20: mol_type = other DNA
tccttacaactaatattttc

SEQ ID NO: 9620 - DNA, 20 bp, synthetic construct
  misc_feature 1..20: note = Description of Artificial Sequence: Synthetic oligonucleotide
  source 1..20: mol_type = other DNA
ccttacaactaatattttcc

SEQ ID NO: 9621 - DNA, 20 bp, synthetic construct
  misc_feature 1..20: note = Description of Artificial Sequence: Synthetic oligonucleotide
  source 1..20: mol_type = other DNA
cttacaactaatattttcct

SEQ ID NO: 9622 - DNA, 20 bp, synthetic construct
  misc_feature 1..20: note = Description of Artificial Sequence: Synthetic oligonucleotide
  source 1..20: mol_type = other DNA
ttacaactaatattttcctg

SEQ ID NO: 9623 - DNA, 20 bp, synthetic construct
  misc_feature 1..20: note = Description of Artificial Sequence: Synthetic oligonucleotide
  source 1..20: mol_type = other DNA
tacaactaatattttcctga

SEQ ID NO: 9624 - DNA, 20 bp, synthetic construct
  misc_feature 1..20: note = Description of Artificial Sequence: Synthetic oligonucleotide
  source 1..20: mol_type = other DNA
acaactaatattttcctgat

SEQ ID NO: 9625 - DNA, 20 bp, synthetic construct
  misc_feature 1..20: note = Description of Artificial Sequence: Synthetic oligonucleotide
  source 1..20: mol_type = other DNA
caactaatattttcctgata

SEQ ID NO: 9626 - DNA, 20 bp, synthetic construct
  misc_feature 1..20: note = Description of Artificial Sequence: Synthetic oligonucleotide
  source 1..20: mol_type = other DNA
aactaatattttcctgataa

SEQ ID NO: 9627 - DNA, 20 bp, synthetic construct
  misc_feature 1..20: note = Description of Artificial Sequence: Synthetic oligonucleotide
  source 1..20: mol_type = other DNA
actaatattttcctgataat

SEQ ID NO: 9628 - DNA, 20 bp, synthetic construct
  misc_feature 1..20: note = Description of Artificial Sequence: Synthetic oligonucleotide
  source 1..20: mol_type = other DNA
ctaatattttcctgataatt

SEQ ID NO: 9629 - DNA, 20 bp, synthetic construct
  misc_feature 1..20: note = Description of Artificial Sequence: Synthetic oligonucleotide
  source 1..20: mol_type = other DNA
taatattttcctgataattt

SEQ ID NO: 9630 - DNA, 20 bp, synthetic construct
  misc_feature 1..20: note = Description of Artificial Sequence: Synthetic oligonucleotide
  source 1..20: mol_type = other DNA
aatattttcctgataatttc

SEQ ID NO: 9631 - DNA, 20 bp, synthetic construct
  misc_feature 1..20: note = Description of Artificial Sequence: Synthetic oligonucleotide
  source 1..20: mol_type = other DNA
atattttcctgataatttca

SEQ ID NO: 9632 - DNA, 20 bp, synthetic construct
  misc_feature 1..20: note = Description of Artificial Sequence: Synthetic oligonucleotide
  source 1..20: mol_type = other DNA
tattttcctgataatttcag

SEQ ID NO: 9633 - DNA, 20 bp, synthetic construct
  misc_feature 1..20: note = Description of Artificial Sequence: Synthetic oligonucleotide
  source 1..20: mol_type = other DNA
attttcctgataatttcaga

SEQ ID NO: 9634 - DNA, 20 bp, synthetic construct
  misc_feature 1..20: note = Description of Artificial Sequence: Synthetic oligonucleotide
  source 1..20: mol_type = other DNA
ttttcctgataatttcagaa

SEQ ID NO: 9635 - DNA, 20 bp, synthetic construct
  misc_feature 1..20: note = Description of Artificial Sequence: Synthetic oligonucleotide
  source 1..20: mol_type = other DNA
tttcctgataatttcagaaa

SEQ ID NO: 9636 - DNA, 20 bp, synthetic construct
  misc_feature 1..20: note = Description of Artificial Sequence: Synthetic oligonucleotide
  source 1..20: mol_type = other DNA
ttcctgataatttcagaaaa

SEQ ID NO: 9637 - DNA, 20 bp, synthetic construct
  misc_feature 1..20: note = Description of Artificial Sequence: Synthetic oligonucleotide
  source 1..20: mol_type = other DNA
tcctgataatttcagaaaac

SEQ ID NO: 9638 - DNA, 20 bp, synthetic construct
  misc_feature 1..20: note = Description of Artificial Sequence: Synthetic oligonucleotide
  source 1..20: mol_type = other DNA
cctgataatttcagaaaacc

SEQ ID NO: 9639 - DNA, 20 bp, synthetic construct
  misc_feature 1..20: note = Description of Artificial Sequence: Synthetic oligonucleotide
  source 1..20: mol_type = other DNA
ctgataatttcagaaaacca

SEQ ID NO: 9640 - DNA, 20 bp, synthetic construct
  misc_feature 1..20: note = Description of Artificial Sequence: Synthetic oligonucleotide
  source 1..20: mol_type = other DNA
tgataatttcagaaaaccaa

SEQ ID NO: 9641 - DNA, 20 bp, synthetic construct
  misc_feature 1..20: note = Description of Artificial Sequence: Synthetic oligonucleotide
  source 1..20: mol_type = other DNA
gataatttcagaaaaccaaa

SEQ ID NO: 9642 - DNA, 20 bp, synthetic construct
  misc_feature 1..20: note = Description of Artificial Sequence: Synthetic oligonucleotide
  source 1..20: mol_type = other DNA
ataatttcagaaaaccaaat

SEQ ID NO: 9643 - DNA, 20 bp, synthetic construct
  misc_feature 1..20: note = Description of Artificial Sequence: Synthetic oligonucleotide
  source 1..20: mol_type = other DNA
taatttcagaaaaccaaatt

SEQ ID NO: 9644 - DNA, 20 bp, synthetic construct
  misc_feature 1..20: note = Description of Artificial Sequence: Synthetic oligonucleotide
  source 1..20: mol_type = other DNA
aatttcagaaaaccaaattt

SEQ ID NO: 9645 - DNA, 20 bp, synthetic construct
  misc_feature 1..20: note = Description of Artificial Sequence: Synthetic oligonucleotide
  source 1..20: mol_type = other DNA
atttcagaaaaccaaatttt

SEQ ID NO: 9646 - DNA, 20 bp, synthetic construct
  misc_feature 1..20: note = Description of Artificial Sequence: Synthetic oligonucleotide
  source 1..20: mol_type = other DNA
tttcagaaaaccaaattttt

SEQ ID NO: 9647 - DNA, 20 bp, synthetic construct
  misc_feature 1..20: note = Description of Artificial Sequence: Synthetic oligonucleotide
  source 1..20: mol_type = other DNA
ttcagaaaaccaaattttta

SEQ ID NO: 9648 - DNA, 20 bp, synthetic construct
  misc_feature 1..20: note = Description of Artificial Sequence: Synthetic oligonucleotide
  source 1..20: mol_type = other DNA
tcagaaaaccaaatttttat

SEQ ID NO: 9649 - DNA, 20 bp, synthetic construct
  misc_feature 1..20: note = Description of Artificial Sequence: Synthetic oligonucleotide
  source 1..20: mol_type = other DNA
cagaaaaccaaatttttatc

SEQ ID NO: 9650 - DNA, 20 bp, synthetic construct
  misc_feature 1..20: note = Description of Artificial Sequence: Synthetic oligonucleotide
  source 1..20: mol_type = other DNA
agaaaaccaaatttttatct

SEQ ID NO: 9651 - DNA, 20 bp, synthetic construct
  misc_feature 1..20: note = Description of Artificial Sequence: Synthetic oligonucleotide
  source 1..20: mol_type = other DNA
gaaaaccaaatttttatctc

SEQ ID NO: 9652 - DNA, 20 bp, synthetic construct
  misc_feature 1..20: note = Description of Artificial Sequence: Synthetic oligonucleotide
  source 1..20: mol_type = other DNA
aaaaccaaatttttatctct

SEQ ID NO: 9653 - DNA, 20 bp, synthetic construct
  misc_feature 1..20: note = Description of Artificial Sequence: Synthetic oligonucleotide
  source 1..20: mol_type = other DNA
aaaccaaatttttatctcta

SEQ ID NO: 9654 - DNA, 20 bp, synthetic construct
  misc_feature 1..20: note = Description of Artificial Sequence: Synthetic oligonucleotide
  source 1..20: mol_type = other DNA
aaccaaatttttatctctaa

SEQ ID NO: 9655 - DNA, 20 bp, synthetic construct
  misc_feature 1..20: note = Description of Artificial Sequence: Synthetic oligonucleotide
  source 1..20: mol_type = other DNA
accaaatttttatctctaaa

SEQ ID NO: 9656 - DNA, 20 bp, synthetic construct
  misc_feature 1..20: note = Description of Artificial Sequence: Synthetic oligonucleotide
  source 1..20: mol_type = other DNA
ccaaatttttatctctaaac

SEQ ID NO: 9657 - DNA, 20 bp, synthetic construct
  misc_feature 1..20: note = Description of Artificial Sequence: Synthetic oligonucleotide
  source 1..20: mol_type = other DNA
caaatttttatctctaaacc

SEQ ID NO: 9658 - DNA, 20 bp, synthetic construct
  misc_feature 1..20: note = Description of Artificial Sequence: Synthetic oligonucleotide
  source 1..20: mol_type = other DNA
aaatttttatctctaaaccg

SEQ ID NO: 9659 - DNA, 20 bp, synthetic construct
  misc_feature 1..20: note = Description of Artificial Sequence: Synthetic oligonucleotide
  source 1..20: mol_type = other DNA
aatttttatctctaaaccgt

SEQ ID NO: 9660 - DNA, 20 bp, synthetic construct
  misc_feature 1..20: note = Description of Artificial Sequence: Synthetic oligonucleotide
  source 1..20: mol_type = other DNA
atttttatctctaaaccgta

SEQ ID NO: 9661 - DNA, 20 bp, synthetic construct
  misc_feature 1..20: note = Description of Artificial Sequence: Synthetic oligonucleotide
  source 1..20: mol_type = other DNA
tttttatctctaaaccgtaa

SEQ ID NO: 9662 - DNA, 20 bp, synthetic construct
  misc_feature 1..20: note = Description of Artificial Sequence: Synthetic oligonucleotide
  source 1..20: mol_type = other DNA
ttttatctctaaaccgtaaa

SEQ ID NO: 9663 - DNA, 20 bp, synthetic construct
  misc_feature 1..20: note = Description of Artificial Sequence: Synthetic oligonucleotide
  source 1..20: mol_type = other DNA
tttatctctaaaccgtaaat

SEQ ID NO: 9664 - DNA, 20 bp, synthetic construct
  misc_feature 1..20: note = Description of Artificial Sequence: Synthetic oligonucleotide
  source 1..20: mol_type = other DNA
ttatctctaaaccgtaaatt

SEQ ID NO: 9665 - DNA, 20 bp, synthetic construct
  misc_feature 1..20: note = Description of Artificial Sequence: Synthetic oligonucleotide
  source 1..20: mol_type = other DNA
tatctctaaaccgtaaattc

SEQ ID NO: 9666 - DNA, 20 bp, synthetic construct
  misc_feature 1..20: note = Description of Artificial Sequence: Synthetic oligonucleotide
  source 1..20: mol_type = other DNA
atctctaaaccgtaaattca

SEQ ID NO: 9667 - DNA, 20 bp, synthetic construct
  misc_feature 1..20: note = Description of Artificial Sequence: Synthetic oligonucleotide
  source 1..20: mol_type = other DNA
tctctaaaccgtaaattcat

SEQ ID NO: 9668 - DNA, 20 bp, synthetic construct
  misc_feature 1..20: note = Description of Artificial Sequence: Synthetic oligonucleotide
  source 1..20: mol_type = other DNA
ctctaaaccgtaaattcatg

SEQ ID NO: 9669 - DNA, 20 bp, synthetic construct
  misc_feature 1..20: note = Description of Artificial Sequence: Synthetic oligonucleotide
  source 1..20: mol_type = other DNA
tctaaaccgtaaattcatgt

SEQ ID NO: 9670 - DNA, 20 bp, synthetic construct
  misc_feature 1..20: note = Description of Artificial Sequence: Synthetic oligonucleotide
  source 1..20: mol_type = other DNA
ctaaaccgtaaattcatgtt

SEQ ID NO: 9671 - DNA, 20 bp, synthetic construct
  misc_feature 1..20: note = Description of Artificial Sequence: Synthetic oligonucleotide
  source 1..20: mol_type = other DNA
taaaccgtaaattcatgttg

SEQ ID NO: 9672 - DNA, 20 bp, synthetic construct
  misc_feature 1..20: note = Description of Artificial Sequence: Synthetic oligonucleotide
  source 1..20: mol_type = other DNA
aaaccgtaaattcatgttgg

SEQ ID NO: 9673 - DNA, 20 bp, synthetic construct
  misc_feature 1..20: note = Description of Artificial Sequence: Synthetic oligonucleotide
  source 1..20: mol_type = other DNA
aaccgtaaattcatgttggc

SEQ ID NO: 9674 - DNA, 20 bp, synthetic construct
  misc_feature 1..20: note = Description of Artificial Sequence: Synthetic oligonucleotide
  source 1..20: mol_type = other DNA
accgtaaattcatgttggcc

SEQ ID NO: 9675 - DNA, 20 bp, synthetic construct
  misc_feature 1..20: note = Description of Artificial Sequence: Synthetic oligonucleotide
  source 1..20: mol_type = other DNA
ccgtaaattcatgttggccc

SEQ ID NO: 9676 - DNA, 20 bp, synthetic construct
  misc_feature 1..20: note = Description of Artificial Sequence: Synthetic oligonucleotide
  source 1..20: mol_type = other DNA
cgtaaattcatgttggccca

SEQ ID NO: 9677 - DNA, 20 bp, synthetic construct
  misc_feature 1..20: note = Description of Artificial Sequence: Synthetic oligonucleotide
  source 1..20: mol_type = other DNA
gtaaattcatgttggcccac

SEQ ID NO: 9678 - DNA, 20 bp, synthetic construct
  misc_feature 1..20: note = Description of Artificial Sequence: Synthetic oligonucleotide
  source 1..20: mol_type = other DNA
taaattcatgttggcccacc

SEQ ID NO: 9679 - DNA, 20 bp, synthetic construct
  misc_feature 1..20: note = Description of Artificial Sequence: Synthetic oligonucleotide
  source 1..20: mol_type = other DNA
aaattcatgttggcccacct

SEQ ID NO: 9680 - DNA, 20 bp, synthetic construct
  misc_feature 1..20: note = Description of Artificial Sequence: Synthetic oligonucleotide
  source 1..20: mol_type = other DNA
aattcatgttggcccacctg

SEQ ID NO: 9681 - DNA, 20 bp, synthetic construct
  misc_feature 1..20: note = Description of Artificial Sequence: Synthetic oligonucleotide
  source 1..20: mol_type = other DNA
attcatgttggcccacctga

SEQ ID NO: 9682 - DNA, 20 bp, synthetic construct
  misc_feature 1..20: note = Description of Artificial Sequence: Synthetic oligonucleotide
  source 1..20: mol_type = other DNA
ttcatgttggcccacctgag

SEQ ID NO: 9683 - DNA, 20 bp, synthetic construct
  misc_feature 1..20: note = Description of Artificial Sequence: Synthetic oligonucleotide
  source 1..20: mol_type = other DNA
tcatgttggcccacctgagc

SEQ ID NO: 9684 - DNA, 20 bp, synthetic construct
  misc_feature 1..20: note = Description of Artificial Sequence: Synthetic oligonucleotide
  source 1..20: mol_type = other DNA
catgttggcccacctgagct

SEQ ID NO: 9685 - DNA, 20 bp, synthetic construct
  misc_feature 1..20: note = Description of Artificial Sequence: Synthetic oligonucleotide
  source 1..20: mol_type = other DNA
atgttggcccacctgagctg

SEQ ID NO: 9686 - DNA, 20 bp, synthetic construct
  misc_feature 1..20: note = Description of Artificial Sequence: Synthetic oligonucleotide
  source 1..20: mol_type = other DNA
tgttggcccacctgagctga

SEQ ID NO: 9687 - DNA, 20 bp, synthetic construct
  misc_feature 1..20: note = Description of Artificial Sequence: Synthetic oligonucleotide
  source 1..20: mol_type = other DNA
gttggcccacctgagctgag

SEQ ID NO: 9688 - DNA, 20 bp, synthetic construct
  misc_feature 1..20: note = Description of Artificial Sequence: Synthetic oligonucleotide
  source 1..20: mol_type = other DNA
ttggcccacctgagctgagc

SEQ ID NO: 9689 - DNA, 20 bp, synthetic construct
  misc_feature 1..20: note = Description of Artificial Sequence: Synthetic oligonucleotide
  source 1..20: mol_type = other DNA
tggcccacctgagctgagct

SEQ ID NO: 9690 - DNA, 20 bp, synthetic construct
  misc_feature 1..20: note = Description of Artificial Sequence: Synthetic oligonucleotide
  source 1..20: mol_type = other DNA
ggcccacctgagctgagcta

SEQ ID NO: 9691 - DNA, 20 bp, synthetic construct
  misc_feature 1..20: note = Description of Artificial Sequence: Synthetic oligonucleotide
  source 1..20: mol_type = other DNA
gcccacctgagctgagctaa

SEQ ID NO: 9692 - DNA, 20 bp, synthetic construct
  misc_feature 1..20: note = Description of Artificial Sequence: Synthetic oligonucleotide
  source 1..20: mol_type = other DNA
cccacctgagctgagctaac

SEQ ID NO: 9693 - DNA, 20 bp, synthetic construct
  misc_feature 1..20: note = Description of Artificial Sequence: Synthetic oligonucleotide
  source 1..20: mol_type = other DNA
ccacctgagctgagctaacc

SEQ ID NO: 9694 - DNA, 20 bp, synthetic construct
  misc_feature 1..20: note = Description of Artificial Sequence: Synthetic oligonucleotide
  source 1..20: mol_type = other DNA
cacctgagctgagctaacca

SEQ ID NO: 9695 - DNA, 20 bp, synthetic construct
  misc_feature 1..20: note = Description of Artificial Sequence: Synthetic oligonucleotide
  source 1..20: mol_type = other DNA
acctgagctgagctaaccag

SEQ ID NO: 9696 - DNA, 20 bp, synthetic construct
  misc_feature 1..20: note = Description of Artificial Sequence: Synthetic oligonucleotide
  source 1..20: mol_type = other DNA
cctgagctgagctaaccaga

SEQ ID NO: 9697 - DNA, 20 bp, synthetic construct
  misc_feature 1..20: note = Description of Artificial Sequence: Synthetic oligonucleotide
  source 1..20: mol_type = other DNA
ctgagctgagctaaccagaa

SEQ ID NO: 9698 - DNA, 20 bp, synthetic construct
  misc_feature 1..20: note = Description of Artificial Sequence: Synthetic oligonucleotide
  source 1..20: mol_type = other DNA
tgagctgagctaaccagaaa

SEQ ID NO: 9699 - DNA, 20 bp, synthetic construct
  misc_feature 1..20: note = Description of Artificial Sequence: Synthetic oligonucleotide
  source 1..20: mol_type = other DNA
gagctgagctaaccagaaat

SEQ ID NO: 9700 - DNA, 20 bp, synthetic construct
  misc_feature 1..20: note = Description of Artificial Sequence: Synthetic oligonucleotide
  source 1..20: mol_type = other DNA
agctgagctaaccagaaata

SEQ ID NO: 9701 - DNA, 20 bp, synthetic construct
  misc_feature 1..20: note = Description of Artificial Sequence: Synthetic oligonucleotide
  source 1..20: mol_type = other DNA
gctgagctaaccagaaataa

SEQ ID NO: 9702 - DNA, 20 bp, synthetic construct
  misc_feature 1..20: note = Description of Artificial Sequence: Synthetic oligonucleotide
  source 1..20: mol_type = other DNA
ctgagctaaccagaaataaa

SEQ ID NO: 9703 - DNA, 20 bp, synthetic construct
  misc_feature 1..20: note = Description of Artificial Sequence: Synthetic oligonucleotide
  source 1..20: mol_type = other DNA
tgagctaaccagaaataaaa

SEQ ID NO: 9704 - DNA, 20 bp, synthetic construct
  misc_feature 1..20: note = Description of Artificial Sequence: Synthetic oligonucleotide
  source 1..20: mol_type = other DNA
gagctaaccagaaataaaag

SEQ ID NO: 9705 - DNA, 20 bp, synthetic construct
  misc_feature 1..20: note = Description of Artificial Sequence: Synthetic oligonucleotide
  source 1..20: mol_type = other DNA
agctaaccagaaataaaagt

SEQ ID NO: 9706 - DNA, 20 bp, synthetic construct
  misc_feature 1..20: note = Description of Artificial Sequence: Synthetic oligonucleotide
  source 1..20: mol_type = other DNA
gctaaccagaaataaaagtt

SEQ ID NO: 9707 - DNA, 20 bp, synthetic construct
  misc_feature 1..20: note = Description of Artificial Sequence: Synthetic oligonucleotide
  source 1..20: mol_type = other DNA
ctaaccagaaataaaagtta

SEQ ID NO: 9708 - DNA, 20 bp, synthetic construct
  misc_feature 1..20: note = Description of Artificial Sequence: Synthetic oligonucleotide
  source 1..20: mol_type = other DNA
taaccagaaataaaagttat

SEQ ID NO: 9709 - DNA, 20 bp, synthetic construct
  misc_feature 1..20: note = Description of Artificial Sequence: Synthetic oligonucleotide
  source 1..20: mol_type = other DNA
aaccagaaataaaagttatt

SEQ ID NO: 9710 - DNA, 20 bp, synthetic construct
  misc_feature 1..20: note = Description of Artificial Sequence: Synthetic oligonucleotide
  source 1..20: mol_type = other DNA
accagaaataaaagttattt

SEQ ID NO: 9711 - DNA, 20 bp, synthetic construct
  misc_feature 1..20: note = Description of Artificial Sequence: Synthetic oligonucleotide
  source 1..20: mol_type = other DNA
ccagaaataaaagttatttt

SEQ ID NO: 9712 - DNA, 20 bp, synthetic construct
  misc_feature 1..20: note = Description of Artificial Sequence: Synthetic oligonucleotide
  source 1..20: mol_type = other DNA
cagaaataaaagttattttg

SEQ ID NO: 9713 - DNA, 20 bp, synthetic construct
  misc_feature 1..20: note = Description of Artificial Sequence: Synthetic oligonucleotide
  source 1..20: mol_type = other DNA
agaaataaaagttattttgc

SEQ ID NO: 9714 - DNA, 20 bp, synthetic construct
  misc_feature 1..20: note = Description of Artificial Sequence: Synthetic oligonucleotide
  source 1..20: mol_type = other DNA
gaaataaaagttattttgca

SEQ ID NO: 9715 - DNA, 20 bp, synthetic construct
  misc_feature 1..20: note = Description of Artificial Sequence: Synthetic oligonucleotide
  source 1..20: mol_type = other DNA
aaataaaagttattttgcaa

SEQ ID NO: 9716 - DNA, 20 bp, synthetic construct
  misc_feature 1..20: note = Description of Artificial Sequence: Synthetic oligonucleotide
  source 1..20: mol_type = other DNA
aataaaagttattttgcaaa

SEQ ID NO: 9717 - DNA, 20 bp, synthetic construct
  misc_feature 1..20: note = Description of Artificial Sequence: Synthetic oligonucleotide
  source 1..20: mol_type = other DNA
ataaaagttattttgcaaaa

SEQ ID NO: 9718 - DNA, 20 bp, synthetic construct
  misc_feature 1..20: note = Description of Artificial Sequence: Synthetic oligonucleotide
  source 1..20: mol_type = other DNA
taaaagttattttgcaaaag

SEQ ID NO: 9719 - DNA, 20 bp, synthetic construct
  misc_feature 1..20: note = Description of Artificial Sequence: Synthetic oligonucleotide
  source 1..20: mol_type = other DNA
aaaagttattttgcaaaaga

SEQ ID NO: 9720 - DNA, 20 bp, synthetic construct
  misc_feature 1..20: note = Description of Artificial Sequence: Synthetic oligonucleotide
  source 1..20: mol_type = other DNA
aaagttattttgcaaaagaa

SEQ ID NO: 9721 - DNA, 20 bp, synthetic construct
  misc_feature 1..20: note = Description of Artificial Sequence: Synthetic oligonucleotide
  source 1..20: mol_type = other DNA
aagttattttgcaaaagaaa

SEQ ID NO: 9722 - DNA, 20 bp, synthetic construct
  misc_feature 1..20: note = Description of Artificial Sequence: Synthetic oligonucleotide
  source 1..20: mol_type = other DNA
agttattttgcaaaagaaag

SEQ ID NO: 9723 - DNA, 20 bp, synthetic construct
  misc_feature 1..20: note = Description of Artificial Sequence: Synthetic oligonucleotide
  source 1..20: mol_type = other DNA
gttattttgcaaaagaaaga

SEQ ID NO: 9724 - DNA, 20 bp, synthetic construct
  misc_feature 1..20: note = Description of Artificial Sequence: Synthetic oligonucleotide
  source 1..20: mol_type = other DNA
ttattttgcaaaagaaagat

SEQ ID NO: 9725 - DNA, 20 bp, synthetic construct
  misc_feature 1..20: note = Description of Artificial Sequence: Synthetic oligonucleotide
  source 1..20: mol_type = other DNA
tattttgcaaaagaaagatt

SEQ ID NO: 9726 - DNA, 20 bp, synthetic construct
  misc_feature 1..20: note = Description of Artificial Sequence: Synthetic oligonucleotide
  source 1..20: mol_type = other DNA
attttgcaaaagaaagatta

SEQ ID NO: 9727 - DNA, 20 bp, synthetic construct
  misc_feature 1..20: note = Description of Artificial Sequence: Synthetic oligonucleotide
  source 1..20: mol_type = other DNA
ttttgcaaaagaaagattaa

SEQ ID NO: 9728 - DNA, 20 bp, synthetic construct
  misc_feature 1..20: note = Description of Artificial Sequence: Synthetic oligonucleotide
  source 1..20: mol_type = other DNA
tttgcaaaagaaagattaaa

SEQ ID NO: 9729 - DNA, 20 bp, synthetic construct
  misc_feature 1..20: note = Description of Artificial Sequence: Synthetic oligonucleotide
  source 1..20: mol_type = other DNA
ttgcaaaagaaagattaaat

SEQ ID NO: 9730 - DNA, 20 bp, synthetic construct
  misc_feature 1..20: note = Description of Artificial Sequence: Synthetic oligonucleotide
  source 1..20: mol_type = other DNA
tgcaaaagaaagattaaatt

SEQ ID NO: 9731 - DNA, 20 bp, synthetic construct
  misc_feature 1..20: note = Description of Artificial Sequence: Synthetic oligonucleotide
  source 1..20: mol_type = other DNA
gcaaaagaaagattaaattt

SEQ ID NO: 9732 - DNA, 20 bp, synthetic construct
  misc_feature 1..20: note = Description of Artificial Sequence: Synthetic oligonucleotide
  source 1..20: mol_type = other DNA
caaaagaaagattaaattta

SEQ ID NO: 9733 - DNA, 20 bp, synthetic construct
  misc_feature 1..20: note = Description of Artificial Sequence: Synthetic oligonucleotide
  source 1..20: mol_type = other DNA
aaaagaaagattaaatttat

SEQ ID NO: 9734 - DNA, 20 bp, synthetic construct
  misc_feature 1..20: note = Description of Artificial Sequence: Synthetic oligonucleotide
  source 1..20: mol_type = other DNA
aaagaaagattaaatttatc

SEQ ID NO: 9735 - DNA, 20 bp, synthetic construct
  misc_feature 1..20: note = Description of Artificial Sequence: Synthetic oligonucleotide
  source 1..20: mol_type = other DNA
aagaaagattaaatttatct

SEQ ID NO: 9736 - DNA, 20 bp, synthetic construct
  misc_feature 1..20: note = Description of Artificial Sequence: Synthetic oligonucleotide
  source 1..20: mol_type = other DNA
agaaagattaaatttatctt

SEQ ID NO: 9737 - DNA, 20 bp, synthetic construct
  misc_feature 1..20: note = Description of Artificial Sequence: Synthetic oligonucleotide
  source 1..20: mol_type = other DNA
gaaagattaaatttatctta

SEQ ID NO: 9738 - DNA, 20 bp, synthetic construct
  misc_feature 1..20: note = Description of Artificial Sequence: Synthetic oligonucleotide
  source 1..20: mol_type = other DNA
aaagattaaatttatcttat

SEQ ID NO: 9739 - DNA, 20 bp, synthetic construct
  misc_feature 1..20: note = Description of Artificial Sequence: Synthetic oligonucleotide
  source 1..20: mol_type = other DNA
aagattaaatttatcttatt

SEQ ID NO: 9740 - DNA, 20 bp, synthetic construct
  misc_feature 1..20: note = Description of Artificial Sequence: Synthetic oligonucleotide
  source 1..20: mol_type = other DNA
agattaaatttatcttattt

SEQ ID NO: 9741 - DNA, 20 bp, synthetic construct
  misc_feature 1..20: note = Description of Artificial Sequence: Synthetic oligonucleotide
  source 1..20: mol_type = other DNA
gattaaatttatcttatttt

SEQ ID NO: 9742 - DNA, 20 bp, synthetic construct
  misc_feature 1..20: note = Description of Artificial Sequence: Synthetic oligonucleotide
  source 1..20: mol_type = other DNA
attaaatttatcttattttt

SEQ ID NO: 9743 - DNA, 20 bp, synthetic construct
  misc_feature 1..20: note = Description of Artificial Sequence: Synthetic oligonucleotide
  source 1..20: mol_type = other DNA
ttaaatttatcttatttttg

SEQ ID NO: 9744 - DNA, 20 bp, synthetic construct
  misc_feature 1..20: note = Description of Artificial Sequence: Synthetic oligonucleotide
  source 1..20: mol_type = other DNA
taaatttatcttatttttgg

SEQ ID NO: 9745 - DNA, 20 bp, synthetic construct
  misc_feature 1..20: note = Description of Artificial Sequence: Synthetic oligonucleotide
  source 1..20: mol_type = other DNA
aaatttatcttatttttggc

SEQ ID NO: 9746 - DNA, 20 bp, synthetic construct
  misc_feature 1..20: note = Description of Artificial Sequence: Synthetic oligonucleotide
  source 1..20: mol_type = other DNA
aatttatcttatttttggcc

SEQ ID NO: 9747 - DNA, 20 bp, synthetic construct
  misc_feature 1..20: note = Description of Artificial Sequence: Synthetic oligonucleotide
  source 1..20: mol_type = other DNA
atttatcttatttttggcct

SEQ ID NO: 9748 - DNA, 20 bp, synthetic construct
  misc_feature 1..20: note = Description of Artificial Sequence: Synthetic oligonucleotide
  source 1..20: mol_type = other DNA
tttatcttatttttggccta

SEQ ID NO: 9749 - DNA, 20 bp, synthetic construct
  misc_feature 1..20: note = Description of Artificial Sequence: Synthetic oligonucleotide
  source 1..20: mol_type = other DNA
ttatcttatttttggcctat

SEQ ID NO: 9750 - DNA, 20 bp, synthetic construct
  misc_feature 1..20: note = Description of Artificial Sequence: Synthetic oligonucleotide
  source 1..20: mol_type = other DNA
tatcttatttttggcctatt

SEQ ID NO: 9751 - DNA, 20 bp, synthetic construct
  misc_feature 1..20: note = Description of Artificial Sequence: Synthetic oligonucleotide
  source 1..20: mol_type = other DNA
atcttatttttggcctatta

SEQ ID NO: 9752 - DNA, 20 bp, synthetic construct
  misc_feature 1..20: note = Description of Artificial Sequence: Synthetic oligonucleotide
  source 1..20: mol_type = other DNA
tcttatttttggcctattaa

SEQ ID NO: 9753 - DNA, 20 bp, synthetic construct
  misc_feature 1..20: note = Description of Artificial Sequence: Synthetic oligonucleotide
  source 1..20: mol_type = other DNA
cttatttttggcctattaag

SEQ ID NO: 9754 - DNA, 20 bp, synthetic construct
  misc_feature 1..20: note = Description of Artificial Sequence: Synthetic oligonucleotide
  source 1..20: mol_type = other DNA
ttatttttggcctattaagt

SEQ ID NO: 9755 - DNA, 20 bp, synthetic construct
  misc_feature 1..20: note = Description of Artificial Sequence: Synthetic oligonucleotide
  source 1..20: mol_type = other DNA
tatttttggcctattaagtc

SEQ ID NO: 9756 - DNA, 20 bp, synthetic construct
  misc_feature 1..20: note = Description of Artificial Sequence: Synthetic oligonucleotide
  source 1..20: mol_type = other DNA
atttttggcctattaagtct

SEQ ID NO: 9757 - DNA, 20 bp, synthetic construct
  misc_feature 1..20: note = Description of Artificial Sequence: Synthetic oligonucleotide
  source 1..20: mol_type = other DNA
tttttggcctattaagtcta

SEQ ID NO: 9758 - DNA, 20 bp, synthetic construct
  misc_feature 1..20: note = Description of Artificial Sequence: Synthetic oligonucleotide
  source 1..20: mol_type = other DNA
ttttggcctattaagtctat

SEQ ID NO: 9759 - DNA, 20 bp, synthetic construct
  misc_feature 1..20: note = Description of Artificial Sequence: Synthetic oligonucleotide
  source 1..20: mol_type = other DNA
tttggcctattaagtctata

SEQ ID NO: 9760 - DNA, 20 bp, synthetic construct
  misc_feature 1..20: note = Description of Artificial Sequence: Synthetic oligonucleotide
  source 1..20: mol_type = other DNA
ttggcctattaagtctatat

SEQ ID NO: 9761 - DNA, 20 bp, synthetic construct
  misc_feature 1..20: note = Description of Artificial Sequence: Synthetic oligonucleotide
  source 1..20: mol_type = other DNA
tggcctattaagtctatatt

SEQ ID NO: 9762 - DNA, 20 bp, synthetic construct
  misc_feature 1..20: note = Description of Artificial Sequence: Synthetic oligonucleotide
  source 1..20: mol_type = other DNA
ggcctattaagtctatattt

SEQ ID NO: 9763 - DNA, 20 bp, synthetic construct
  misc_feature 1..20: note = Description of Artificial Sequence: Synthetic oligonucleotide
  source 1..20: mol_type = other DNA
gcctattaagtctatatttc

SEQ ID NO: 9764 - DNA, 20 bp, synthetic construct
  misc_feature 1..20: note = Description of Artificial Sequence: Synthetic oligonucleotide
  source 1..20: mol_type = other DNA
cctattaagtctatatttca

SEQ ID NO: 9765 - DNA, 20 bp, synthetic construct
  misc_feature 1..20: note = Description of Artificial Sequence: Synthetic oligonucleotide
  source 1..20: mol_type = other DNA
ctattaagtctatatttcag

SEQ ID NO: 9766 - DNA, 20 bp, synthetic construct
  misc_feature 1..20: note = Description of Artificial Sequence: Synthetic oligonucleotide
  source 1..20: mol_type = other DNA
tattaagtctatatttcagc

SEQ ID NO: 9767 - DNA, 20 bp, synthetic construct
  misc_feature 1..20: note = Description of Artificial Sequence: Synthetic oligonucleotide
  source 1..20: mol_type = other DNA
attaagtctatatttcagca

SEQ ID NO: 9768 - DNA, 20 bp, synthetic construct
  misc_feature 1..20: note = Description of Artificial Sequence: Synthetic oligonucleotide
  source 1..20: mol_type = other DNA
ttaagtctatatttcagcat

SEQ ID NO: 9769 - DNA, 20 bp, synthetic construct
  misc_feature 1..20: note = Description of Artificial Sequence: Synthetic oligonucleotide
  source 1..20: mol_type = other DNA
taagtctatatttcagcatt

SEQ ID NO: 9770 - DNA, 20 bp, synthetic construct
  misc_feature 1..20: note = Description of Artificial Sequence: Synthetic oligonucleotide
  source 1..20: mol_type = other DNA
aagtctatatttcagcattg

SEQ ID NO: 9771 - DNA, 20 bp, synthetic construct
  misc_feature 1..20: note = Description of Artificial Sequence: Synthetic oligonucleotide
  source 1..20: mol_type = other DNA
agtctatatttcagcattgc

SEQ ID NO: 9772 - DNA, 20 bp, synthetic construct
  misc_feature 1..20: note = Description of Artificial Sequence: Synthetic oligonucleotide
  source 1..20: mol_type = other DNA
gtctatatttcagcattgca

SEQ ID NO: 9773 - DNA, 20 bp, synthetic construct
  misc_feature 1..20: note = Description of Artificial Sequence: Synthetic oligonucleotide
  source 1..20: mol_type = other DNA
tctatatttcagcattgcat

SEQ ID NO: 9774 - DNA, 20 bp, synthetic construct
  misc_feature 1..20: note = Description of Artificial Sequence: Synthetic oligonucleotide
  source 1..20: mol_type = other DNA
ctatatttcagcattgcatt

SEQ ID NO: 9775 - DNA, 20 bp, synthetic construct
  misc_feature 1..20: note = Description of Artificial Sequence: Synthetic oligonucleotide
  source 1..20: mol_type = other DNA
tatatttcagcattgcattt

SEQ ID NO: 9776 - DNA, 20 bp, synthetic construct
  misc_feature 1..20: note = Description of Artificial Sequence: Synthetic oligonucleotide
  source 1..20: mol_type = other DNA
atatttcagcattgcattta

SEQ ID NO: 9777 - DNA, 20 bp, synthetic construct
  misc_feature 1..20: note = Description of Artificial Sequence: Synthetic oligonucleotide
  source 1..20: mol_type = other DNA
tatttcagcattgcatttaa

SEQ ID NO: 9778 - DNA, 20 bp, synthetic construct
  misc_feature 1..20: note = Description of Artificial Sequence: Synthetic oligonucleotide
  source 1..20: mol_type = other DNA
atttcagcattgcatttaaa

SEQ ID NO: 9779 - DNA, 20 bp, synthetic construct
  misc_feature 1..20: note = Description of Artificial Sequence: Synthetic oligonucleotide
  source 1..20: mol_type = other DNA
tttcagcattgcatttaaaa

SEQ ID NO: 9780 - DNA, 20 bp, synthetic construct
  misc_feature 1..20: note = Description of Artificial Sequence: Synthetic oligonucleotide
  source 1..20: mol_type = other DNA
ttcagcattgcatttaaaaa

SEQ ID NO: 9781 - DNA, 20 bp, synthetic construct
  misc_feature 1..20: note = Description of Artificial Sequence: Synthetic oligonucleotide
  source 1..20: mol_type = other DNA
tcagcattgcatttaaaaaa

SEQ ID NO: 9782 - DNA, 20 bp, synthetic construct
  misc_feature 1..20: note = Description of Artificial Sequence: Synthetic oligonucleotide
  source 1..20: mol_type = other DNA
cagcattgcatttaaaaaat

SEQ ID NO: 9783 - DNA, 20 bp, synthetic construct
  misc_feature 1..20: note = Description of Artificial Sequence: Synthetic oligonucleotide
  source 1..20: mol_type = other DNA
agcattgcatttaaaaaatc

SEQ ID NO: 9784 - DNA, 20 bp, synthetic construct
  misc_feature 1..20: note = Description of Artificial Sequence: Synthetic oligonucleotide
  source 1..20: mol_type = other DNA
gcattgcatttaaaaaatcc

SEQ ID NO: 9785 - DNA, 20 bp, synthetic construct
  misc_feature 1..20: note = Description of Artificial Sequence: Synthetic oligonucleotide
  source 1..20: mol_type = other DNA
cattgcatttaaaaaatcct

SEQ ID NO: 9786 - DNA, 20 bp, synthetic construct
  misc_feature 1..20: note = Description of Artificial Sequence: Synthetic oligonucleotide
  source 1..20: mol_type = other DNA
attgcatttaaaaaatcctg

SEQ ID NO: 9787 - DNA, 20 bp, synthetic construct
  misc_feature 1..20: note = Description of Artificial Sequence: Synthetic oligonucleotide
  source 1..20: mol_type = other DNA
ttgcatttaaaaaatcctgt

SEQ ID NO: 9788 - DNA, 20 bp, synthetic construct
  misc_feature 1..20: note = Description of Artificial Sequence: Synthetic oligonucleotide
  source 1..20: mol_type = other DNA
tgcatttaaaaaatcctgta

SEQ ID NO: 9789 - DNA, 20 bp, synthetic construct
  misc_feature 1..20: note = Description of Artificial Sequence: Synthetic oligonucleotide
  source 1..20: mol_type = other DNA
gcatttaaaaaatcctgtat

SEQ ID NO: 9790 - DNA, 20 bp, synthetic construct
  misc_feature 1..20: note = Description of Artificial Sequence: Synthetic oligonucleotide
  source 1..20: mol_type = other DNA
catttaaaaaatcctgtatt

SEQ ID NO: 9791 - DNA, 20 bp, synthetic construct
  misc_feature 1..20: note = Description of Artificial Sequence: Synthetic oligonucleotide
  source 1..20: mol_type = other DNA
atttaaaaaatcctgtattc

SEQ ID NO: 9792 - DNA, 20 bp, synthetic construct
  misc_feature 1..20: note = Description of Artificial Sequence: Synthetic oligonucleotide
  source 1..20: mol_type = other DNA
tttaaaaaatcctgtattcg

SEQ ID NO: 9793 - DNA, 20 bp, synthetic construct
  misc_feature 1..20: note = Description of Artificial Sequence: Synthetic oligonucleotide
  source 1..20: mol_type = other DNA
ttaaaaaatcctgtattcgg

SEQ ID NO: 9794 - DNA, 20 bp, synthetic construct
  misc_feature 1..20: note = Description of Artificial Sequence: Synthetic oligonucleotide
  source 1..20: mol_type = other DNA
taaaaaatcctgtattcgga

SEQ ID NO: 9795 - DNA, 20 bp, synthetic construct
  misc_feature 1..20: note = Description of Artificial Sequence: Synthetic oligonucleotide
  source 1..20: mol_type = other DNA
aaaaaatcctgtattcggag

SEQ ID NO: 9796 - DNA, 20 bp, synthetic construct
  misc_feature 1..20: note = Description of Artificial Sequence: Synthetic oligonucleotide
  source 1..20: mol_type = other DNA
aaaaatcctgtattcggaga

SEQ ID NO: 9797 - DNA, 20 bp, synthetic construct
  misc_feature 1..20: note = Description of Artificial Sequence: Synthetic oligonucleotide
  source 1..20: mol_type = other DNA
aaaatcctgtattcggagaa

SEQ ID NO: 9798 - DNA, 20 bp, synthetic construct
  misc_feature 1..20: note = Description of Artificial Sequence: Synthetic oligonucleotide
  source 1..20: mol_type = other DNA
aaatcctgtattcggagaaa

SEQ ID NO: 9799 - DNA, 20 bp, synthetic construct
  misc_feature 1..20: note = Description of Artificial Sequence: Synthetic oligonucleotide
  source 1..20: mol_type = other DNA
aatcctgtattcggagaaat

SEQ ID NO: 9800 - DNA, 20 bp, synthetic construct
  misc_feature 1..20: note = Description of Artificial Sequence: Synthetic oligonucleotide
  source 1..20: mol_type = other DNA
atcctgtattcggagaaatt

SEQ ID NO: 9801 - DNA, 20 bp, synthetic construct
  misc_feature 1..20: note = Description of Artificial Sequence: Synthetic oligonucleotide
  source 1..20: mol_type = other DNA
tcctgtattcggagaaattc

SEQ ID NO: 9802 - DNA, 20 bp, synthetic construct
  misc_feature 1..20: note = Description of Artificial Sequence: Synthetic oligonucleotide
  source 1..20: mol_type = other DNA
cctgtattcggagaaattca

SEQ ID NO: 9803 - DNA, 20 bp, synthetic construct
  misc_feature 1..20: note = Description of Artificial Sequence: Synthetic oligonucleotide
  source 1..20: mol_type = other DNA
ctgtattcggagaaattcat

SEQ ID NO: 9804 - DNA, 20 bp, synthetic construct
  misc_feature 1..20: note = Description of Artificial Sequence: Synthetic oligonucleotide
  source 1..20: mol_type = other DNA
tgtattcggagaaattcatt

SEQ ID NO: 9805 - DNA, 20 bp, synthetic construct
  misc_feature 1..20: note = Description of Artificial Sequence: Synthetic oligonucleotide
  source 1..20: mol_type = other DNA
gtattcggagaaattcattt

SEQ ID NO: 9806 - DNA, 20 bp, synthetic construct
  misc_feature 1..20: note = Description of Artificial Sequence: Synthetic oligonucleotide
  source 1..20: mol_type = other DNA
tattcggagaaattcattta

SEQ ID NO: 9807 - DNA, 20 bp, synthetic construct
  misc_feature 1..20: note = Description of Artificial Sequence: Synthetic oligonucleotide
  source 1..20: mol_type = other DNA
attcggagaaattcatttaa

SEQ ID NO: 9808 - DNA, 20 bp, synthetic construct
  misc_feature 1..20: note = Description of Artificial Sequence: Synthetic oligonucleotide
  source 1..20: mol_type = other DNA
ttcggagaaattcatttaag

SEQ ID NO: 9809 - DNA, 20 bp, synthetic construct
  misc_feature 1..20: note = Description of Artificial Sequence: Synthetic oligonucleotide
  source 1..20: mol_type = other DNA
tcggagaaattcatttaaga

SEQ ID NO: 9810 - DNA, 20 bp, synthetic construct
  misc_feature 1..20: note = Description of Artificial Sequence: Synthetic oligonucleotide
  source 1..20: mol_type = other DNA
cggagaaattcatttaagac

SEQ ID NO: 9811 - DNA, 20 bp, synthetic construct
  misc_feature 1..20: note = Description of Artificial Sequence: Synthetic oligonucleotide
  source 1..20: mol_type = other DNA
ggagaaattcatttaagacc

SEQ ID NO: 9812 - DNA, 20 bp, synthetic construct
  misc_feature 1..20: note = Description of Artificial Sequence: Synthetic oligonucleotide
  source 1..20: mol_type = other DNA
gagaaattcatttaagacca

SEQ ID NO: 9813 - DNA, 20 bp, synthetic construct
  misc_feature 1..20: note = Description of Artificial Sequence: Synthetic oligonucleotide
  source 1..20: mol_type = other DNA
agaaattcatttaagaccat

SEQ ID NO: 9814 - DNA, 20 bp, synthetic construct
  misc_feature 1..20: note = Description of Artificial Sequence: Synthetic oligonucleotide
  source 1..20: mol_type = other DNA
gaaattcatttaagaccatg

SEQ ID NO: 9815 - DNA, 20 bp, synthetic construct
  misc_feature 1..20: note = Description of Artificial Sequence: Synthetic oligonucleotide
  source 1..20: mol_type = other DNA
aaattcatttaagaccatgg

SEQ ID NO: 9816 - DNA, 20 bp, synthetic construct
  misc_feature 1..20: note = Description of Artificial Sequence: Synthetic oligonucleotide
  source 1..20: mol_type = other DNA
aattcatttaagaccatgga

SEQ ID NO: 9817 - DNA, 20 bp, synthetic construct
  misc_feature 1..20: note = Description of Artificial Sequence: Synthetic oligonucleotide
  source 1..20: mol_type = other DNA
attcatttaagaccatggaa

SEQ ID NO: 9818 - DNA, 20 bp, synthetic construct
  misc_feature 1..20: note = Description of Artificial Sequence: Synthetic oligonucleotide
  source 1..20: mol_type = other DNA
ttcatttaagaccatggaaa

SEQ ID NO: 9819 - DNA, 20 bp, synthetic construct
  misc_feature 1..20: note = Description of Artificial Sequence: Synthetic oligonucleotide
  source 1..20: mol_type = other DNA
tcatttaagaccatggaaaa

SEQ ID NO: 9820 - DNA, 20 bp, synthetic construct
  misc_feature 1..20: note = Description of Artificial Sequence: Synthetic oligonucleotide
  source 1..20: mol_type = other DNA
catttaagaccatggaaaaa

SEQ ID NO: 9821 - DNA, 20 bp, synthetic construct
  misc_feature 1..20: note = Description of Artificial Sequence: Synthetic oligonucleotide
  source 1..20: mol_type = other DNA
atttaagaccatggaaaaaa

SEQ ID NO: 9822 - DNA, 20 bp, synthetic construct
  misc_feature 1..20: note = Description of Artificial Sequence: Synthetic oligonucleotide
  source 1..20: mol_type = other DNA
tttaagaccatggaaaaaaa

SEQ ID NO: 9823 - DNA, 20 bp, synthetic construct
  misc_feature 1..20: note = Description of Artificial Sequence: Synthetic oligonucleotide
  source 1..20: mol_type = other DNA
ttaagaccatggaaaaaaat

SEQ ID NO: 9824 - DNA, 20 bp, synthetic construct
  misc_feature 1..20: note = Description of Artificial Sequence: Synthetic oligonucleotide
  source 1..20: mol_type = other DNA
taagaccatggaaaaaaata

SEQ ID NO: 9825 - DNA, 20 bp, synthetic construct
  misc_feature 1..20: note = Description of Artificial Sequence: Synthetic oligonucleotide
  source 1..20: mol_type = other DNA
aagaccatggaaaaaaatag

SEQ ID NO: 9826 - DNA, 20 bp, synthetic construct
  misc_feature 1..20: note = Description of Artificial Sequence: Synthetic oligonucleotide
  source 1..20: mol_type = other DNA
agaccatggaaaaaaataga

SEQ ID NO: 9827 - DNA, 20 bp, synthetic construct
  misc_feature 1..20: note = Description of Artificial Sequence: Synthetic oligonucleotide
  source 1..20: mol_type = other DNA
gaccatggaaaaaaatagac

SEQ ID NO: 9828 - DNA, 20 bp, synthetic construct
  misc_feature 1..20: note = Description of Artificial Sequence: Synthetic oligonucleotide
  source 1..20: mol_type = other DNA
accatggaaaaaaatagacg

SEQ ID NO: 9829 - DNA, 20 bp, synthetic construct
  misc_feature 1..20: note = Description of Artificial Sequence: Synthetic oligonucleotide
  source 1..20: mol_type = other DNA
ccatggaaaaaaatagacgt

SEQ ID NO: 9830 - DNA, 20 bp, synthetic construct
  misc_feature 1..20: note = Description of Artificial Sequence: Synthetic oligonucleotide
  source 1..20: mol_type = other DNA
catggaaaaaaatagacgta

SEQ ID NO: 9831 - DNA, 20 bp, synthetic construct
  misc_feature 1..20: note = Description of Artificial Sequence: Synthetic oligonucleotide
  source 1..20: mol_type = other DNA
atggaaaaaaatagacgtat

SEQ ID NO: 9832 - DNA, 20 bp, synthetic construct
  misc_feature 1..20: note = Description of Artificial Sequence: Synthetic oligonucleotide
  source 1..20: mol_type = other DNA
tggaaaaaaatagacgtatc

SEQ ID NO: 9833 - DNA, 20 bp, synthetic construct
  misc_feature 1..20: note = Description of Artificial Sequence: Synthetic oligonucleotide
  source 1..20: mol_type = other DNA
ggaaaaaaatagacgtatca

SEQ ID NO: 9834 - DNA, 20 bp, synthetic construct
  misc_feature 1..20: note = Description of Artificial Sequence: Synthetic oligonucleotide
  source 1..20: mol_type = other DNA
gaaaaaaatagacgtatcac

SEQ ID NO: 9835 - DNA, 20 bp, synthetic construct
  misc_feature 1..20: note = Description of Artificial Sequence: Synthetic oligonucleotide
  source 1..20: mol_type = other DNA
aaaaaaatagacgtatcaca

SEQ ID NO: 9836 - DNA, 20 bp, synthetic construct
  misc_feature 1..20: note = Description of Artificial Sequence: Synthetic oligonucleotide
  source 1..20: mol_type = other DNA
aaaaaatagacgtatcacaa

SEQ ID NO: 9837 - DNA, 20 bp, synthetic construct
  misc_feature 1..20: note = Description of Artificial Sequence: Synthetic oligonucleotide
  source 1..20: mol_type = other DNA
aaaaatagacgtatcacaat

SEQ ID NO: 9838 - DNA, 20 bp, synthetic construct
  misc_feature 1..20: note = Description of Artificial Sequence: Synthetic oligonucleotide
  source 1..20: mol_type = other DNA
aaaatagacgtatcacaatt

SEQ ID NO: 9839 - DNA, 20 bp, synthetic construct
  misc_feature 1..20: note = Description of Artificial Sequence: Synthetic oligonucleotide
  source 1..20: mol_type = other DNA
aaatagacgtatcacaattg

SEQ ID NO: 9840 - DNA, 20 bp, synthetic construct
  misc_feature 1..20: note = Description of Artificial Sequence: Synthetic oligonucleotide
  source 1..20: mol_type = other DNA
aatagacgtatcacaattga

SEQ ID NO: 9841 - DNA, 20 bp, synthetic construct
  misc_feature 1..20: note = Description of Artificial Sequence: Synthetic oligonucleotide
  source 1..20: mol_type = other DNA
atagacgtatcacaattgag

SEQ ID NO: 9842 - DNA, 20 bp, synthetic construct
  misc_feature 1..20: note = Description of Artificial Sequence: Synthetic oligonucleotide
  source 1..20: mol_type = other DNA
tagacgtatcacaattgagg

SEQ ID NO: 9843 - DNA, 20 bp, synthetic construct
  misc_feature 1..20: note = Description of Artificial Sequence: Synthetic oligonucleotide
  source 1..20: mol_type = other DNA
agacgtatcacaattgagga

SEQ ID NO: 9844 - DNA, 20 bp, synthetic construct
  misc_feature 1..20: note = Description of Artificial Sequence: Synthetic oligonucleotide
  source 1..20: mol_type = other DNA
gacgtatcacaattgaggaa

SEQ ID NO: 9845 - DNA, 20 bp, synthetic construct
  misc_feature 1..20: note = Description of Artificial Sequence: Synthetic oligonucleotide
  source 1..20: mol_type = other DNA
acgtatcacaattgaggaac

SEQ ID NO: 9846 - DNA, 20 bp, synthetic construct
  misc_feature 1..20: note = Description of Artificial Sequence: Synthetic oligonucleotide
  source 1..20: mol_type = other DNA
cgtatcacaattgaggaacc

SEQ ID NO: 9847 - DNA, 20 bp, synthetic construct
  misc_feature 1..20: note = Description of Artificial Sequence: Synthetic oligonucleotide
  source 1..20: mol_type = other DNA
gtatcacaattgaggaacct

SEQ ID NO: 9848 - DNA, 20 bp, synthetic construct
  misc_feature 1..20: note = Description of Artificial Sequence: Synthetic oligonucleotide
  source 1..20: mol_type = other DNA
tatcacaattgaggaacctt

SEQ ID NO: 9849 - DNA, 20 bp, synthetic construct
  misc_feature 1..20: note = Description of Artificial Sequence: Synthetic oligonucleotide
  source 1..20: mol_type = other DNA
atcacaattgaggaacctta

SEQ ID NO: 9850 - DNA, 20 bp, synthetic construct
  misc_feature 1..20: note = Description of Artificial Sequence: Synthetic oligonucleotide
  source 1..20: mol_type = other DNA
tcacaattgaggaaccttaa

SEQ ID NO: 9851 - DNA, 20 bp, synthetic construct
  misc_feature 1..20: note = Description of Artificial Sequence: Synthetic oligonucleotide
  source 1..20: mol_type = other DNA
cacaattgaggaaccttaag

SEQ ID NO: 9852 - DNA, 20 bp, synthetic construct
  misc_feature 1..20: note = Description of Artificial Sequence: Synthetic oligonucleotide
  source 1..20: mol_type = other DNA
acaattgaggaaccttaagg

SEQ ID NO: 9853 - DNA, 20 bp, synthetic construct
  misc_feature 1..20: note = Description of Artificial Sequence: Synthetic oligonucleotide
  source 1..20: mol_type = other DNA
caattgaggaaccttaagga

SEQ ID NO: 9854 - DNA, 20 bp, synthetic construct
  misc_feature 1..20: note = Description of Artificial Sequence: Synthetic oligonucleotide
  source 1..20: mol_type = other DNA
aattgaggaaccttaaggag

SEQ ID NO: 9855 - DNA, 20 bp, synthetic construct
  misc_feature 1..20: note = Description of Artificial Sequence: Synthetic oligonucleotide
  source 1..20: mol_type = other DNA
attgaggaaccttaaggagc

SEQ ID NO: 9856 - DNA, 20 bp, synthetic construct
  misc_feature 1..20: note = Description of Artificial Sequence: Synthetic oligonucleotide
  source 1..20: mol_type = other DNA
ttgaggaaccttaaggagcc

SEQ ID NO: 9857 - DNA, 20 bp, synthetic construct
  misc_feature 1..20: note = Description of Artificial Sequence: Synthetic oligonucleotide
  source 1..20: mol_type = other DNA
tgaggaaccttaaggagccg

SEQ ID NO: 9858 - DNA, 20 bp, synthetic construct
  misc_feature 1..20: note = Description of Artificial Sequence: Synthetic oligonucleotide
  source 1..20: mol_type = other DNA
gaggaaccttaaggagccgc

SEQ ID NO: 9859 - DNA, 20 bp, synthetic construct
  misc_feature 1..20: note = Description of Artificial Sequence: Synthetic oligonucleotide
  source 1..20: mol_type = other DNA
aggaaccttaaggagccgca

SEQ ID NO: 9860 - DNA, 20 bp, synthetic construct
  misc_feature 1..20: note = Description of Artificial Sequence: Synthetic oligonucleotide
  source 1..20: mol_type = other DNA
ggaaccttaaggagccgcat

SEQ ID NO: 9861 - DNA, 20 bp, synthetic construct
  misc_feature 1..20: note = Description of Artificial Sequence: Synthetic oligonucleotide
  source 1..20: mol_type = other DNA
gaaccttaaggagccgcatc

SEQ ID NO: 9862 - DNA, 20 bp, synthetic construct
  misc_feature 1..20: note = Description of Artificial Sequence: Synthetic oligonucleotide
  source 1..20: mol_type = other DNA
aaccttaaggagccgcatcc

SEQ ID NO: 9863 - DNA, 20 bp, synthetic construct
  misc_feature 1..20: note = Description of Artificial Sequence: Synthetic oligonucleotide
  source 1..20: mol_type = other DNA
accttaaggagccgcatcct

SEQ ID NO: 9864 - DNA, 20 bp, synthetic construct
  misc_feature 1..20: note = Description of Artificial Sequence: Synthetic oligonucleotide
  source 1..20: mol_type = other DNA
ccttaaggagccgcatcctt

SEQ ID NO: 9865 - DNA, 20 bp, synthetic construct
  misc_feature 1..20: note = Description of Artificial Sequence: Synthetic oligonucleotide
  source 1..20: mol_type = other DNA
cttaaggagccgcatccttc

SEQ ID NO: 9866 - DNA, 20 bp, synthetic construct
  misc_feature 1..20: note = Description of Artificial Sequence: Synthetic oligonucleotide
  source 1..20: mol_type = other DNA
ttaaggagccgcatccttcc

SEQ ID NO: 9867 - DNA, 20 bp, synthetic construct
  misc_feature 1..20: note = Description of Artificial Sequence: Synthetic oligonucleotide
  source 1..20: mol_type = other DNA
taaggagccgcatccttcct

SEQ ID NO: 9868 - DNA, 20 bp, synthetic construct
  misc_feature 1..20: note = Description of Artificial Sequence: Synthetic oligonucleotide
  source 1..20: mol_type = other DNA
aaggagccgcatccttcctg

SEQ ID NO: 9869 - DNA, 20 bp, synthetic construct
  misc_feature 1..20: note = Description of Artificial Sequence: Synthetic oligonucleotide
  source 1..20: mol_type = other DNA
aggagccgcatccttcctga

SEQ ID NO: 9870 - DNA, 20 bp, synthetic construct
  misc_feature 1..20: note = Description of Artificial Sequence: Synthetic oligonucleotide
  source 1..20: mol_type = other DNA
ggagccgcatccttcctgaa

SEQ ID NO: 9871 - DNA, 20 bp, synthetic construct
  misc_feature 1..20: note = Description of Artificial Sequence: Synthetic oligonucleotide
  source 1..20: mol_type = other DNA
gagccgcatccttcctgaac

SEQ ID NO: 9872 - DNA, 20 bp, synthetic construct
  misc_feature 1..20: note = Description of Artificial Sequence: Synthetic oligonucleotide
  source 1..20: mol_type = other DNA
agccgcatccttcctgaaca

SEQ ID NO: 9873 - DNA, 20 bp, synthetic construct
  misc_feature 1..20: note = Description of Artificial Sequence: Synthetic oligonucleotide
  source 1..20: mol_type = other DNA
gccgcatccttcctgaacac

SEQ ID NO: 9874 - DNA, 20 bp, synthetic construct
  misc_feature 1..20: note = Description of Artificial Sequence: Synthetic oligonucleotide
  source 1..20: mol_type = other DNA
ccgcatccttcctgaacaca

SEQ ID NO: 9875 - DNA, 20 bp, synthetic construct
  misc_feature 1..20: note = Description of Artificial Sequence: Synthetic oligonucleotide
  source 1..20: mol_type = other DNA
cgcatccttcctgaacacaa

SEQ ID NO: 9876 - DNA, 20 bp, synthetic construct
  misc_feature 1..20: note = Description of Artificial Sequence: Synthetic oligonucleotide
  source 1..20: mol_type = other DNA
gcatccttcctgaacacaaa

SEQ ID NO: 9877 - DNA, 20 bp, synthetic construct
  misc_feature 1..20: note = Description of Artificial Sequence: Synthetic oligonucleotide
  source 1..20: mol_type = other DNA
catccttcctgaacacaaag

SEQ ID NO: 9878 - DNA, 20 bp, synthetic construct
  misc_feature 1..20: note = Description of Artificial Sequence: Synthetic oligonucleotide
  source 1..20: mol_type = other DNA
atccttcctgaacacaaagg

SEQ ID NO: 9879 - DNA, 20 bp, synthetic construct
  misc_feature 1..20: note = Description of Artificial Sequence: Synthetic oligonucleotide
  source 1..20: mol_type = other DNA
tccttcctgaacacaaaggg

SEQ ID NO: 9880 - DNA, 20 bp, synthetic construct
  misc_feature 1..20: note = Description of Artificial Sequence: Synthetic oligonucleotide
  source 1..20: mol_type = other DNA
ccttcctgaacacaaaggga

SEQ ID NO: 9881 - DNA, 20 bp, synthetic construct
  misc_feature 1..20: note = Description of Artificial Sequence: Synthetic oligonucleotide
  source 1..20: mol_type = other DNA
cttcctgaacacaaagggac

SEQ ID NO: 9882 - DNA, 20 bp, synthetic construct
  misc_feature 1..20: note = Description of Artificial Sequence: Synthetic oligonucleotide
  source 1..20: mol_type = other DNA
ttcctgaacacaaagggact

SEQ ID NO: 9883 - DNA, 20 bp, synthetic construct
  misc_feature 1..20: note = Description of Artificial Sequence: Synthetic oligonucleotide
  source 1..20: mol_type = other DNA
tcctgaacacaaagggactc

SEQ ID NO: 9884 - DNA, 20 bp, synthetic construct
  misc_feature 1..20: note = Description of Artificial Sequence: Synthetic oligonucleotide
  source 1..20: mol_type = other DNA
cctgaacacaaagggactct

SEQ ID NO: 9885 - DNA, 20 bp, synthetic construct
  misc_feature 1..20: note = Description of Artificial Sequence: Synthetic oligonucleotide
  source 1..20: mol_type = other DNA
ctgaacacaaagggactctt

SEQ ID NO: 9886 - DNA, 20 bp, synthetic construct
  misc_feature 1..20: note = Description of Artificial Sequence: Synthetic oligonucleotide
  source 1..20: mol_type = other DNA
tgaacacaaagggactcttc

SEQ ID NO: 9887 - DNA, 20 bp, synthetic construct
  misc_feature 1..20: note = Description of Artificial Sequence: Synthetic oligonucleotide
  source 1..20: mol_type = other DNA
gaacacaaagggactcttca

SEQ ID NO: 9888 - DNA, 20 bp, synthetic construct
  misc_feature 1..20: note = Description of Artificial Sequence: Synthetic oligonucleotide
  source 1..20: mol_type = other DNA
aacacaaagggactcttcac

SEQ ID NO: 9889 - DNA, 20 bp, synthetic construct
  misc_feature 1..20: note = Description of Artificial Sequence: Synthetic oligonucleotide
  source 1..20: mol_type = other DNA
acacaaagggactcttcaca

SEQ ID NO: 9890 - DNA, 20 bp, synthetic construct
  misc_feature 1..20: note = Description of Artificial Sequence: Synthetic oligonucleotide
  source 1..20: mol_type = other DNA
cacaaagggactcttcacat

SEQ ID NO: 9891 - DNA, 20 bp, synthetic construct
  misc_feature 1..20: note = Description of Artificial Sequence: Synthetic oligonucleotide
  source 1..20: mol_type = other DNA
acaaagggactcttcacatg

SEQ ID NO: 9892 - DNA, 20 bp, synthetic construct
  misc_feature 1..20: note = Description of Artificial Sequence: Synthetic oligonucleotide
  source 1..20: mol_type = other DNA
caaagggactcttcacatgg

SEQ ID NO: 9893 - DNA, 20 bp, synthetic construct
  misc_feature 1..20: note = Description of Artificial Sequence: Synthetic oligonucleotide
  source 1..20: mol_type = other DNA
aaagggactcttcacatggt

SEQ ID NO: 9894 - DNA, 20 bp, synthetic construct
  misc_feature 1..20: note = Description of Artificial Sequence: Synthetic oligonucleotide
  source 1..20: mol_type = other DNA
aagggactcttcacatggtt

SEQ ID NO: 9895 - DNA, 20 bp, synthetic construct
  misc_feature 1..20: note = Description of Artificial Sequence: Synthetic oligonucleotide
  source 1..20: mol_type = other DNA
agggactcttcacatggtta

SEQ ID NO: 9896 - DNA, 20 bp, synthetic construct
  misc_feature 1..20: note = Description of Artificial Sequence: Synthetic oligonucleotide
  source 1..20: mol_type = other DNA
gggactcttcacatggttat

SEQ ID NO: 9897 - DNA, 20 bp, synthetic construct
  misc_feature 1..20: note = Description of Artificial Sequence: Synthetic oligonucleotide
  source 1..20: mol_type = other DNA
ggactcttcacatggttatg

SEQ ID NO: 9898 - DNA, 20 bp, synthetic construct
  misc_feature 1..20: note = Description of Artificial Sequence: Synthetic oligonucleotide
  source 1..20: mol_type = other DNA
gactcttcacatggttatgt

SEQ ID NO: 9899 - DNA, 20 bp, synthetic construct
  misc_feature 1..20: note = Description of Artificial Sequence: Synthetic oligonucleotide
  source 1..20: mol_type = other DNA
actcttcacatggttatgtg

SEQ ID NO: 9900 - DNA, 20 bp, synthetic construct
  misc_feature 1..20: note = Description of Artificial Sequence: Synthetic oligonucleotide
  source 1..20: mol_type = other DNA
ctcttcacatggttatgtgt

SEQ ID NO: 9901 - DNA, 20 bp, synthetic construct
  misc_feature 1..20: note = Description of Artificial Sequence: Synthetic oligonucleotide
  source 1..20: mol_type = other DNA
tcttcacatggttatgtgtc

SEQ ID NO: 9902 - DNA, 20 bp, synthetic construct
  misc_feature 1..20: note = Description of Artificial Sequence: Synthetic oligonucleotide
  source 1..20: mol_type = other DNA
cttcacatggttatgtgtct

SEQ ID NO: 9903 - DNA, 20 bp, synthetic construct
  misc_feature 1..20: note = Description of Artificial Sequence: Synthetic oligonucleotide
  source 1..20: mol_type = other DNA
ttcacatggttatgtgtctc

SEQ ID NO: 9904 - DNA, 20 bp, synthetic construct
  misc_feature 1..20: note = Description of Artificial Sequence: Synthetic oligonucleotide
  source 1..20: mol_type = other DNA
tcacatggttatgtgtctct

SEQ ID NO: 9905 - DNA, 20 bp, synthetic construct
  misc_feature 1..20: note = Description of Artificial Sequence: Synthetic oligonucleotide
  source 1..20: mol_type = other DNA
cacatggttatgtgtctcta

SEQ ID NO: 9906 - DNA, 20 bp, synthetic construct
  misc_feature 1..20: note = Description of Artificial Sequence: Synthetic oligonucleotide
  source 1..20: mol_type = other DNA
acatggttatgtgtctctac

SEQ ID NO: 9907 - DNA, 20 bp, synthetic construct
  misc_feature 1..20: note = Description of Artificial Sequence: Synthetic oligonucleotide
  source 1..20: mol_type = other DNA
catggttatgtgtctctaca

SEQ ID NO: 9908 - DNA, 20 bp, synthetic construct
  misc_feature 1..20: note = Description of Artificial Sequence: Synthetic oligonucleotide
  source 1..20: mol_type = other DNA
atggttatgtgtctctacac

SEQ ID NO: 9909 - DNA, 20 bp, synthetic construct
  misc_feature 1..20: note = Description of Artificial Sequence: Synthetic oligonucleotide
  source 1..20: mol_type = other DNA
tggttatgtgtctctacact

SEQ ID NO: 9910 - DNA, 20 bp, synthetic construct
  misc_feature 1..20: note = Description of Artificial Sequence: Synthetic oligonucleotide
  source 1..20: mol_type = other DNA
ggttatgtgtctctacactt

SEQ ID NO: 9911 - DNA, 20 bp, synthetic construct
  misc_feature 1..20: note = Description of Artificial Sequence: Synthetic oligonucleotide
  source 1..20: mol_type = other DNA
gttatgtgtctctacactta

SEQ ID NO: 9912 - DNA, 20 bp, synthetic construct
  misc_feature 1..20: note = Description of Artificial Sequence: Synthetic oligonucleotide
  source 1..20: mol_type = other DNA
ttatgtgtctctacacttaa

SEQ ID NO: 9913 - DNA, 20 bp, synthetic construct
  misc_feature 1..20: note = Description of Artificial Sequence: Synthetic oligonucleotide
  source 1..20: mol_type = other DNA
tatgtgtctctacacttaac

SEQ ID NO: 9914 - DNA, 20 bp, synthetic construct
  misc_feature 1..20: note = Description of Artificial Sequence: Synthetic oligonucleotide
  source 1..20: mol_type = other DNA
atgtgtctctacacttaact

SEQ ID NO: 9915 - DNA, 20 bp, synthetic construct
  misc_feature 1..20: note = Description of Artificial Sequence: Synthetic oligonucleotide
  source 1..20: mol_type = other DNA
tgtgtctctacacttaactc

SEQ ID NO: 9916 - DNA, 20 bp, synthetic construct
  misc_feature 1..20: note = Description of Artificial Sequence: Synthetic oligonucleotide
  source 1..20: mol_type = other DNA
gtgtctctacacttaactct

SEQ ID NO: 9917 - DNA, 20 bp, synthetic construct
  misc_feature 1..20: note = Description of Artificial Sequence: Synthetic oligonucleotide
  source 1..20: mol_type = other DNA
tgtctctacacttaactctg

SEQ ID NO: 9918 - DNA, 20 bp, synthetic construct
  misc_feature 1..20: note = Description of Artificial Sequence: Synthetic oligonucleotide
  source 1..20: mol_type = other DNA
gtctctacacttaactctga

SEQ ID NO: 9919 - DNA, 20 bp, synthetic construct
  misc_feature 1..20: note = Description of Artificial Sequence: Synthetic oligonucleotide
  source 1..20: mol_type = other DNA
tctctacacttaactctgag

SEQ ID NO: 9920 - DNA, 20 bp, synthetic construct
  misc_feature 1..20: note = Description of Artificial Sequence: Synthetic oligonucleotide
  source 1..20: mol_type = other DNA
ctctacacttaactctgagc

SEQ ID NO: 9921 - DNA, 20 bp, synthetic construct
  misc_feature 1..20: note = Description of Artificial Sequence: Synthetic oligonucleotide
  source 1..20: mol_type = other DNA
tctacacttaactctgagcc

SEQ ID NO: 9922 - DNA, 20 bp, synthetic construct
  misc_feature 1..20: note = Description of Artificial Sequence: Synthetic oligonucleotide
  source 1..20: mol_type = other DNA
ctacacttaactctgagcca

SEQ ID NO: 9923 - DNA, 20 bp, synthetic construct
  misc_feature 1..20: note = Description of Artificial Sequence: Synthetic oligonucleotide
  source 1..20: mol_type = other DNA
tacacttaactctgagccaa

SEQ ID NO: 9924 - DNA, 20 bp, synthetic construct
  misc_feature 1..20: note = Description of Artificial Sequence: Synthetic oligonucleotide
  source 1..20: mol_type = other DNA
acacttaactctgagccaat

SEQ ID NO: 9925 - DNA, 20 bp, synthetic construct
  misc_feature 1..20: note = Description of Artificial Sequence: Synthetic oligonucleotide
  source 1..20: mol_type = other DNA
cacttaactctgagccaatg

SEQ ID NO: 9926 - DNA, 20 bp, synthetic construct
  misc_feature 1..20: note = Description of Artificial Sequence: Synthetic oligonucleotide
  source 1..20: mol_type = other DNA
acttaactctgagccaatga

SEQ ID NO: 9927 - DNA, 20 bp, synthetic construct
  misc_feature 1..20: note = Description of Artificial Sequence: Synthetic oligonucleotide
  source 1..20: mol_type = other DNA
cttaactctgagccaatgag

SEQ ID NO: 9928 - DNA, 20 bp, synthetic construct
  misc_feature 1..20: note = Description of Artificial Sequence: Synthetic oligonucleotide
  source 1..20: mol_type = other DNA
ttaactctgagccaatgaga

SEQ ID NO: 9929 - DNA, 20 bp, synthetic construct
  misc_feature 1..20: note = Description of Artificial Sequence: Synthetic oligonucleotide
  source 1..20: mol_type = other DNA
taactctgagccaatgagaa

SEQ ID NO: 9930 - DNA, 20 bp, synthetic construct
  misc_feature 1..20: note = Description of Artificial Sequence: Synthetic oligonucleotide
  source 1..20: mol_type = other DNA
aactctgagccaatgagaag

SEQ ID NO: 9931 - DNA, 20 bp, synthetic construct
  misc_feature 1..20: note = Description of Artificial Sequence: Synthetic oligonucleotide
  source 1..20: mol_type = other DNA
actctgagccaatgagaaga

SEQ ID NO: 9932 - DNA, 20 bp, synthetic construct
  misc_feature 1..20: note = Description of Artificial Sequence: Synthetic oligonucleotide
  source 1..20: mol_type = other DNA
ctctgagccaatgagaagag

SEQ ID NO: 9933 - DNA, 20 bp, synthetic construct
  misc_feature 1..20: note = Description of Artificial Sequence: Synthetic oligonucleotide
  source 1..20: mol_type = other DNA
tctgagccaatgagaagagt

SEQ ID NO: 9934 - DNA, 20 bp, synthetic construct
  misc_feature 1..20: note = Description of Artificial Sequence: Synthetic oligonucleotide
  source 1..20: mol_type = other DNA
ctgagccaatgagaagagtt

SEQ ID NO: 9935 - DNA, 20 bp, synthetic construct
  misc_feature 1..20: note = Description of Artificial Sequence: Synthetic oligonucleotide
  source 1..20: mol_type = other DNA
tgagccaatgagaagagtta

SEQ ID NO: 9936 - DNA, 20 bp, synthetic construct
  misc_feature 1..20: note = Description of Artificial Sequence: Synthetic oligonucleotide
  source 1..20: mol_type = other DNA
gagccaatgagaagagttac

SEQ ID NO: 9937 - DNA, 20 bp, synthetic construct
  misc_feature 1..20: note = Description of Artificial Sequence: Synthetic oligonucleotide
  source 1..20: mol_type = other DNA
agccaatgagaagagttacg

SEQ ID NO: 9938 - DNA, 20 bp, synthetic construct
  misc_feature 1..20: note = Description of Artificial Sequence: Synthetic oligonucleotide
  source 1..20: mol_type = other DNA
gccaatgagaagagttacgt

SEQ ID NO: 9939 - DNA, 20 bp, synthetic construct
  misc_feature 1..20: note = Description of Artificial Sequence: Synthetic oligonucleotide
  source 1..20: mol_type = other DNA
ccaatgagaagagttacgtt

SEQ ID NO: 9940 - DNA, 20 bp, synthetic construct
  misc_feature 1..20: note = Description of Artificial Sequence: Synthetic oligonucleotide
  source 1..20: mol_type = other DNA
caatgagaagagttacgttt

SEQ ID NO: 9941 - DNA, 20 bp, synthetic construct
  misc_feature 1..20: note = Description of Artificial Sequence: Synthetic oligonucleotide
  source 1..20: mol_type = other DNA
aatgagaagagttacgttta

SEQ ID NO: 9942 - DNA, 20 bp, synthetic construct
  misc_feature 1..20: note = Description of Artificial Sequence: Synthetic oligonucleotide
  source 1..20: mol_type = other DNA
atgagaagagttacgtttac

SEQ ID NO: 9943 - DNA, 20 bp, synthetic construct
  misc_feature 1..20: note = Description of Artificial Sequence: Synthetic oligonucleotide
  source 1..20: mol_type = other DNA
tgagaagagttacgtttaca

SEQ ID NO: 9944 - DNA, 20 bp, synthetic construct
  misc_feature 1..20: note = Description of Artificial Sequence: Synthetic oligonucleotide
  source 1..20: mol_type = other DNA
gagaagagttacgtttacag

SEQ ID NO: 9945 - DNA, 20 bp, synthetic construct
  misc_feature 1..20: note = Description of Artificial Sequence: Synthetic oligonucleotide
  source 1..20: mol_type = other DNA
agaagagttacgtttacaga

SEQ ID NO: 9946 - DNA, 20 bp, synthetic construct
  misc_feature 1..20: note = Description of Artificial Sequence: Synthetic oligonucleotide
  source 1..20: mol_type = other DNA
gaagagttacgtttacagag

SEQ ID NO: 9947 - DNA, 20 bp, synthetic construct
  misc_feature 1..20: note = Description of Artificial Sequence: Synthetic oligonucleotide
  source 1..20: mol_type = other DNA
aagagttacgtttacagaga

SEQ ID NO: 9948 - DNA, 20 bp, synthetic construct
  misc_feature 1..20: note = Description of Artificial Sequence: Synthetic oligonucleotide
  source 1..20: mol_type = other DNA
agagttacgtttacagagag

SEQ ID NO: 9949 - DNA, 20 bp, synthetic construct
  misc_feature 1..20: note = Description of Artificial Sequence: Synthetic oligonucleotide
  source 1..20: mol_type = other DNA
gagttacgtttacagagaga

SEQ ID NO: 9950 - DNA, 20 bp, synthetic construct
  misc_feature 1..20: note = Description of Artificial Sequence: Synthetic oligonucleotide
  source 1..20: mol_type = other DNA
agttacgtttacagagagag

SEQ ID NO: 9951 - DNA, 20 bp, synthetic construct
  misc_feature 1..20: note = Description of Artificial Sequence: Synthetic oligonucleotide
  source 1..20: mol_type = other DNA
gttacgtttacagagagagg

SEQ ID NO: 9952 - DNA, 20 bp, synthetic construct
  misc_feature 1..20: note = Description of Artificial Sequence: Synthetic oligonucleotide
  source 1..20: mol_type = other DNA
ttacgtttacagagagagga

SEQ ID NO: 9953 - DNA, 20 bp, synthetic construct
  misc_feature 1..20: note = Description of Artificial Sequence: Synthetic oligonucleotide
  source 1..20: mol_type = other DNA
tacgtttacagagagaggac

SEQ ID NO: 9954 - DNA, 20 bp, synthetic construct
  misc_feature 1..20: note = Description of Artificial Sequence: Synthetic oligonucleotide
  source 1..20: mol_type = other DNA
acgtttacagagagaggaca

SEQ ID NO: 9955 - DNA, 20 bp, synthetic construct
  misc_feature 1..20: note = Description of Artificial Sequence: Synthetic oligonucleotide
  source 1..20: mol_type = other DNA
cgtttacagagagaggacac

SEQ ID NO: 9956 - DNA, 20 bp, synthetic construct
  misc_feature 1..20: note = Description of Artificial Sequence: Synthetic oligonucleotide
  source 1..20: mol_type = other DNA
gtttacagagagaggacaca

SEQ ID NO: 9957 - DNA, 20 bp, synthetic construct
  misc_feature 1..20: note = Description of Artificial Sequence: Synthetic oligonucleotide
  source 1..20: mol_type = other DNA
tttacagagagaggacacaa

SEQ ID NO: 9958 - DNA, 20 bp, synthetic construct
  misc_feature 1..20: note = Description of Artificial Sequence: Synthetic oligonucleotide
  source 1..20: mol_type = other DNA
ttacagagagaggacacaaa

SEQ ID NO: 9959 - DNA, 20 bp, synthetic construct
  misc_feature 1..20: note = Description of Artificial Sequence: Synthetic oligonucleotide
  source 1..20: mol_type = other DNA
tacagagagaggacacaaaa

SEQ ID NO: 9960 - DNA, 20 bp, synthetic construct
  misc_feature 1..20: note = Description of Artificial Sequence: Synthetic oligonucleotide
  source 1..20: mol_type = other DNA
acagagagaggacacaaaat

SEQ ID NO: 9961 - DNA, 20 bp, synthetic construct
  misc_feature 1..20: note = Description of Artificial Sequence: Synthetic oligonucleotide
  source 1..20: mol_type = other DNA
cagagagaggacacaaaatt

SEQ ID NO: 9962 - DNA, 20 bp, synthetic construct
  misc_feature 1..20: note = Description of Artificial Sequence: Synthetic oligonucleotide
  source 1..20: mol_type = other DNA
agagagaggacacaaaattc

SEQ ID NO: 9963 - DNA, 20 bp, synthetic construct
  misc_feature 1..20: note = Description of Artificial Sequence: Synthetic oligonucleotide
  source 1..20: mol_type = other DNA
gagagaggacacaaaattcc

SEQ ID NO: 9964 - DNA, 20 bp, synthetic construct
  misc_feature 1..20: note = Description of Artificial Sequence: Synthetic oligonucleotide
  source 1..20: mol_type = other DNA
agagaggacacaaaattcca

SEQ ID NO: 9965 - DNA, 20 bp, synthetic construct
  misc_feature 1..20: note = Description of Artificial Sequence: Synthetic oligonucleotide
  source 1..20: mol_type = other DNA
gagaggacacaaaattccat

SEQ ID NO: 9966 - DNA, 20 bp, synthetic construct
  misc_feature 1..20: note = Description of Artificial Sequence: Synthetic oligonucleotide
  source 1..20: mol_type = other DNA
agaggacacaaaattccatt

SEQ ID NO: 9967 - DNA, 20 bp, synthetic construct
  misc_feature 1..20: note = Description of Artificial Sequence: Synthetic oligonucleotide
  source 1..20: mol_type = other DNA
gaggacacaaaattccatta

SEQ ID NO: 9968 - DNA, 20 bp, synthetic construct
  misc_feature 1..20: note = Description of Artificial Sequence: Synthetic oligonucleotide
  source 1..20: mol_type = other DNA
aggacacaaaattccattaa

SEQ ID NO: 9969 - DNA, 20 bp, synthetic construct
  misc_feature 1..20: note = Description of Artificial Sequence: Synthetic oligonucleotide
  source 1..20: mol_type = other DNA
ggacacaaaattccattaat

SEQ ID NO: 9970 - DNA, 20 bp, synthetic construct
  misc_feature 1..20: note = Description of Artificial Sequence: Synthetic oligonucleotide
  source 1..20: mol_type = other DNA
gacacaaaattccattaatg

SEQ ID NO: 9971 - DNA, 20 bp, synthetic construct
  misc_feature 1..20: note = Description of Artificial Sequence: Synthetic oligonucleotide
  source 1..20: mol_type = other DNA
acacaaaattccattaatgc

SEQ ID NO: 9972 - DNA, 20 bp, synthetic construct
  misc_feature 1..20: note = Description of Artificial Sequence: Synthetic oligonucleotide
  source 1..20: mol_type = other DNA
cacaaaattccattaatgct

SEQ ID NO: 9973 - DNA, 20 bp, synthetic construct
  misc_feature 1..20: note = Description of Artificial Sequence: Synthetic oligonucleotide
  source 1..20: mol_type = other DNA
acaaaattccattaatgctc

SEQ ID NO: 9974 - DNA, 20 bp, synthetic construct
  misc_feature 1..20: note = Description of Artificial Sequence: Synthetic oligonucleotide
  source 1..20: mol_type = other DNA
caaaattccattaatgctca

SEQ ID NO: 9975 - DNA, 20 bp, synthetic construct
  misc_feature 1..20: note = Description of Artificial Sequence: Synthetic oligonucleotide
  source 1..20: mol_type = other DNA
aaaattccattaatgctcat

SEQ ID NO: 9976 - DNA, 20 bp, synthetic construct
  misc_feature 1..20: note = Description of Artificial Sequence: Synthetic oligonucleotide
  source 1..20: mol_type = other DNA
aaattccattaatgctcatt

SEQ ID NO: 9977 - DNA, 20 bp, synthetic construct
  misc_feature 1..20: note = Description of Artificial Sequence: Synthetic oligonucleotide
  source 1..20: mol_type = other DNA
aattccattaatgctcattc

SEQ ID NO: 9978 - DNA, 20 bp, synthetic construct
  misc_feature 1..20: note = Description of Artificial Sequence: Synthetic oligonucleotide
  source 1..20: mol_type = other DNA
attccattaatgctcattcc

SEQ ID NO: 9979 - DNA, 20 bp, synthetic construct
  misc_feature 1..20: note = Description of Artificial Sequence: Synthetic oligonucleotide
  source 1..20: mol_type = other DNA
ttccattaatgctcattcct

SEQ ID NO: 9980 - DNA, 20 bp, synthetic construct
  misc_feature 1..20: note = Description of Artificial Sequence: Synthetic oligonucleotide
  source 1..20: mol_type = other DNA
tccattaatgctcattcctg

SEQ ID NO: 9981 - DNA, 20 bp, synthetic construct
  misc_feature 1..20: note = Description of Artificial Sequence: Synthetic oligonucleotide
  source 1..20: mol_type = other DNA
ccattaatgctcattcctgg

SEQ ID NO: 9982 - DNA, 20 bp, synthetic construct
  misc_feature 1..20: note = Description of Artificial Sequence: Synthetic oligonucleotide
  source 1..20: mol_type = other DNA
cattaatgctcattcctggt

SEQ ID NO: 9983 - DNA, 20 bp, synthetic construct
  misc_feature 1..20: note = Description of Artificial Sequence: Synthetic oligonucleotide
  source 1..20: mol_type = other DNA
attaatgctcattcctggta

SEQ ID NO: 9984 - DNA, 20 bp, synthetic construct
  misc_feature 1..20: note = Description of Artificial Sequence: Synthetic oligonucleotide
  source 1..20: mol_type = other DNA
ttaatgctcattcctggtaa

SEQ ID NO: 9985 - DNA, 20 bp, synthetic construct
  misc_feature 1..20: note = Description of Artificial Sequence: Synthetic oligonucleotide
  source 1..20: mol_type = other DNA
taatgctcattcctggtaaa

SEQ ID NO: 9986 - DNA, 20 bp, synthetic construct
  misc_feature 1..20: note = Description of Artificial Sequence: Synthetic oligonucleotide
  source 1..20: mol_type = other DNA
aatgctcattcctggtaaat

SEQ ID NO: 9987 - DNA, 20 bp, synthetic construct
  misc_feature 1..20: note = Description of Artificial Sequence: Synthetic oligonucleotide
  source 1..20: mol_type = other DNA
atgctcattcctggtaaatc

SEQ ID NO: 9988 - DNA, 20 bp, synthetic construct
  misc_feature 1..20: note = Description of Artificial Sequence: Synthetic oligonucleotide
  source 1..20: mol_type = other DNA
tgctcattcctggtaaatct

SEQ ID NO: 9989 - DNA, 20 bp, synthetic construct
  misc_feature 1..20: note = Description of Artificial Sequence: Synthetic oligonucleotide
  source 1..20: mol_type = other DNA
gctcattcctggtaaatctt

SEQ ID NO: 9990 - DNA, 20 bp, synthetic construct
  misc_feature 1..20: note = Description of Artificial Sequence: Synthetic oligonucleotide
  source 1..20: mol_type = other DNA
ctcattcctggtaaatctta

SEQ ID NO: 9991 - DNA, 20 bp, synthetic construct
  misc_feature 1..20: note = Description of Artificial Sequence: Synthetic oligonucleotide
  source 1..20: mol_type = other DNA
tcattcctggtaaatcttag

SEQ ID NO: 9992 - DNA, 20 bp, synthetic construct
  misc_feature 1..20: note = Description of Artificial Sequence: Synthetic oligonucleotide
  source 1..20: mol_type = other DNA
cattcctggtaaatcttagg

SEQ ID NO: 9993 - DNA, 20 bp, synthetic construct
  misc_feature 1..20: note = Description of Artificial Sequence: Synthetic oligonucleotide
  source 1..20: mol_type = other DNA
attcctggtaaatcttagga

SEQ ID NO: 9994 - DNA, 20 bp, synthetic construct
  misc_feature 1..20: note = Description of Artificial Sequence: Synthetic oligonucleotide
  source 1..20: mol_type = other DNA
ttcctggtaaatcttaggaa

SEQ ID NO: 9995 - DNA, 20 bp, synthetic construct
  misc_feature 1..20: note = Description of Artificial Sequence: Synthetic oligonucleotide
  source 1..20: mol_type = other DNA
tcctggtaaatcttaggaac

SEQ ID NO: 9996 - DNA, 20 bp, synthetic construct
  misc_feature 1..20: note = Description of Artificial Sequence: Synthetic oligonucleotide
  source 1..20: mol_type = other DNA
cctggtaaatcttaggaaca

SEQ ID NO: 9997 - DNA, 20 bp, synthetic construct
  misc_feature 1..20: note = Description of Artificial Sequence: Synthetic oligonucleotide
  source 1..20: mol_type = other DNA
ctggtaaatcttaggaacac

SEQ ID NO: 9998 - DNA, 20 bp, synthetic construct
  misc_feature 1..20: note = Description of Artificial Sequence: Synthetic oligonucleotide
  source 1..20: mol_type = other DNA
tggtaaatcttaggaacacc

SEQ ID NO: 9999 - DNA, 20 bp, synthetic construct
  misc_feature 1..20: note = Description of Artificial Sequence: Synthetic oligonucleotide
  source 1..20: mol_type = other DNA
ggtaaatcttaggaacacca

SEQ ID NO: 10000 - DNA, 20 bp, synthetic construct
  misc_feature 1..20: note = Description of Artificial Sequence: Synthetic oligonucleotide
  source 1..20: mol_type = other DNA
gtaaatcttaggaacaccag

SEQ ID NO: 10001 - DNA, 20 bp, synthetic construct
  misc_feature 1..20: note = Description of Artificial Sequence: Synthetic oligonucleotide
  source 1..20: mol_type = other DNA
taaatcttaggaacaccaga

SEQ ID NO: 10002 - DNA, 20 bp, synthetic construct
  misc_feature 1..20: note = Description of Artificial Sequence: Synthetic oligonucleotide
  source 1..20: mol_type = other DNA
aaatcttaggaacaccagag

SEQ ID NO: 10003 - DNA, 20 bp, synthetic construct
  misc_feature 1..20: note = Description of Artificial Sequence: Synthetic oligonucleotide
  source 1..20: mol_type = other DNA
aatcttaggaacaccagaga

SEQ ID NO: 10004 - DNA, 20 bp, synthetic construct
  misc_feature 1..20: note = Description of Artificial Sequence: Synthetic oligonucleotide
  source 1..20: mol_type = other DNA
atcttaggaacaccagagaa

SEQ ID NO: 10005 - DNA, 20 bp, synthetic construct
  misc_feature 1..20: note = Description of Artificial Sequence: Synthetic oligonucleotide
  source 1..20: mol_type = other DNA
tcttaggaacaccagagaac

SEQ ID NO: 10006 - DNA, 20 bp, synthetic construct
  misc_feature 1..20: note = Description of Artificial Sequence: Synthetic oligonucleotide
  source 1..20: mol_type = other DNA
cttaggaacaccagagaact

SEQ ID NO: 10007 - DNA, 20 bp, synthetic construct
  misc_feature 1..20: note = Description of Artificial Sequence: Synthetic oligonucleotide
  source 1..20: mol_type = other DNA
ttaggaacaccagagaactg

SEQ ID NO: 10008 - DNA, 20 bp, synthetic construct
  misc_feature 1..20: note = Description of Artificial Sequence: Synthetic oligonucleotide
  source 1..20: mol_type = other DNA
taggaacaccagagaactgt

SEQ ID NO: 10009 - DNA, 20 bp, synthetic construct
  misc_feature 1..20: note = Description of Artificial Sequence: Synthetic oligonucleotide
  source 1..20: mol_type = other DNA
aggaacaccagagaactgtt

SEQ ID NO: 10010 - DNA, 20 bp, synthetic construct
  misc_feature 1..20: note = Description of Artificial Sequence: Synthetic oligonucleotide
  source 1..20: mol_type = other DNA
ggaacaccagagaactgttt

SEQ ID NO: 10011 - DNA, 20 bp, synthetic construct
  misc_feature 1..20: note = Description of Artificial Sequence: Synthetic oligonucleotide
  source 1..20: mol_type = other DNA
gaacaccagagaactgtttc

SEQ ID NO: 10012 - DNA, 20 bp, synthetic construct
  misc_feature 1..20: note = Description of Artificial Sequence: Synthetic oligonucleotide
  source 1..20: mol_type = other DNA
aacaccagagaactgtttct

SEQ ID NO: 10013 - DNA, 20 bp, synthetic construct
  misc_feature 1..20: note = Description of Artificial Sequence: Synthetic oligonucleotide
  source 1..20: mol_type = other DNA
acaccagagaactgtttctg

SEQ ID NO: 10014 - DNA, 20 bp, synthetic construct
  misc_feature 1..20: note = Description of Artificial Sequence: Synthetic oligonucleotide
  source 1..20: mol_type = other DNA
caccagagaactgtttctgg

SEQ ID NO: 10015 - DNA, 20 bp, synthetic construct
  misc_feature 1..20: note = Description of Artificial Sequence: Synthetic oligonucleotide
  source 1..20: mol_type = other DNA
accagagaactgtttctggc

SEQ ID NO: 10016 - DNA, 20 bp, synthetic construct
  misc_feature 1..20: note = Description of Artificial Sequence: Synthetic oligonucleotide
  source 1..20: mol_type = other DNA
ccagagaactgtttctggca

SEQ ID NO: 10017 - DNA, 20 bp, synthetic construct
  misc_feature 1..20: note = Description of Artificial Sequence: Synthetic oligonucleotide
  source 1..20: mol_type = other DNA
cagagaactgtttctggcaa

SEQ ID NO: 10018 - DNA, 20 bp, synthetic construct
  misc_feature 1..20: note = Description of Artificial Sequence: Synthetic oligonucleotide
  source 1..20: mol_type = other DNA
agagaactgtttctggcaaa

SEQ ID NO: 10019 - DNA, 20 bp, synthetic construct
  misc_feature 1..20: note = Description of Artificial Sequence: Synthetic oligonucleotide
  source 1..20: mol_type = other DNA
gagaactgtttctggcaaaa

SEQ ID NO: 10020 - DNA, 20 bp, synthetic construct
  misc_feature 1..20: note = Description of Artificial Sequence: Synthetic oligonucleotide
  source 1..20: mol_type = other DNA
agaactgtttctggcaaaac

SEQ ID NO: 10021 - DNA, 20 bp, synthetic construct
  misc_feature 1..20: note = Description of Artificial Sequence: Synthetic oligonucleotide
  source 1..20: mol_type = other DNA
gaactgtttctggcaaaact

SEQ ID NO: 10022 - DNA, 20 bp, synthetic construct
  misc_feature 1..20: note = Description of Artificial Sequence: Synthetic oligonucleotide
  source 1..20: mol_type = other DNA
aactgtttctggcaaaactt

SEQ ID NO: 10023 - DNA, 20 bp, synthetic construct
  misc_feature 1..20: note = Description of Artificial Sequence: Synthetic oligonucleotide
  source 1..20: mol_type = other DNA
actgtttctggcaaaacttt

SEQ ID NO: 10024 - DNA, 20 bp, synthetic construct
  misc_feature 1..20: note = Description of Artificial Sequence: Synthetic oligonucleotide
  source 1..20: mol_type = other DNA
ctgtttctggcaaaactttg

SEQ ID NO: 10025 - DNA, 20 bp, synthetic construct
  misc_feature 1..20: note = Description of Artificial Sequence: Synthetic oligonucleotide
  source 1..20: mol_type = other DNA
tgtttctggcaaaactttgc

SEQ ID NO: 10026 - DNA, 20 bp, synthetic construct
  misc_feature 1..20: note = Description of Artificial Sequence: Synthetic oligonucleotide
  source 1..20: mol_type = other DNA
gtttctggcaaaactttgct

SEQ ID NO: 10027 - DNA, 20 bp, synthetic construct
  misc_feature 1..20: note = Description of Artificial Sequence: Synthetic oligonucleotide
  source 1..20: mol_type = other DNA
tttctggcaaaactttgctt

SEQ ID NO: 10028 - DNA, 20 bp, synthetic construct
  misc_feature 1..20: note = Description of Artificial Sequence: Synthetic oligonucleotide
  source 1..20: mol_type = other DNA
ttctggcaaaactttgcttc

SEQ ID NO: 10029 - DNA, 20 bp, synthetic construct
  misc_feature 1..20: note = Description of Artificial Sequence: Synthetic oligonucleotide
  source 1..20: mol_type = other DNA
tctggcaaaactttgcttcc

SEQ ID NO: 10030 - DNA, 20 bp, synthetic construct
  misc_feature 1..20: note = Description of Artificial Sequence: Synthetic oligonucleotide
  source 1..20: mol_type = other DNA
ctggcaaaactttgcttcca

SEQ ID NO: 10031 - DNA, 20 bp, synthetic construct
  misc_feature 1..20: note = Description of Artificial Sequence: Synthetic oligonucleotide
  source 1..20: mol_type = other DNA
tggcaaaactttgcttccag

SEQ ID NO: 10032 - DNA, 20 bp, synthetic construct
  misc_feature 1..20: note = Description of Artificial Sequence: Synthetic oligonucleotide
  source 1..20: mol_type = other DNA
ggcaaaactttgcttccaga

SEQ ID NO: 10033 - DNA, 20 bp, synthetic construct
  misc_feature 1..20: note = Description of Artificial Sequence: Synthetic oligonucleotide
  source 1..20: mol_type = other DNA
gcaaaactttgcttccagag

SEQ ID NO: 10034 - DNA, 20 bp, synthetic construct
  misc_feature 1..20: note = Description of Artificial Sequence: Synthetic oligonucleotide
  source 1..20: mol_type = other DNA
caaaactttgcttccagagg

SEQ ID NO: 10035 - DNA, 20 bp, synthetic construct
  misc_feature 1..20: note = Description of Artificial Sequence: Synthetic oligonucleotide
  source 1..20: mol_type = other DNA
aaaactttgcttccagagga

SEQ ID NO: 10036 - DNA, 20 bp, synthetic construct
  misc_feature 1..20: note = Description of Artificial Sequence: Synthetic oligonucleotide
  source 1..20: mol_type = other DNA
aaactttgcttccagaggaa

SEQ ID NO: 10037 - DNA, 20 bp, synthetic construct
  misc_feature 1..20: note = Description of Artificial Sequence: Synthetic oligonucleotide
  source 1..20: mol_type = other DNA
aactttgcttccagaggaac

SEQ ID NO: 10038 - DNA, 20 bp, synthetic construct
  misc_feature 1..20: note = Description of Artificial Sequence: Synthetic oligonucleotide
  source 1..20: mol_type = other DNA
actttgcttccagaggaaca

SEQ ID NO: 10039 - DNA, 20 bp, synthetic construct
  misc_feature 1..20: note = Description of Artificial Sequence: Synthetic oligonucleotide
  source 1..20: mol_type = other DNA
ctttgcttccagaggaacag

SEQ ID NO: 10040 - DNA, 20 bp, synthetic construct
  misc_feature 1..20: note = Description of Artificial Sequence: Synthetic oligonucleotide
  source 1..20: mol_type = other DNA
tttgcttccagaggaacagc

SEQ ID NO: 10041 - DNA, 20 bp, synthetic construct
  misc_feature 1..20: note = Description of Artificial Sequence: Synthetic oligonucleotide
  source 1..20: mol_type = other DNA
ttgcttccagaggaacagct

SEQ ID NO: 10042 - DNA, 20 bp, synthetic construct
  misc_feature 1..20: note = Description of Artificial Sequence: Synthetic oligonucleotide
  source 1..20: mol_type = other DNA
tgcttccagaggaacagctg

SEQ ID NO: 10043 - DNA, 20 bp, synthetic construct
  misc_feature 1..20: note = Description of Artificial Sequence: Synthetic oligonucleotide
  source 1..20: mol_type = other DNA
gcttccagaggaacagctgt

SEQ ID NO: 10044 - DNA, 20 bp, synthetic construct
  misc_feature 1..20: note = Description of Artificial Sequence: Synthetic oligonucleotide
  source 1..20: mol_type = other DNA
cttccagaggaacagctgtt

SEQ ID NO: 10045 - DNA, 20 bp, synthetic construct
  misc_feature 1..20: note = Description of Artificial Sequence: Synthetic oligonucleotide
  source 1..20: mol_type = other DNA
ttccagaggaacagctgtta

SEQ ID NO: 10046 - DNA, 20 bp, synthetic construct
  misc_feature 1..20: note = Description of Artificial Sequence: Synthetic oligonucleotide
  source 1..20: mol_type = other DNA
tccagaggaacagctgttac

SEQ ID NO: 10047 - DNA, 20 bp, synthetic construct
  misc_feature 1..20: note = Description of Artificial Sequence: Synthetic oligonucleotide
  source 1..20: mol_type = other DNA
ccagaggaacagctgttaca

SEQ ID NO: 10048 - DNA, 20 bp, synthetic construct
  misc_feature 1..20: note = Description of Artificial Sequence: Synthetic oligonucleotide
  source 1..20: mol_type = other DNA
cagaggaacagctgttacag

SEQ ID NO: 10049 - DNA, 20 bp, synthetic construct
  misc_feature 1..20: note = Description of Artificial Sequence: Synthetic oligonucleotide
  source 1..20: mol_type = other DNA
agaggaacagctgttacagt

SEQ ID NO: 10050 - DNA, 20 bp, synthetic construct
  misc_feature 1..20: note = Description of Artificial Sequence: Synthetic oligonucleotide
  source 1..20: mol_type = other DNA
gaggaacagctgttacagtt

SEQ ID NO: 10051 - DNA, 20 bp, synthetic construct
  misc_feature 1..20: note = Description of Artificial Sequence: Synthetic oligonucleotide
  source 1..20: mol_type = other DNA
aggaacagctgttacagttt

SEQ ID NO: 10052 - DNA, 20 bp, synthetic construct
  misc_feature 1..20: note = Description of Artificial Sequence: Synthetic oligonucleotide
  source 1..20: mol_type = other DNA
ggaacagctgttacagtttg

SEQ ID NO: 10053 - DNA, 20 bp, synthetic construct
  misc_feature 1..20: note = Description of Artificial Sequence: Synthetic oligonucleotide
  source 1..20: mol_type = other DNA
gaacagctgttacagtttgg

SEQ ID NO: 10054 - DNA, 20 bp, synthetic construct
  misc_feature 1..20: note = Description of Artificial Sequence: Synthetic oligonucleotide
  source 1..20: mol_type = other DNA
aacagctgttacagtttggt

SEQ ID NO: 10055 - DNA, 20 bp, synthetic construct
  misc_feature 1..20: note = Description of Artificial Sequence: Synthetic oligonucleotide
  source 1..20: mol_type = other DNA
acagctgttacagtttggtg

SEQ ID NO: 10056 - DNA, 20 bp, synthetic construct
  misc_feature 1..20: note = Description of Artificial Sequence: Synthetic oligonucleotide
  source 1..20: mol_type = other DNA
cagctgttacagtttggtgc

SEQ ID NO: 10057 - DNA, 20 bp, synthetic construct
  misc_feature 1..20: note = Description of Artificial Sequence: Synthetic oligonucleotide
  source 1..20: mol_type = other DNA
agctgttacagtttggtgct

SEQ ID NO: 10058 - DNA, 20 bp, synthetic construct
  misc_feature 1..20: note = Description of Artificial Sequence: Synthetic oligonucleotide
  source 1..20: mol_type = other DNA
gctgttacagtttggtgctt

SEQ ID NO: 10059 - DNA, 20 bp, synthetic construct
  misc_feature 1..20: note = Description of Artificial Sequence: Synthetic oligonucleotide
  source 1..20: mol_type = other DNA
ctgttacagtttggtgcttc

SEQ ID NO: 10060 - DNA, 20 bp, synthetic construct
  misc_feature 1..20: note = Description of Artificial Sequence: Synthetic oligonucleotide
  source 1..20: mol_type = other DNA
tgttacagtttggtgcttcc

SEQ ID NO: 10061 - DNA, 20 bp, synthetic construct
  misc_feature 1..20: note = Description of Artificial Sequence: Synthetic oligonucleotide
  source 1..20: mol_type = other DNA
gttacagtttggtgcttcct

SEQ ID NO: 10062 - DNA, 20 bp, synthetic construct
  misc_feature 1..20: note = Description of Artificial Sequence: Synthetic oligonucleotide
  source 1..20: mol_type = other DNA
ttacagtttggtgcttcctt

SEQ ID NO: 10063 - DNA, 20 bp, synthetic construct
  misc_feature 1..20: note = Description of Artificial Sequence: Synthetic oligonucleotide
  source 1..20: mol_type = other DNA
tacagtttggtgcttccttg

SEQ ID NO: 10064 - DNA, 20 bp, synthetic construct
  misc_feature 1..20: note = Description of Artificial Sequence: Synthetic oligonucleotide
  source 1..20: mol_type = other DNA
acagtttggtgcttccttgg

SEQ ID NO: 10065 - DNA, 20 bp, synthetic construct
  misc_feature 1..20: note = Description of Artificial Sequence: Synthetic oligonucleotide
  source 1..20: mol_type = other DNA
cagtttggtgcttccttgga

SEQ ID NO: 10066 - DNA, 20 bp, synthetic construct
  misc_feature 1..20: note = Description of Artificial Sequence: Synthetic oligonucleotide
  source 1..20: mol_type = other DNA
agtttggtgcttccttggaa

SEQ ID NO: 10067 - DNA, 20 bp, synthetic construct
  misc_feature 1..20: note = Description of Artificial Sequence: Synthetic oligonucleotide
  source 1..20: mol_type = other DNA
gtttggtgcttccttggaat

SEQ ID NO: 10068 - DNA, 20 bp, synthetic construct
  misc_feature 1..20: note = Description of Artificial Sequence: Synthetic oligonucleotide
  source 1..20: mol_type = other DNA
tttggtgcttccttggaatt

SEQ ID NO: 10069 - DNA, 20 bp, synthetic construct
  misc_feature 1..20: note = Description of Artificial Sequence: Synthetic oligonucleotide
  source 1..20: mol_type = other DNA
ttggtgcttccttggaattt

SEQ ID NO: 10070 - DNA, 20 bp, synthetic construct
  misc_feature 1..20: note = Description of Artificial Sequence: Synthetic oligonucleotide
  source 1..20: mol_type = other DNA
tggtgcttccttggaatttc

SEQ ID NO: 10071 - DNA, 20 bp, synthetic construct
  misc_feature 1..20: note = Description of Artificial Sequence: Synthetic oligonucleotide
  source 1..20: mol_type = other DNA
ggtgcttccttggaatttct

SEQ ID NO: 10072 - DNA, 20 bp, synthetic construct
  misc_feature 1..20: note = Description of Artificial Sequence: Synthetic oligonucleotide
  source 1..20: mol_type = other DNA
gtgcttccttggaatttctt

SEQ ID NO: 10073 - DNA, 20 bp, synthetic construct
  misc_feature 1..20: note = Description of Artificial Sequence: Synthetic oligonucleotide
  source 1..20: mol_type = other DNA
tgcttccttggaatttcttg

SEQ ID NO: 10074 - DNA, 20 bp, synthetic construct
  misc_feature 1..20: note = Description of Artificial Sequence: Synthetic oligonucleotide
  source 1..20: mol_type = other DNA
gcttccttggaatttcttga

SEQ ID NO: 10075 - DNA, 20 bp, synthetic construct
  misc_feature 1..20: note = Description of Artificial Sequence: Synthetic oligonucleotide
  source 1..20: mol_type = other DNA
cttccttggaatttcttgag

SEQ ID NO: 10076 - DNA, 20 bp, synthetic construct
  misc_feature 1..20: note = Description of Artificial Sequence: Synthetic oligonucleotide
  source 1..20: mol_type = other DNA
ttccttggaatttcttgaga

SEQ ID NO: 10077 - DNA, 20 bp, synthetic construct
  misc_feature 1..20: note = Description of Artificial Sequence: Synthetic oligonucleotide
  source 1..20: mol_type = other DNA
tccttggaatttcttgagat

SEQ ID NO: 10078 - DNA, 20 bp, synthetic construct
  misc_feature 1..20: note = Description of Artificial Sequence: Synthetic oligonucleotide
  source 1..20: mol_type = other DNA
ccttggaatttcttgagata

SEQ ID NO: 10079 - DNA, 20 bp, synthetic construct
  misc_feature 1..20: note = Description of Artificial Sequence: Synthetic oligonucleotide
  source 1..20: mol_type = other DNA
cttggaatttcttgagatat

SEQ ID NO: 10080 - DNA, 20 bp, synthetic construct
  misc_feature 1..20: note = Description of Artificial Sequence: Synthetic oligonucleotide
  source 1..20: mol_type = other DNA
ttggaatttcttgagatata

SEQ ID NO: 10081 - DNA, 20 bp, synthetic construct
  misc_feature 1..20: note = Description of Artificial Sequence: Synthetic oligonucleotide
  source 1..20: mol_type = other DNA
tggaatttcttgagatatag

SEQ ID NO: 10082 - DNA, 20 bp, synthetic construct
  misc_feature 1..20: note = Description of Artificial Sequence: Synthetic oligonucleotide
  source 1..20: mol_type = other DNA
ggaatttcttgagatatagc

SEQ ID NO: 10083 - DNA, 20 bp, synthetic construct
  misc_feature 1..20: note = Description of Artificial Sequence: Synthetic oligonucleotide
  source 1..20: mol_type = other DNA
gaatttcttgagatatagcc

SEQ ID NO: 10084 - DNA, 20 bp, synthetic construct
  misc_feature 1..20: note = Description of Artificial Sequence: Synthetic oligonucleotide
  source 1..20: mol_type = other DNA
aatttcttgagatatagcct

SEQ ID NO: 10085 - DNA, 20 bp, synthetic construct
  misc_feature 1..20: note = Description of Artificial Sequence: Synthetic oligonucleotide
  source 1..20: mol_type = other DNA
atttcttgagatatagcctg

SEQ ID NO: 10086 - DNA, 20 bp, synthetic construct
  misc_feature 1..20: note = Description of Artificial Sequence: Synthetic oligonucleotide
  source 1..20: mol_type = other DNA
tttcttgagatatagcctgt

SEQ ID NO: 10087 - DNA, 20 bp, synthetic construct
  misc_feature 1..20: note = Description of Artificial Sequence: Synthetic oligonucleotide
  source 1..20: mol_type = other DNA
ttcttgagatatagcctgtc

SEQ ID NO: 10088 - DNA, 20 bp, synthetic construct
  misc_feature 1..20: note = Description of Artificial Sequence: Synthetic oligonucleotide
  source 1..20: mol_type = other DNA
tcttgagatatagcctgtca

SEQ ID NO: 10089 - DNA, 20 bp, synthetic construct
  misc_feature 1..20: note = Description of Artificial Sequence: Synthetic oligonucleotide
  source 1..20: mol_type = other DNA
cttgagatatagcctgtcag

SEQ ID NO: 10090 - DNA, 20 bp, synthetic construct
  misc_feature 1..20: note = Description of Artificial Sequence: Synthetic oligonucleotide
  source 1..20: mol_type = other DNA
ttgagatatagcctgtcagc

SEQ ID NO: 10091 - DNA, 20 bp, synthetic construct
  misc_feature 1..20: note = Description of Artificial Sequence: Synthetic oligonucleotide
  source 1..20: mol_type = other DNA
tgagatatagcctgtcagct

SEQ ID NO: 10092 - DNA, 20 bp, synthetic construct
  misc_feature 1..20: note = Description of Artificial Sequence: Synthetic oligonucleotide
  source 1..20: mol_type = other DNA
gagatatagcctgtcagctc

SEQ ID NO: 10093 - DNA, 20 bp, synthetic construct
  misc_feature 1..20: note = Description of Artificial Sequence: Synthetic oligonucleotide
  source 1..20: mol_type = other DNA
agatatagcctgtcagctct

SEQ ID NO: 10094 - DNA, 20 bp, synthetic construct
  misc_feature 1..20: note = Description of Artificial Sequence: Synthetic oligonucleotide
  source 1..20: mol_type = other DNA
gatatagcctgtcagctctt

SEQ ID NO: 10095 - DNA, 20 bp, synthetic construct
  misc_feature 1..20: note = Description of Artificial Sequence: Synthetic oligonucleotide
  source 1..20: mol_type = other DNA
atatagcctgtcagctcttg

SEQ ID NO: 10096 - DNA, 20 bp, synthetic construct
  misc_feature 1..20: note = Description of Artificial Sequence: Synthetic oligonucleotide
  source 1..20: mol_type = other DNA
tatagcctgtcagctcttgg

SEQ ID NO: 10097 - DNA, 20 bp, synthetic construct
  misc_feature 1..20: note = Description of Artificial Sequence: Synthetic oligonucleotide
  source 1..20: mol_type = other DNA
atagcctgtcagctcttggt

SEQ ID NO: 10098 - DNA, 20 bp, synthetic construct
  misc_feature 1..20: note = Description of Artificial Sequence: Synthetic oligonucleotide
  source 1..20: mol_type = other DNA
tagcctgtcagctcttggtg

SEQ ID NO: 10099 - DNA, 20 bp, synthetic construct
  misc_feature 1..20: note = Description of Artificial Sequence: Synthetic oligonucleotide
  source 1..20: mol_type = other DNA
agcctgtcagctcttggtga

SEQ ID NO: 10100 - DNA, 20 bp, synthetic construct
  misc_feature 1..20: note = Description of Artificial Sequence: Synthetic oligonucleotide
  source 1..20: mol_type = other DNA
gcctgtcagctcttggtgag

SEQ ID NO: 10101 - DNA, 20 bp, synthetic construct
  misc_feature 1..20: note = Description of Artificial Sequence: Synthetic oligonucleotide
  source 1..20: mol_type = other DNA
cctgtcagctcttggtgagg

SEQ ID NO: 10102 - DNA, 20 bp, synthetic construct
  misc_feature 1..20: note = Description of Artificial Sequence: Synthetic oligonucleotide
  source 1..20: mol_type = other DNA
ctgtcagctcttggtgagga

SEQ ID NO: 10103 - DNA, 20 bp, synthetic construct
  misc_feature 1..20: note = Description of Artificial Sequence: Synthetic oligonucleotide
  source 1..20: mol_type = other DNA
tgtcagctcttggtgaggaa

SEQ ID NO: 10104 - DNA, 20 bp, synthetic construct
  misc_feature 1..20: note = Description of Artificial Sequence: Synthetic oligonucleotide
  source 1..20: mol_type = other DNA
gtcagctcttggtgaggaag

SEQ ID NO: 10105 - DNA, 20 bp, synthetic construct
  misc_feature 1..20: note = Description of Artificial Sequence: Synthetic oligonucleotide
  source 1..20: mol_type = other DNA
tcagctcttggtgaggaagt

SEQ ID NO: 10106 - DNA, 20 bp, synthetic construct
  misc_feature 1..20: note = Description of Artificial Sequence: Synthetic oligonucleotide
  source 1..20: mol_type = other DNA
cagctcttggtgaggaagta

SEQ ID NO: 10107 - DNA, 20 bp, synthetic construct
  misc_feature 1..20: note = Description of Artificial Sequence: Synthetic oligonucleotide
  source 1..20: mol_type = other DNA
agctcttggtgaggaagtag

SEQ ID NO: 10108 - DNA, 20 bp, synthetic construct
  misc_feature 1..20: note = Description of Artificial Sequence: Synthetic oligonucleotide
  source 1..20: mol_type = other DNA
gctcttggtgaggaagtagc

SEQ ID NO: 10109 - DNA, 20 bp, synthetic construct
  misc_feature 1..20: note = Description of Artificial Sequence: Synthetic oligonucleotide
  source 1..20: mol_type = other DNA
ctcttggtgaggaagtagca

SEQ ID NO: 10110 - DNA, 20 bp, synthetic construct
  misc_feature 1..20: note = Description of Artificial Sequence: Synthetic oligonucleotide
  source 1..20: mol_type = other DNA
tcttggtgaggaagtagcag

SEQ ID NO: 10111 - DNA, 20 bp, synthetic construct
  misc_feature 1..20: note = Description of Artificial Sequence: Synthetic oligonucleotide
  source 1..20: mol_type = other DNA
cttggtgaggaagtagcaga

SEQ ID NO: 10112 - DNA, 20 bp, synthetic construct
  misc_feature 1..20: note = Description of Artificial Sequence: Synthetic oligonucleotide
  source 1..20: mol_type = other DNA
ttggtgaggaagtagcagag

SEQ ID NO: 10113 - DNA, 20 bp, synthetic construct
  misc_feature 1..20: note = Description of Artificial Sequence: Synthetic oligonucleotide
  source 1..20: mol_type = other DNA
tggtgaggaagtagcagagc

SEQ ID NO: 10114 - DNA, 20 bp, synthetic construct
  misc_feature 1..20: note = Description of Artificial Sequence: Synthetic oligonucleotide
  source 1..20: mol_type = other DNA
ggtgaggaagtagcagagct

SEQ ID NO: 10115 - DNA, 20 bp, synthetic construct
  misc_feature 1..20: note = Description of Artificial Sequence: Synthetic oligonucleotide
  source 1..20: mol_type = other DNA
gtgaggaagtagcagagcta

SEQ ID NO: 10116 - DNA, 20 bp, synthetic construct
  misc_feature 1..20: note = Description of Artificial Sequence: Synthetic oligonucleotide
  source 1..20: mol_type = other DNA
tgaggaagtagcagagctac

SEQ ID NO: 10117 - DNA, 20 bp, synthetic construct
  misc_feature 1..20: note = Description of Artificial Sequence: Synthetic oligonucleotide
  source 1..20: mol_type = other DNA
gaggaagtagcagagctaca

SEQ ID NO: 10118 - DNA, 20 bp, synthetic construct
  misc_feature 1..20: note = Description of Artificial Sequence: Synthetic oligonucleotide
  source 1..20: mol_type = other DNA
aggaagtagcagagctacac

SEQ ID NO: 10119 - DNA, 20 bp, synthetic construct
  misc_feature 1..20: note = Description of Artificial Sequence: Synthetic oligonucleotide
  source 1..20: mol_type = other DNA
ggaagtagcagagctacacc

SEQ ID NO: 10120 - DNA, 20 bp, synthetic construct
  misc_feature 1..20: note = Description of Artificial Sequence: Synthetic oligonucleotide
  source 1..20: mol_type = other DNA
gaagtagcagagctacacca

SEQ ID NO: 10121 - DNA, 20 bp, synthetic construct
  misc_feature 1..20: note = Description of Artificial Sequence: Synthetic oligonucleotide
  source 1..20: mol_type = other DNA
aagtagcagagctacaccaa

SEQ ID NO: 10122 - DNA, 20 bp, synthetic construct
  misc_feature 1..20: note = Description of Artificial Sequence: Synthetic oligonucleotide
  source 1..20: mol_type = other DNA
agtagcagagctacaccaat

SEQ ID NO: 10123 - DNA, 20 bp, synthetic construct
  misc_feature 1..20: note = Description of Artificial Sequence: Synthetic oligonucleotide
  source 1..20: mol_type = other DNA
gtagcagagctacaccaatc

SEQ ID NO: 10124 - DNA, 20 bp, synthetic construct
  misc_feature 1..20: note = Description of Artificial Sequence: Synthetic oligonucleotide
  source 1..20: mol_type = other DNA
tagcagagctacaccaatca

SEQ ID NO: 10125 - DNA, 20 bp, synthetic construct
  misc_feature 1..20: note = Description of Artificial Sequence: Synthetic oligonucleotide
  source 1..20: mol_type = other DNA
agcagagctacaccaatcag

SEQ ID NO: 10126 - DNA, 20 bp, synthetic construct
  misc_feature 1..20: note = Description of Artificial Sequence: Synthetic oligonucleotide
  source 1..20: mol_type = other DNA
gcagagctacaccaatcagg

SEQ ID NO: 10127 - DNA, 20 bp, synthetic construct
  misc_feature 1..20: note = Description of Artificial Sequence: Synthetic oligonucleotide
  source 1..20: mol_type = other DNA
cagagctacaccaatcagga

SEQ ID NO: 10128 - DNA, 20 bp, synthetic construct
  misc_feature 1..20: note = Description of Artificial Sequence: Synthetic oligonucleotide
  source 1..20: mol_type = other DNA
agagctacaccaatcaggaa

SEQ ID NO: 10129 - DNA, 20 bp, synthetic construct
  misc_feature 1..20: note = Description of Artificial Sequence: Synthetic oligonucleotide
  source 1..20: mol_type = other DNA
gagctacaccaatcaggaag

SEQ ID NO: 10130 - DNA, 20 bp, synthetic construct
  misc_feature 1..20: note = Description of Artificial Sequence: Synthetic oligonucleotide
  source 1..20: mol_type = other DNA
agctacaccaatcaggaaga

SEQ ID NO: 10131 - DNA, 20 bp, synthetic construct
  misc_feature 1..20: note = Description of Artificial Sequence: Synthetic oligonucleotide
  source 1..20: mol_type = other DNA
gctacaccaatcaggaagac

SEQ ID NO: 10132 - DNA, 20 bp, synthetic construct
  misc_feature 1..20: note = Description of Artificial Sequence: Synthetic oligonucleotide
  source 1..20: mol_type = other DNA
ctacaccaatcaggaagact

SEQ ID NO: 10133 - DNA, 20 bp, synthetic construct
  misc_feature 1..20: note = Description of Artificial Sequence: Synthetic oligonucleotide
  source 1..20: mol_type = other DNA
tacaccaatcaggaagactt

SEQ ID NO: 10134 - DNA, 20 bp, synthetic construct
  misc_feature 1..20: note = Description of Artificial Sequence: Synthetic oligonucleotide
  source 1..20: mol_type = other DNA
acaccaatcaggaagacttg

SEQ ID NO: 10135 - DNA, 20 bp, synthetic construct
  misc_feature 1..20: note = Description of Artificial Sequence: Synthetic oligonucleotide
  source 1..20: mol_type = other DNA
caccaatcaggaagacttga

SEQ ID NO: 10136 - DNA, 20 bp, synthetic construct
  misc_feature 1..20: note = Description of Artificial Sequence: Synthetic oligonucleotide
  source 1..20: mol_type = other DNA
accaatcaggaagacttgaa

SEQ ID NO: 10137 - DNA, 20 bp, synthetic construct
  misc_feature 1..20: note = Description of Artificial Sequence: Synthetic oligonucleotide
  source 1..20: mol_type = other DNA
ccaatcaggaagacttgaac

SEQ ID NO: 10138 - DNA, 20 bp, synthetic construct
  misc_feature 1..20: note = Description of Artificial Sequence: Synthetic oligonucleotide
  source 1..20: mol_type = other DNA
caatcaggaagacttgaacc

SEQ ID NO: 10139 - DNA, 20 bp, synthetic construct
  misc_feature 1..20: note = Description of Artificial Sequence: Synthetic oligonucleotide
  source 1..20: mol_type = other DNA
aatcaggaagacttgaaccc

SEQ ID NO: 10140 - DNA, 20 bp, synthetic construct
  misc_feature 1..20: note = Description of Artificial Sequence: Synthetic oligonucleotide
  source 1..20: mol_type = other DNA
atcaggaagacttgaaccct

SEQ ID NO: 10141 - DNA, 20 bp, synthetic construct
  misc_feature 1..20: note = Description of Artificial Sequence: Synthetic oligonucleotide
  source 1..20: mol_type = other DNA
tcaggaagacttgaaccctg

SEQ ID NO: 10142 - DNA, 20 bp, synthetic construct
  misc_feature 1..20: note = Description of Artificial Sequence: Synthetic oligonucleotide
  source 1..20: mol_type = other DNA
caggaagacttgaaccctgc

SEQ ID NO: 10143 - DNA, 20 bp, synthetic construct
  misc_feature 1..20: note = Description of Artificial Sequence: Synthetic oligonucleotide
  source 1..20: mol_type = other DNA
aggaagacttgaaccctgct

SEQ ID NO: 10144 - DNA, 20 bp, synthetic construct
  misc_feature 1..20: note = Description of Artificial Sequence: Synthetic oligonucleotide
  source 1..20: mol_type = other DNA
ggaagacttgaaccctgctt

SEQ ID NO: 10145 - DNA, 20 bp, synthetic construct
  misc_feature 1..20: note = Description of Artificial Sequence: Synthetic oligonucleotide
  source 1..20: mol_type = other DNA
gaagacttgaaccctgcttc

SEQ ID NO: 10146 - DNA, 20 bp, synthetic construct
  misc_feature 1..20: note = Description of Artificial Sequence: Synthetic oligonucleotide
  source 1..20: mol_type = other DNA
aagacttgaaccctgcttct

SEQ ID NO: 10147 - DNA, 20 bp, synthetic construct
  misc_feature 1..20: note = Description of Artificial Sequence: Synthetic oligonucleotide
  source 1..20: mol_type = other DNA
agacttgaaccctgcttcta

SEQ ID NO: 10148 - DNA, 20 bp, synthetic construct
  misc_feature 1..20: note = Description of Artificial Sequence: Synthetic oligonucleotide
  source 1..20: mol_type = other DNA
gacttgaaccctgcttctaa

SEQ ID NO: 10149 - DNA, 20 bp, synthetic construct
  misc_feature 1..20: note = Description of Artificial Sequence: Synthetic oligonucleotide
  source 1..20: mol_type = other DNA
acttgaaccctgcttctaag

SEQ ID NO: 10150 - DNA, 20 bp, synthetic construct
  misc_feature 1..20: note = Description of Artificial Sequence: Synthetic oligonucleotide
  source 1..20: mol_type = other DNA
cttgaaccctgcttctaaga

SEQ ID NO: 10151 - DNA, 20 bp, synthetic construct
  misc_feature 1..20: note = Description of Artificial Sequence: Synthetic oligonucleotide
  source 1..20: mol_type = other DNA
ttgaaccctgcttctaagac

SEQ ID NO: 10152 - DNA, 20 bp, synthetic construct
  misc_feature 1..20: note = Description of Artificial Sequence: Synthetic oligonucleotide
  source 1..20: mol_type = other DNA
tgaaccctgcttctaagact

SEQ ID NO: 10153 - DNA, 20 bp, synthetic construct
  misc_feature 1..20: note = Description of Artificial Sequence: Synthetic oligonucleotide
  source 1..20: mol_type = other DNA
gaaccctgcttctaagactt

SEQ ID NO: 10154 - DNA, 20 bp, synthetic construct
  misc_feature 1..20: note = Description of Artificial Sequence: Synthetic oligonucleotide
  source 1..20: mol_type = other DNA
aaccctgcttctaagacttg

SEQ ID NO: 10155 - DNA, 20 bp, synthetic construct
  misc_feature 1..20: note = Description of Artificial Sequence: Synthetic oligonucleotide
  source 1..20: mol_type = other DNA
accctgcttctaagacttgc

SEQ ID NO: 10156 - DNA, 20 bp, synthetic construct
  misc_feature 1..20: note = Description of Artificial Sequence: Synthetic oligonucleotide
  source 1..20: mol_type = other DNA
ccctgcttctaagacttgct

SEQ ID NO: 10157 - DNA, 20 bp, synthetic construct
  misc_feature 1..20: note = Description of Artificial Sequence: Synthetic oligonucleotide
  source 1..20: mol_type = other DNA
cctgcttctaagacttgctg

SEQ ID NO: 10158 - DNA, 20 bp, synthetic construct
  misc_feature 1..20: note = Description of Artificial Sequence: Synthetic oligonucleotide
  source 1..20: mol_type = other DNA
ctgcttctaagacttgctgg

SEQ ID NO: 10159 - DNA, 20 bp, synthetic construct
  misc_feature 1..20: note = Description of Artificial Sequence: Synthetic oligonucleotide
  source 1..20: mol_type = other DNA
tgcttctaagacttgctggg

SEQ ID NO: 10160 - DNA, 20 bp, synthetic construct
  misc_feature 1..20: note = Description of Artificial Sequence: Synthetic oligonucleotide
  source 1..20: mol_type = other DNA
gcttctaagacttgctgggt

SEQ ID NO: 10161 - DNA, 20 bp, synthetic construct
  misc_feature 1..20: note = Description of Artificial Sequence: Synthetic oligonucleotide
  source 1..20: mol_type = other DNA
cttctaagacttgctgggtg

SEQ ID NO: 10162 - DNA, 20 bp, synthetic construct
  misc_feature 1..20: note = Description of Artificial Sequence: Synthetic oligonucleotide
  source 1..20: mol_type = other DNA
ttctaagacttgctgggtga

SEQ ID NO: 10163 - DNA, 20 bp, synthetic construct
  misc_feature 1..20: note = Description of Artificial Sequence: Synthetic oligonucleotide
  source 1..20: mol_type = other DNA
tctaagacttgctgggtgac

SEQ ID NO: 10164 - DNA, 20 bp, synthetic construct
  misc_feature 1..20: note = Description of Artificial Sequence: Synthetic oligonucleotide
  source 1..20: mol_type = other DNA
ctaagacttgctgggtgact

SEQ ID NO: 10165 - DNA, 20 bp, synthetic construct
  misc_feature 1..20: note = Description of Artificial Sequence: Synthetic oligonucleotide
  source 1..20: mol_type = other DNA
taagacttgctgggtgactt

SEQ ID NO: 10166 - DNA, 20 bp, synthetic construct
  misc_feature 1..20: note = Description of Artificial Sequence: Synthetic oligonucleotide
  source 1..20: mol_type = other DNA
aagacttgctgggtgacttt

SEQ ID NO: 10167 - DNA, 20 bp, synthetic construct
  misc_feature 1..20: note = Description of Artificial Sequence: Synthetic oligonucleotide
  source 1..20: mol_type = other DNA
agacttgctgggtgactttg

SEQ ID NO: 10168 - DNA, 20 bp, synthetic construct
  misc_feature 1..20: note = Description of Artificial Sequence: Synthetic oligonucleotide
  source 1..20: mol_type = other DNA
gacttgctgggtgactttgg

SEQ ID NO: 10169 - DNA, 20 bp, synthetic construct
  misc_feature 1..20: note = Description of Artificial Sequence: Synthetic oligonucleotide
  source 1..20: mol_type = other DNA
acttgctgggtgactttggg

SEQ ID NO: 10170 - DNA, 20 bp, synthetic construct
  misc_feature 1..20: note = Description of Artificial Sequence: Synthetic oligonucleotide
  source 1..20: mol_type = other DNA
cttgctgggtgactttgggc

SEQ ID NO: 10171 - DNA, 20 bp, synthetic construct
  misc_feature 1..20: note = Description of Artificial Sequence: Synthetic oligonucleotide
  source 1..20: mol_type = other DNA
ttgctgggtgactttgggca

SEQ ID NO: 10172 - DNA, 20 bp, synthetic construct
  misc_feature 1..20: note = Description of Artificial Sequence: Synthetic oligonucleotide
  source 1..20: mol_type = other DNA
tgctgggtgactttgggcaa

SEQ ID NO: 10173 - DNA, 20 bp, synthetic construct
  misc_feature 1..20: note = Description of Artificial Sequence: Synthetic oligonucleotide
  source 1..20: mol_type = other DNA
gctgggtgactttgggcaaa

SEQ ID NO: 10174 - DNA, 20 bp, synthetic construct
  misc_feature 1..20: note = Description of Artificial Sequence: Synthetic oligonucleotide
  source 1..20: mol_type = other DNA
ctgggtgactttgggcaaac

SEQ ID NO: 10175 - DNA, 20 bp, synthetic construct
  misc_feature 1..20: note = Description of Artificial Sequence: Synthetic oligonucleotide
  source 1..20: mol_type = other DNA
tgggtgactttgggcaaacc

SEQ ID NO: 10176 - DNA, 20 bp, synthetic construct
  misc_feature 1..20: note = Description of Artificial Sequence: Synthetic oligonucleotide
  source 1..20: mol_type = other DNA
gggtgactttgggcaaacca

SEQ ID NO: 10177 - DNA, 20 bp, synthetic construct
  misc_feature 1..20: note = Description of Artificial Sequence: Synthetic oligonucleotide
  source 1..20: mol_type = other DNA
ggtgactttgggcaaaccat

SEQ ID NO: 10178 - DNA, 20 bp, synthetic construct
  misc_feature 1..20: note = Description of Artificial Sequence: Synthetic oligonucleotide
  source 1..20: mol_type = other DNA
gtgactttgggcaaaccatg

SEQ ID NO: 10179 - DNA, 20 bp, synthetic construct
  misc_feature 1..20: note = Description of Artificial Sequence: Synthetic oligonucleotide
  source 1..20: mol_type = other DNA
tgactttgggcaaaccatgt

SEQ ID NO: 10180 - DNA, 20 bp, synthetic construct
  misc_feature 1..20: note = Description of Artificial Sequence: Synthetic oligonucleotide
  source 1..20: mol_type = other DNA
gactttgggcaaaccatgta

SEQ ID NO: 10181 - DNA, 20 bp, synthetic construct
  misc_feature 1..20: note = Description of Artificial Sequence: Synthetic oligonucleotide
  source 1..20: mol_type = other DNA
actttgggcaaaccatgtag

SEQ ID NO: 10182 - DNA, 20 bp, synthetic construct
  misc_feature 1..20: note = Description of Artificial Sequence: Synthetic oligonucleotide
  source 1..20: mol_type = other DNA
ctttgggcaaaccatgtagt

SEQ ID NO: 10183 - DNA, 20 bp, synthetic construct
  misc_feature 1..20: note = Description of Artificial Sequence: Synthetic oligonucleotide
  source 1..20: mol_type = other DNA
tttgggcaaaccatgtagta

SEQ ID NO: 10184 - DNA, 20 bp, synthetic construct
  misc_feature 1..20: note = Description of Artificial Sequence: Synthetic oligonucleotide
  source 1..20: mol_type = other DNA
ttgggcaaaccatgtagtat

SEQ ID NO: 10185 - DNA, 20 bp, synthetic construct
  misc_feature 1..20: note = Description of Artificial Sequence: Synthetic oligonucleotide
  source 1..20: mol_type = other DNA
tgggcaaaccatgtagtatc

SEQ ID NO: 10186 - DNA, 20 bp, synthetic construct
  misc_feature 1..20: note = Description of Artificial Sequence: Synthetic oligonucleotide
  source 1..20: mol_type = other DNA
gggcaaaccatgtagtatct

SEQ ID NO: 10187 - DNA, 20 bp, synthetic construct
  misc_feature 1..20: note = Description of Artificial Sequence: Synthetic oligonucleotide
  source 1..20: mol_type = other DNA
ggcaaaccatgtagtatctc

SEQ ID NO: 10188 - DNA, 20 bp, synthetic construct
  misc_feature 1..20: note = Description of Artificial Sequence: Synthetic oligonucleotide
  source 1..20: mol_type = other DNA
gcaaaccatgtagtatctca

SEQ ID NO: 10189 - DNA, 20 bp, synthetic construct
  misc_feature 1..20: note = Description of Artificial Sequence: Synthetic oligonucleotide
  source 1..20: mol_type = other DNA
caaaccatgtagtatctcag

SEQ ID NO: 10190 - DNA, 20 bp, synthetic construct
  misc_feature 1..20: note = Description of Artificial Sequence: Synthetic oligonucleotide
  source 1..20: mol_type = other DNA
aaaccatgtagtatctcagc

SEQ ID NO: 10191 - DNA, 20 bp, synthetic construct
  misc_feature 1..20: note = Description of Artificial Sequence: Synthetic oligonucleotide
  source 1..20: mol_type = other DNA
aaccatgtagtatctcagca

SEQ ID NO: 10192 - DNA, 20 bp, synthetic construct
  misc_feature 1..20: note = Description of Artificial Sequence: Synthetic oligonucleotide
  source 1..20: mol_type = other DNA
accatgtagtatctcagcac

SEQ ID NO: 10193 - DNA, 20 bp, synthetic construct
  misc_feature 1..20: note = Description of Artificial Sequence: Synthetic oligonucleotide
  source 1..20: mol_type = other DNA
ccatgtagtatctcagcact

SEQ ID NO: 10194 - DNA, 20 bp, synthetic construct
  misc_feature 1..20: note = Description of Artificial Sequence: Synthetic oligonucleotide
  source 1..20: mol_type = other DNA
catgtagtatctcagcactc

SEQ ID NO: 10195 - DNA, 20 bp, synthetic construct
  misc_feature 1..20: note = Description of Artificial Sequence: Synthetic oligonucleotide
  source 1..20: mol_type = other DNA
atgtagtatctcagcactcc

SEQ ID NO: 10196 - DNA, 20 bp, synthetic construct
  misc_feature 1..20: note = Description of Artificial Sequence: Synthetic oligonucleotide
  source 1..20: mol_type = other DNA
tgtagtatctcagcactcca

SEQ ID NO: 10197 - DNA, 20 bp, synthetic construct
  misc_feature 1..20: note = Description of Artificial Sequence: Synthetic oligonucleotide
  source 1..20: mol_type = other DNA
gtagtatctcagcactccaa

SEQ ID NO: 10198 - DNA, 20 bp, synthetic construct
  misc_feature 1..20: note = Description of Artificial Sequence: Synthetic oligonucleotide
  source 1..20: mol_type = other DNA
tagtatctcagcactccaag

SEQ ID NO: 10199 - DNA, 20 bp, synthetic construct
  misc_feature 1..20: note = Description of Artificial Sequence: Synthetic oligonucleotide
  source 1..20: mol_type = other DNA
agtatctcagcactccaaga

SEQ ID NO: 10200 - DNA, 20 bp, synthetic construct
  misc_feature 1..20: note = Description of Artificial Sequence: Synthetic oligonucleotide
  source 1..20: mol_type = other DNA
gtatctcagcactccaagat

SEQ ID NO: 10201 - DNA, 20 bp, synthetic construct
  misc_feature 1..20: note = Description of Artificial Sequence: Synthetic oligonucleotide
  source 1..20: mol_type = other DNA
tatctcagcactccaagatg

SEQ ID NO: 10202 - DNA, 20 bp, synthetic construct
  misc_feature 1..20: note = Description of Artificial Sequence: Synthetic oligonucleotide
  source 1..20: mol_type = other DNA
atctcagcactccaagatgg

SEQ ID NO: 10203 - DNA, 20 bp, synthetic construct
  misc_feature 1..20: note = Description of Artificial Sequence: Synthetic oligonucleotide
  source 1..20: mol_type = other DNA
tctcagcactccaagatggt

SEQ ID NO: 10204 - DNA, 20 bp, synthetic construct
  misc_feature 1..20: note = Description of Artificial Sequence: Synthetic oligonucleotide
  source 1..20: mol_type = other DNA
ctcagcactccaagatggta

SEQ ID NO: 10205 - DNA, 20 bp, synthetic construct
  misc_feature 1..20: note = Description of Artificial Sequence: Synthetic oligonucleotide
  source 1..20: mol_type = other DNA
tcagcactccaagatggtag

SEQ ID NO: 10206 - DNA, 20 bp, synthetic construct
  misc_feature 1..20: note = Description of Artificial Sequence: Synthetic oligonucleotide
  source 1..20: mol_type = other DNA
cagcactccaagatggtagg

SEQ ID NO: 10207 - DNA, 20 bp, synthetic construct
  misc_feature 1..20: note = Description of Artificial Sequence: Synthetic oligonucleotide
  source 1..20: mol_type = other DNA
agcactccaagatggtaggc

SEQ ID NO: 10208 - DNA, 20 bp, synthetic construct
  misc_feature 1..20: note = Description of Artificial Sequence: Synthetic oligonucleotide
  source 1..20: mol_type = other DNA
gcactccaagatggtaggct

SEQ ID NO: 10209 - DNA, 20 bp, synthetic construct
  misc_feature 1..20: note = Description of Artificial Sequence: Synthetic oligonucleotide
  source 1..20: mol_type = other DNA
cactccaagatggtaggctg

SEQ ID NO: 10210 - DNA, 20 bp, synthetic construct
  misc_feature 1..20: note = Description of Artificial Sequence: Synthetic oligonucleotide
  source 1..20: mol_type = other DNA
actccaagatggtaggctga

SEQ ID NO: 10211 - DNA, 20 bp, synthetic construct
  misc_feature 1..20: note = Description of Artificial Sequence: Synthetic oligonucleotide
  source 1..20: mol_type = other DNA
ctccaagatggtaggctgaa

SEQ ID NO: 10212 - DNA, 20 bp, synthetic construct
  misc_feature 1..20: note = Description of Artificial Sequence: Synthetic oligonucleotide
  source 1..20: mol_type = other DNA
tccaagatggtaggctgaaa

SEQ ID NO: 10213 - DNA, 20 bp, synthetic construct
  misc_feature 1..20: note = Description of Artificial Sequence: Synthetic oligonucleotide
  source 1..20: mol_type = other DNA
ccaagatggtaggctgaaac

SEQ ID NO: 10214 - DNA, 20 bp, synthetic construct
  misc_feature 1..20: note = Description of Artificial Sequence: Synthetic oligonucleotide
  source 1..20: mol_type = other DNA
caagatggtaggctgaaaca

SEQ ID NO: 10215 - DNA, 20 bp, synthetic construct
  misc_feature 1..20: note = Description of Artificial Sequence: Synthetic oligonucleotide
  source 1..20: mol_type = other DNA
aagatggtaggctgaaacac

SEQ ID NO: 10216 - DNA, 20 bp, synthetic construct
  misc_feature 1..20: note = Description of Artificial Sequence: Synthetic oligonucleotide
  source 1..20: mol_type = other DNA
agatggtaggctgaaacact

SEQ ID NO: 10217 - DNA, 20 bp, synthetic construct
  misc_feature 1..20: note = Description of Artificial Sequence: Synthetic oligonucleotide
  source 1..20: mol_type = other DNA
gatggtaggctgaaacactg

SEQ ID NO: 10218 - DNA, 20 bp, synthetic construct
  misc_feature 1..20: note = Description of Artificial Sequence: Synthetic oligonucleotide
  source 1..20: mol_type = other DNA
atggtaggctgaaacactgt

SEQ ID NO: 10219 - DNA, 20 bp, synthetic construct
  misc_feature 1..20: note = Description of Artificial Sequence: Synthetic oligonucleotide
  source 1..20: mol_type = other DNA
tggtaggctgaaacactgtg

SEQ ID NO: 10220 - DNA, 20 bp, synthetic construct
  misc_feature 1..20: note = Description of Artificial Sequence: Synthetic oligonucleotide
  source 1..20: mol_type = other DNA
ggtaggctgaaacactgtgt

SEQ ID NO: 10221 - DNA, 20 bp, synthetic construct
  misc_feature 1..20: note = Description of Artificial Sequence: Synthetic oligonucleotide
  source 1..20: mol_type = other DNA
gtaggctgaaacactgtgtg

SEQ ID NO: 10222 - DNA, 20 bp, synthetic construct
  misc_feature 1..20: note = Description of Artificial Sequence: Synthetic oligonucleotide
  source 1..20: mol_type = other DNA
taggctgaaacactgtgtgg

SEQ ID NO: 10223 - DNA, 20 bp, synthetic construct
  misc_feature 1..20: note = Description of Artificial Sequence: Synthetic oligonucleotide
  source 1..20: mol_type = other DNA
aggctgaaacactgtgtgga

SEQ ID NO: 10224 - DNA, 20 bp, synthetic construct
  misc_feature 1..20: note = Description of Artificial Sequence: Synthetic oligonucleotide
  source 1..20: mol_type = other DNA
ggctgaaacactgtgtggat

SEQ ID NO: 10225 - DNA, 20 bp, synthetic construct
  misc_feature 1..20: note = Description of Artificial Sequence: Synthetic oligonucleotide
  source 1..20: mol_type = other DNA
gctgaaacactgtgtggata

SEQ ID NO: 10226 - DNA, 20 bp, synthetic construct
  misc_feature 1..20: note = Description of Artificial Sequence: Synthetic oligonucleotide
  source 1..20: mol_type = other DNA
ctgaaacactgtgtggataa

SEQ ID NO: 10227 - DNA, 20 bp, synthetic construct
  misc_feature 1..20: note = Description of Artificial Sequence: Synthetic oligonucleotide
  source 1..20: mol_type = other DNA
tgaaacactgtgtggataaa

SEQ ID NO: 10228 - DNA, 20 bp, synthetic construct
  misc_feature 1..20: note = Description of Artificial Sequence: Synthetic oligonucleotide
  source 1..20: mol_type = other DNA
gaaacactgtgtggataaaa

SEQ ID NO: 10229 - DNA, 20 bp, synthetic construct
  misc_feature 1..20: note = Description of Artificial Sequence: Synthetic oligonucleotide
  source 1..20: mol_type = other DNA
aaacactgtgtggataaaag

SEQ ID NO: 10230 - DNA, 20 bp, synthetic construct
  misc_feature 1..20: note = Description of Artificial Sequence: Synthetic oligonucleotide
  source 1..20: mol_type = other DNA
aacactgtgtggataaaaga

SEQ ID NO: 10231 - DNA, 20 bp, synthetic construct
  misc_feature 1..20: note = Description of Artificial Sequence: Synthetic oligonucleotide
  source 1..20: mol_type = other DNA
acactgtgtggataaaagag

SEQ ID NO: 10232 - DNA, 20 bp, synthetic construct
  misc_feature 1..20: note = Description of Artificial Sequence: Synthetic oligonucleotide
  source 1..20: mol_type = other DNA
cactgtgtggataaaagaga

SEQ ID NO: 10233 - DNA, 20 bp, synthetic construct
  misc_feature 1..20: note = Description of Artificial Sequence: Synthetic oligonucleotide
  source 1..20: mol_type = other DNA
actgtgtggataaaagagac

SEQ ID NO: 10234 - DNA, 20 bp, synthetic construct
  misc_feature 1..20: note = Description of Artificial Sequence: Synthetic oligonucleotide
  source 1..20: mol_type = other DNA
ctgtgtggataaaagagacc

SEQ ID NO: 10235 - DNA, 20 bp, synthetic construct
  misc_feature 1..20: note = Description of Artificial Sequence: Synthetic oligonucleotide
  source 1..20: mol_type = other DNA
tgtgtggataaaagagaccc

SEQ ID NO: 10236 - DNA, 20 bp, synthetic construct
  misc_feature 1..20: note = Description of Artificial Sequence: Synthetic oligonucleotide
  source 1..20: mol_type = other DNA
gtgtggataaaagagacccg

SEQ ID NO: 10237 - DNA, 20 bp, synthetic construct
  misc_feature 1..20: note = Description of Artificial Sequence: Synthetic oligonucleotide
  source 1..20: mol_type = other DNA
tgtggataaaagagacccgt

SEQ ID NO: 10238 - DNA, 20 bp, synthetic construct
  misc_feature 1..20: note = Description of Artificial Sequence: Synthetic oligonucleotide
  source 1..20: mol_type = other DNA
gtggataaaagagacccgtg

SEQ ID NO: 10239 - DNA, 20 bp, synthetic construct
  misc_feature 1..20: note = Description of Artificial Sequence: Synthetic oligonucleotide
  source 1..20: mol_type = other DNA
tggataaaagagacccgtga

SEQ ID NO: 10240 - DNA, 20 bp, synthetic construct
  misc_feature 1..20: note = Description of Artificial Sequence: Synthetic oligonucleotide
  source 1..20: mol_type = other DNA
ggataaaagagacccgtgaa

SEQ ID NO: 10241 - DNA, 20 bp, synthetic construct
  misc_feature 1..20: note = Description of Artificial Sequence: Synthetic oligonucleotide
  source 1..20: mol_type = other DNA
gataaaagagacccgtgaag

SEQ ID NO: 10242 - DNA, 20 bp, synthetic construct
  misc_feature 1..20: note = Description of Artificial Sequence: Synthetic oligonucleotide
  source 1..20: mol_type = other DNA
ataaaagagacccgtgaagg

SEQ ID NO: 10243 - DNA, 20 bp, synthetic construct
  misc_feature 1..20: note = Description of Artificial Sequence: Synthetic oligonucleotide
  source 1..20: mol_type = other DNA
taaaagagacccgtgaaggt

SEQ ID NO: 10244 - DNA, 20 bp, synthetic construct
  misc_feature 1..20: note = Description of Artificial Sequence: Synthetic oligonucleotide
  source 1..20: mol_type = other DNA
aaaagagacccgtgaaggtg

SEQ ID NO: 10245 - DNA, 20 bp, synthetic construct
  misc_feature 1..20: note = Description of Artificial Sequence: Synthetic oligonucleotide
  source 1..20: mol_type = other DNA
aaagagacccgtgaaggtgt

SEQ ID NO: 10246 - DNA, 20 bp, synthetic construct
  misc_feature 1..20: note = Description of Artificial Sequence: Synthetic oligonucleotide
  source 1..20: mol_type = other DNA
aagagacccgtgaaggtgtt

SEQ ID NO: 10247 - DNA, 20 bp, synthetic construct
  misc_feature 1..20: note = Description of Artificial Sequence: Synthetic oligonucleotide
  source 1..20: mol_type = other DNA
agagacccgtgaaggtgtta

SEQ ID NO: 10248 - DNA, 20 bp, synthetic construct
  misc_feature 1..20: note = Description of Artificial Sequence: Synthetic oligonucleotide
  source 1..20: mol_type = other DNA
gagacccgtgaaggtgttag

SEQ ID NO: 10249 - DNA, 20 bp, synthetic construct
  misc_feature 1..20: note = Description of Artificial Sequence: Synthetic oligonucleotide
  source 1..20: mol_type = other DNA
agacccgtgaaggtgttagg

SEQ ID NO: 10250 - DNA, 20 bp, synthetic construct
  misc_feature 1..20: note = Description of Artificial Sequence: Synthetic oligonucleotide
  source 1..20: mol_type = other DNA
gacccgtgaaggtgttaggt

SEQ ID NO: 10251 - DNA, 20 bp, synthetic construct
  misc_feature 1..20: note = Description of Artificial Sequence: Synthetic oligonucleotide
  source 1..20: mol_type = other DNA
acccgtgaaggtgttaggta

SEQ ID NO: 10252 - DNA, 20 bp, synthetic construct
  misc_feature 1..20: note = Description of Artificial Sequence: Synthetic oligonucleotide
  source 1..20: mol_type = other DNA
cccgtgaaggtgttaggtaa

SEQ ID NO: 10253 - DNA, 20 bp, synthetic construct
  misc_feature 1..20: note = Description of Artificial Sequence: Synthetic oligonucleotide
  source 1..20: mol_type = other DNA
ccgtgaaggtgttaggtaaa

SEQ ID NO: 10254 - DNA, 20 bp, synthetic construct
  misc_feature 1..20: note = Description of Artificial Sequence: Synthetic oligonucleotide
  source 1..20: mol_type = other DNA
cgtgaaggtgttaggtaaac

SEQ ID NO: 10255 - DNA, 20 bp, synthetic construct
  misc_feature 1..20: note = Description of Artificial Sequence: Synthetic oligonucleotide
  source 1..20: mol_type = other DNA
gtgaaggtgttaggtaaact

SEQ ID NO: 10256 - DNA, 20 bp, synthetic construct
  misc_feature 1..20: note = Description of Artificial Sequence: Synthetic oligonucleotide
  source 1..20: mol_type = other DNA
tgaaggtgttaggtaaactt

SEQ ID NO: 10257 - DNA, 20 bp, synthetic construct
  misc_feature 1..20: note = Description of Artificial Sequence: Synthetic oligonucleotide
  source 1..20: mol_type = other DNA
gaaggtgttaggtaaactta

SEQ ID NO: 10258 - DNA, 20 bp, synthetic construct
  misc_feature 1..20: note = Description of Artificial Sequence: Synthetic oligonucleotide
  source 1..20: mol_type = other DNA
aaggtgttaggtaaacttac

SEQ ID NO: 10259 - DNA, 20 bp, synthetic construct
  misc_feature 1..20: note = Description of Artificial Sequence: Synthetic oligonucleotide
  source 1..20: mol_type = other DNA
aggtgttaggtaaacttaca

SEQ ID NO: 10260 - DNA, 20 bp, synthetic construct
  misc_feature 1..20: note = Description of Artificial Sequence: Synthetic oligonucleotide
  source 1..20: mol_type = other DNA
ggtgttaggtaaacttacat

SEQ ID NO: 10261 - DNA, 20 bp, synthetic construct
  misc_feature 1..20: note = Description of Artificial Sequence: Synthetic oligonucleotide
  source 1..20: mol_type = other DNA
gtgttaggtaaacttacata

SEQ ID NO: 10262 - DNA, 20 bp, synthetic construct
  misc_feature 1..20: note = Description of Artificial Sequence: Synthetic oligonucleotide
  source 1..20: mol_type = other DNA
tgttaggtaaacttacatag

SEQ ID NO: 10263 - DNA, 20 bp, synthetic construct
  misc_feature 1..20: note = Description of Artificial Sequence: Synthetic oligonucleotide
  source 1..20: mol_type = other DNA
gttaggtaaacttacatagc

SEQ ID NO: 10264 - DNA, 20 bp, synthetic construct
  misc_feature 1..20: note = Description of Artificial Sequence: Synthetic oligonucleotide
  source 1..20: mol_type = other DNA
ttaggtaaacttacatagca

SEQ ID NO: 10265 - DNA, 20 bp, synthetic construct
  misc_feature 1..20: note = Description of Artificial Sequence: Synthetic oligonucleotide
  source 1..20: mol_type = other DNA
taggtaaacttacatagcat

SEQ ID NO: 10266 - DNA, 20 bp, synthetic construct
  misc_feature 1..20: note = Description of Artificial Sequence: Synthetic oligonucleotide
  source 1..20: mol_type = other DNA
aggtaaacttacatagcatt

SEQ ID NO: 10267 - DNA, 20 bp, synthetic construct
  misc_feature 1..20: note = Description of Artificial Sequence: Synthetic oligonucleotide
  source 1..20: mol_type = other DNA
ggtaaacttacatagcatta

SEQ ID NO: 10268 - DNA, 20 bp, synthetic construct
  misc_feature 1..20: note = Description of Artificial Sequence: Synthetic oligonucleotide
  source 1..20: mol_type = other DNA
gtaaacttacatagcattag

SEQ ID NO: 10269 - DNA, 20 bp, synthetic construct
  misc_feature 1..20: note = Description of Artificial Sequence: Synthetic oligonucleotide
  source 1..20: mol_type = other DNA
taaacttacatagcattaga

SEQ ID NO: 10270 - DNA, 20 bp, synthetic construct
  misc_feature 1..20: note = Description of Artificial Sequence: Synthetic oligonucleotide
  source 1..20: mol_type = other DNA
aaacttacatagcattagaa

SEQ ID NO: 10271 - DNA, 20 bp, synthetic construct
  misc_feature 1..20: note = Description of Artificial Sequence: Synthetic oligonucleotide
  source 1..20: mol_type = other DNA
aacttacatagcattagaag

SEQ ID NO: 10272 - DNA, 20 bp, synthetic construct
  misc_feature 1..20: note = Description of Artificial Sequence: Synthetic oligonucleotide
  source 1..20: mol_type = other DNA
acttacatagcattagaagt

SEQ ID NO: 10273 - DNA, 20 bp, synthetic construct
  misc_feature 1..20: note = Description of Artificial Sequence: Synthetic oligonucleotide
  source 1..20: mol_type = other DNA
cttacatagcattagaagtc

SEQ ID NO: 10274 - DNA, 20 bp, synthetic construct
  misc_feature 1..20: note = Description of Artificial Sequence: Synthetic oligonucleotide
  source 1..20: mol_type = other DNA
ttacatagcattagaagtca

SEQ ID NO: 10275 - DNA, 20 bp, synthetic construct
  misc_feature 1..20: note = Description of Artificial Sequence: Synthetic oligonucleotide
  source 1..20: mol_type = other DNA
tacatagcattagaagtcaa

SEQ ID NO: 10276 - DNA, 20 bp, synthetic construct
  misc_feature 1..20: note = Description of Artificial Sequence: Synthetic oligonucleotide
  source 1..20: mol_type = other DNA
acatagcattagaagtcaaa

SEQ ID NO: 10277 - DNA, 20 bp, synthetic construct
  misc_feature 1..20: note = Description of Artificial Sequence: Synthetic oligonucleotide
  source 1..20: mol_type = other DNA
catagcattagaagtcaaag

SEQ ID NO: 10278 - DNA, 20 bp, synthetic construct
  misc_feature 1..20: note = Description of Artificial Sequence: Synthetic oligonucleotide
  source 1..20: mol_type = other DNA
atagcattagaagtcaaagg

SEQ ID NO: 10279 - DNA, 20 bp, synthetic construct
  misc_feature 1..20: note = Description of Artificial Sequence: Synthetic oligonucleotide
  source 1..20: mol_type = other DNA
tagcattagaagtcaaagga

SEQ ID NO: 10280 - DNA, 20 bp, synthetic construct
  misc_feature 1..20: note = Description of Artificial Sequence: Synthetic oligonucleotide
  source 1..20: mol_type = other DNA
agcattagaagtcaaaggaa

SEQ ID NO: 10281 - DNA, 20 bp, synthetic construct
  misc_feature 1..20: note = Description of Artificial Sequence: Synthetic oligonucleotide
  source 1..20: mol_type = other DNA
gcattagaagtcaaaggaaa

SEQ ID NO: 10282 - DNA, 20 bp, synthetic construct
  misc_feature 1..20: note = Description of Artificial Sequence: Synthetic oligonucleotide
  source 1..20: mol_type = other DNA
cattagaagtcaaaggaaat

SEQ ID NO: 10283 - DNA, 20 bp, synthetic construct
  misc_feature 1..20: note = Description of Artificial Sequence: Synthetic oligonucleotide
  source 1..20: mol_type = other DNA
attagaagtcaaaggaaata

SEQ ID NO: 10284 - DNA, 20 bp, synthetic construct
  misc_feature 1..20: note = Description of Artificial Sequence: Synthetic oligonucleotide
  source 1..20: mol_type = other DNA
ttagaagtcaaaggaaatac

SEQ ID NO: 10285 - DNA, 20 bp, synthetic construct
  misc_feature 1..20: note = Description of Artificial Sequence: Synthetic oligonucleotide
  source 1..20: mol_type = other DNA
tagaagtcaaaggaaatact

SEQ ID NO: 10286 - DNA, 20 bp, synthetic construct
  misc_feature 1..20: note = Description of Artificial Sequence: Synthetic oligonucleotide
  source 1..20: mol_type = other DNA
agaagtcaaaggaaatactg

SEQ ID NO: 10287 - DNA, 20 bp, synthetic construct
  misc_feature 1..20: note = Description of Artificial Sequence: Synthetic oligonucleotide
  source 1..20: mol_type = other DNA
gaagtcaaaggaaatactgc

SEQ ID NO: 10288 - DNA, 20 bp, synthetic construct
  misc_feature 1..20: note = Description of Artificial Sequence: Synthetic oligonucleotide
  source 1..20: mol_type = other DNA
aagtcaaaggaaatactgca

SEQ ID NO: 10289 - DNA, 20 bp, synthetic construct
  misc_feature 1..20: note = Description of Artificial Sequence: Synthetic oligonucleotide
  source 1..20: mol_type = other DNA
agtcaaaggaaatactgcat

SEQ ID NO: 10290 - DNA, 20 bp, synthetic construct
  misc_feature 1..20: note = Description of Artificial Sequence: Synthetic oligonucleotide
  source 1..20: mol_type = other DNA
gtcaaaggaaatactgcata

SEQ ID NO: 10291 - DNA, 20 bp, synthetic construct
  misc_feature 1..20: note = Description of Artificial Sequence: Synthetic oligonucleotide
  source 1..20: mol_type = other DNA
tcaaaggaaatactgcataa

SEQ ID NO: 10292 - DNA, 20 bp, synthetic construct
  misc_feature 1..20: note = Description of Artificial Sequence: Synthetic oligonucleotide
  source 1..20: mol_type = other DNA
caaaggaaatactgcataag

SEQ ID NO: 10293 - DNA, 20 bp, synthetic construct
  misc_feature 1..20: note = Description of Artificial Sequence: Synthetic oligonucleotide
  source 1..20: mol_type = other DNA
aaaggaaatactgcataagc

SEQ ID NO: 10294 - DNA, 20 bp, synthetic construct
  misc_feature 1..20: note = Description of Artificial Sequence: Synthetic oligonucleotide
  source 1..20: mol_type = other DNA
aaggaaatactgcataagcc

SEQ ID NO: 10295 - DNA, 20 bp, synthetic construct
  misc_feature 1..20: note = Description of Artificial Sequence: Synthetic oligonucleotide
  source 1..20: mol_type = other DNA
aggaaatactgcataagcct

SEQ ID NO: 10296 - DNA, 20 bp, synthetic construct
  misc_feature 1..20: note = Description of Artificial Sequence: Synthetic oligonucleotide
  source 1..20: mol_type = other DNA
ggaaatactgcataagcctt

SEQ ID NO: 10297 - DNA, 20 bp, synthetic construct
  misc_feature 1..20: note = Description of Artificial Sequence: Synthetic oligonucleotide
  source 1..20: mol_type = other DNA
gaaatactgcataagccttt

SEQ ID NO: 10298 - DNA, 20 bp, synthetic construct
  misc_feature 1..20: note = Description of Artificial Sequence: Synthetic oligonucleotide
  source 1..20: mol_type = other DNA
aaatactgcataagccttta

SEQ ID NO: 10299 - DNA, 20 bp, synthetic construct
  misc_feature 1..20: note = Description of Artificial Sequence: Synthetic oligonucleotide
  source 1..20: mol_type = other DNA
aatactgcataagcctttac

SEQ ID NO: 10300 - DNA, 20 bp, synthetic construct
  misc_feature 1..20: note = Description of Artificial Sequence: Synthetic oligonucleotide
  source 1..20: mol_type = other DNA
atactgcataagcctttact

SEQ ID NO: 10301 - DNA, 20 bp, synthetic construct
  misc_feature 1..20: note = Description of Artificial Sequence: Synthetic oligonucleotide
  source 1..20: mol_type = other DNA
tactgcataagcctttacta

SEQ ID NO: 10302 - DNA, 20 bp, synthetic construct
  misc_feature 1..20: note = Description of Artificial Sequence: Synthetic oligonucleotide
  source 1..20: mol_type = other DNA
actgcataagcctttactaa

SEQ ID NO: 10303 - DNA, 20 bp, synthetic construct
  misc_feature 1..20: note = Description of Artificial Sequence: Synthetic oligonucleotide
  source 1..20: mol_type = other DNA
ctgcataagcctttactaaa

SEQ ID NO: 10304 - DNA, 20 bp, synthetic construct
  misc_feature 1..20: note = Description of Artificial Sequence: Synthetic oligonucleotide
  source 1..20: mol_type = other DNA
tgcataagcctttactaaag

SEQ ID NO: 10305 - DNA, 20 bp, synthetic construct
  misc_feature 1..20: note = Description of Artificial Sequence: Synthetic oligonucleotide
  source 1..20: mol_type = other DNA
gcataagcctttactaaagg

SEQ ID NO: 10306 - DNA, 20 bp, synthetic construct
  misc_feature 1..20: note = Description of Artificial Sequence: Synthetic oligonucleotide
  source 1..20: mol_type = other DNA
cataagcctttactaaaggg

SEQ ID NO: 10307 - DNA, 20 bp, synthetic construct
  misc_feature 1..20: note = Description of Artificial Sequence: Synthetic oligonucleotide
  source 1..20: mol_type = other DNA
ataagcctttactaaaggga

SEQ ID NO: 10308 - DNA, 20 bp, synthetic construct
  misc_feature 1..20: note = Description of Artificial Sequence: Synthetic oligonucleotide
  source 1..20: mol_type = other DNA
taagcctttactaaagggaa

SEQ ID NO: 10309 - DNA, 20 bp, synthetic construct
  misc_feature 1..20: note = Description of Artificial Sequence: Synthetic oligonucleotide
  source 1..20: mol_type = other DNA
aagcctttactaaagggaaa

SEQ ID NO: 10310 - DNA, 20 bp, synthetic construct
  misc_feature 1..20: note = Description of Artificial Sequence: Synthetic oligonucleotide
  source 1..20: mol_type = other DNA
agcctttactaaagggaaag

SEQ ID NO: 10311 - DNA, 20 bp, synthetic construct
  misc_feature 1..20: note = Description of Artificial Sequence: Synthetic oligonucleotide
  source 1..20: mol_type = other DNA
gcctttactaaagggaaagt

SEQ ID NO: 10312 - DNA, 20 bp, synthetic construct
  misc_feature 1..20: note = Description of Artificial Sequence: Synthetic oligonucleotide
  source 1..20: mol_type = other DNA
cctttactaaagggaaagtg

SEQ ID NO: 10313 - DNA, 20 bp, synthetic construct
  misc_feature 1..20: note = Description of Artificial Sequence: Synthetic oligonucleotide
  source 1..20: mol_type = other DNA
ctttactaaagggaaagtgt

SEQ ID NO: 10314 - DNA, 20 bp, synthetic construct
  misc_feature 1..20: note = Description of Artificial Sequence: Synthetic oligonucleotide
  source 1..20: mol_type = other DNA
tttactaaagggaaagtgta

SEQ ID NO: 10315 - DNA, 20 bp, synthetic construct
  misc_feature 1..20: note = Description of Artificial Sequence: Synthetic oligonucleotide
  source 1..20: mol_type = other DNA
ttactaaagggaaagtgtac

SEQ ID NO: 10316 - DNA, 20 bp, synthetic construct
  misc_feature 1..20: note = Description of Artificial Sequence: Synthetic oligonucleotide
  source 1..20: mol_type = other DNA
tactaaagggaaagtgtacc

SEQ ID NO: 10317 - DNA, 20 bp, synthetic construct
  misc_feature 1..20: note = Description of Artificial Sequence: Synthetic oligonucleotide
  source 1..20: mol_type = other DNA
actaaagggaaagtgtaccc

SEQ ID NO: 10318 - DNA, 20 bp, synthetic construct
  misc_feature 1..20: note = Description of Artificial Sequence: Synthetic oligonucleotide
  source 1..20: mol_type = other DNA
ctaaagggaaagtgtaccca

SEQ ID NO: 10319 - DNA, 20 bp, synthetic construct
  misc_feature 1..20: note = Description of Artificial Sequence: Synthetic oligonucleotide
  source 1..20: mol_type = other DNA
taaagggaaagtgtacccac

SEQ ID NO: 10320 - DNA, 20 bp, synthetic construct
  misc_feature 1..20: note = Description of Artificial Sequence: Synthetic oligonucleotide
  source 1..20: mol_type = other DNA
aaagggaaagtgtacccaca

SEQ ID NO: 10321 - DNA, 20 bp, synthetic construct
  misc_feature 1..20: note = Description of Artificial Sequence: Synthetic oligonucleotide
  source 1..20: mol_type = other DNA
aagggaaagtgtacccacaa

SEQ ID NO: 10322 - DNA, 20 bp, synthetic construct
  misc_feature 1..20: note = Description of Artificial Sequence: Synthetic oligonucleotide
  source 1..20: mol_type = other DNA
agggaaagtgtacccacaaa

SEQ ID NO: 10323 - DNA, 20 bp, synthetic construct
  misc_feature 1..20: note = Description of Artificial Sequence: Synthetic oligonucleotide
  source 1..20: mol_type = other DNA
gggaaagtgtacccacaaaa

SEQ ID NO: 10324 - DNA, 20 bp, synthetic construct
  misc_feature 1..20: note = Description of Artificial Sequence: Synthetic oligonucleotide
  source 1..20: mol_type = other DNA
ggaaagtgtacccacaaaag

SEQ ID NO: 10325 - DNA, 20 bp, synthetic construct
  misc_feature 1..20: note = Description of Artificial Sequence: Synthetic oligonucleotide
  source 1..20: mol_type = other DNA
gaaagtgtacccacaaaaga

SEQ ID NO: 10326 - DNA, 20 bp, synthetic construct
  misc_feature 1..20: note = Description of Artificial Sequence: Synthetic oligonucleotide
  source 1..20: mol_type = other DNA
aaagtgtacccacaaaagag

SEQ ID NO: 10327 - DNA, 20 bp, synthetic construct
  misc_feature 1..20: note = Description of Artificial Sequence: Synthetic oligonucleotide
  source 1..20: mol_type = other DNA
aagtgtacccacaaaagagg

SEQ ID NO: 10328 - DNA, 20 bp, synthetic construct
  misc_feature 1..20: note = Description of Artificial Sequence: Synthetic oligonucleotide
  source 1..20: mol_type = other DNA
agtgtacccacaaaagaggc

SEQ ID NO: 10329 - DNA, 20 bp, synthetic construct
  misc_feature 1..20: note = Description of Artificial Sequence: Synthetic oligonucleotide
  source 1..20: mol_type = other DNA
gtgtacccacaaaagaggcc

SEQ ID NO: 10330 - DNA, 20 bp, synthetic construct
  misc_feature 1..20: note = Description of Artificial Sequence: Synthetic oligonucleotide
  source 1..20: mol_type = other DNA
tgtacccacaaaagaggccc

SEQ ID NO: 10331 - DNA, 20 bp, synthetic construct
  misc_feature 1..20: note = Description of Artificial Sequence: Synthetic oligonucleotide
  source 1..20: mol_type = other DNA
gtacccacaaaagaggcccc

SEQ ID NO: 10332 - DNA, 20 bp, synthetic construct
  misc_feature 1..20: note = Description of Artificial Sequence: Synthetic oligonucleotide
  source 1..20: mol_type = other DNA
tacccacaaaagaggcccca

SEQ ID NO: 10333 - DNA, 20 bp, synthetic construct
  misc_feature 1..20: note = Description of Artificial Sequence: Synthetic oligonucleotide
  source 1..20: mol_type = other DNA
acccacaaaagaggccccag

SEQ ID NO: 10334 - DNA, 20 bp, synthetic construct
  misc_feature 1..20: note = Description of Artificial Sequence: Synthetic oligonucleotide
  source 1..20: mol_type = other DNA
cccacaaaagaggccccagt

SEQ ID NO: 10335 - DNA, 20 bp, synthetic construct
  misc_feature 1..20: note = Description of Artificial Sequence: Synthetic oligonucleotide
  source 1..20: mol_type = other DNA
ccacaaaagaggccccagta

SEQ ID NO: 10336 - DNA, 20 bp, synthetic construct
  misc_feature 1..20: note = Description of Artificial Sequence: Synthetic oligonucleotide
  source 1..20: mol_type = other DNA
cacaaaagaggccccagtag

SEQ ID NO: 10337 - DNA, 20 bp, synthetic construct
  misc_feature 1..20: note = Description of Artificial Sequence: Synthetic oligonucleotide
  source 1..20: mol_type = other DNA
acaaaagaggccccagtagt

SEQ ID NO: 10338 - DNA, 20 bp, synthetic construct
  misc_feature 1..20: note = Description of Artificial Sequence: Synthetic oligonucleotide
  source 1..20: mol_type = other DNA
caaaagaggccccagtagtg

SEQ ID NO: 10339 - DNA, 20 bp, synthetic construct
  misc_feature 1..20: note = Description of Artificial Sequence: Synthetic oligonucleotide
  source 1..20: mol_type = other DNA
aaaagaggccccagtagtgg

SEQ ID NO: 10340 - DNA, 20 bp, synthetic construct
  misc_feature 1..20: note = Description of Artificial Sequence: Synthetic oligonucleotide
  source 1..20: mol_type = other DNA
aaagaggccccagtagtggt

SEQ ID NO: 10341 - DNA, 20 bp, synthetic construct
  misc_feature 1..20: note = Description of Artificial Sequence: Synthetic oligonucleotide
  source 1..20: mol_type = other DNA
aagaggccccagtagtggtt

SEQ ID NO: 10342 - DNA, 20 bp, synthetic construct
  misc_feature 1..20: note = Description of Artificial Sequence: Synthetic oligonucleotide
  source 1..20: mol_type = other DNA
agaggccccagtagtggttc

SEQ ID NO: 10343 - DNA, 20 bp, synthetic construct
  misc_feature 1..20: note = Description of Artificial Sequence: Synthetic oligonucleotide
  source 1..20: mol_type = other DNA
gaggccccagtagtggttct

SEQ ID NO: 10344 - DNA, 20 bp, synthetic construct
  misc_feature 1..20: note = Description of Artificial Sequence: Synthetic oligonucleotide
  source 1..20: mol_type = other DNA
aggccccagtagtggttctg

SEQ ID NO: 10345 - DNA, 20 bp, synthetic construct
  misc_feature 1..20: note = Description of Artificial Sequence: Synthetic oligonucleotide
  source 1..20: mol_type = other DNA
ggccccagtagtggttctga

SEQ ID NO: 10346 - DNA, 20 bp, synthetic construct
  misc_feature 1..20: note = Description of Artificial Sequence: Synthetic oligonucleotide
  source 1..20: mol_type = other DNA
gccccagtagtggttctgat

SEQ ID NO: 10347 - DNA, 20 bp, synthetic construct
  misc_feature 1..20: note = Description of Artificial Sequence: Synthetic oligonucleotide
  source 1..20: mol_type = other DNA
ccccagtagtggttctgatg

SEQ ID NO: 10348 - DNA, 20 bp, synthetic construct
  misc_feature 1..20: note = Description of Artificial Sequence: Synthetic oligonucleotide
  source 1..20: mol_type = other DNA
cccagtagtggttctgatga

SEQ ID NO: 10349 - DNA, 20 bp, synthetic construct
  misc_feature 1..20: note = Description of Artificial Sequence: Synthetic oligonucleotide
  source 1..20: mol_type = other DNA
ccagtagtggttctgatgac

SEQ ID NO: 10350 - DNA, 20 bp, synthetic construct
  misc_feature 1..20: note = Description of Artificial Sequence: Synthetic oligonucleotide
  source 1..20: mol_type = other DNA
cagtagtggttctgatgacc

SEQ ID NO: 10351 - DNA, 20 bp, synthetic construct
  misc_feature 1..20: note = Description of Artificial Sequence: Synthetic oligonucleotide
  source 1..20: mol_type = other DNA
agtagtggttctgatgacca

SEQ ID NO: 10352 - DNA, 20 bp, synthetic construct
  misc_feature 1..20: note = Description of Artificial Sequence: Synthetic oligonucleotide
  source 1..20: mol_type = other DNA
gtagtggttctgatgaccag

SEQ ID NO: 10353 - DNA, 20 bp, synthetic construct
  misc_feature 1..20: note = Description of Artificial Sequence: Synthetic oligonucleotide
  source 1..20: mol_type = other DNA
tagtggttctgatgaccagg

SEQ ID NO: 10354 - DNA, 20 bp, synthetic construct
  misc_feature 1..20: note = Description of Artificial Sequence: Synthetic oligonucleotide
  source 1..20: mol_type = other DNA
agtggttctgatgaccagga

SEQ ID NO: 10355 - DNA, 20 bp, synthetic construct
  misc_feature 1..20: note = Description of Artificial Sequence: Synthetic oligonucleotide
  source 1..20: mol_type = other DNA
gtggttctgatgaccaggat

SEQ ID NO: 10356 - DNA, 20 bp, synthetic construct
  misc_feature 1..20: note = Description of Artificial Sequence: Synthetic oligonucleotide
  source 1..20: mol_type = other DNA
tggttctgatgaccaggata

SEQ ID NO: 10357 - DNA, 20 bp, synthetic construct
  misc_feature 1..20: note = Description of Artificial Sequence: Synthetic oligonucleotide
  source 1..20: mol_type = other DNA
ggttctgatgaccaggatat

SEQ ID NO: 10358 - DNA, 20 bp, synthetic construct
  misc_feature 1..20: note = Description of Artificial Sequence: Synthetic oligonucleotide
  source 1..20: mol_type = other DNA
gttctgatgaccaggatatg

SEQ ID NO: 10359 - DNA, 20 bp, synthetic construct
  misc_feature 1..20: note = Description of Artificial Sequence: Synthetic oligonucleotide
  source 1..20: mol_type = other DNA
ttctgatgaccaggatatgt

SEQ ID NO: 10360 - DNA, 20 bp, synthetic construct
  misc_feature 1..20: note = Description of Artificial Sequence: Synthetic oligonucleotide
  source 1..20: mol_type = other DNA
tctgatgaccaggatatgta

SEQ ID NO: 10361 - DNA, 20 bp, synthetic construct
  misc_feature 1..20: note = Description of Artificial Sequence: Synthetic oligonucleotide
  source 1..20: mol_type = other DNA
ctgatgaccaggatatgtag

SEQ ID NO: 10362 - DNA, 20 bp, synthetic construct
  misc_feature 1..20: note = Description of Artificial Sequence: Synthetic oligonucleotide
  source 1..20: mol_type = other DNA
tgatgaccaggatatgtaga

SEQ ID NO: 10363 - DNA, 20 bp, synthetic construct
  misc_feature 1..20: note = Description of Artificial Sequence: Synthetic oligonucleotide
  source 1..20: mol_type = other DNA
gatgaccaggatatgtagaa

SEQ ID NO: 10364 - DNA, 20 bp, synthetic construct
  misc_feature 1..20: note = Description of Artificial Sequence: Synthetic oligonucleotide
  source 1..20: mol_type = other DNA
atgaccaggatatgtagaag

SEQ ID NO: 10365 - DNA, 20 bp, synthetic construct
  misc_feature 1..20: note = Description of Artificial Sequence: Synthetic oligonucleotide
  source 1..20: mol_type = other DNA
tgaccaggatatgtagaagc

SEQ ID NO: 10366 - DNA, 20 bp, synthetic construct
  misc_feature 1..20: note = Description of Artificial Sequence: Synthetic oligonucleotide
  source 1..20: mol_type = other DNA
gaccaggatatgtagaagca

SEQ ID NO: 10367 - DNA, 20 bp, synthetic construct
  misc_feature 1..20: note = Description of Artificial Sequence: Synthetic oligonucleotide
  source 1..20: mol_type = other DNA
accaggatatgtagaagcag

SEQ ID NO: 10368 - DNA, 20 bp, synthetic construct
  misc_feature 1..20: note = Description of Artificial Sequence: Synthetic oligonucleotide
  source 1..20: mol_type = other DNA
ccaggatatgtagaagcagt

SEQ ID NO: 10369 - DNA, 20 bp, synthetic construct
  misc_feature 1..20: note = Description of Artificial Sequence: Synthetic oligonucleotide
  source 1..20: mol_type = other DNA
caggatatgtagaagcagtg

SEQ ID NO: 10370 - DNA, 20 bp, synthetic construct
  misc_feature 1..20: note = Description of Artificial Sequence: Synthetic oligonucleotide
  source 1..20: mol_type = other DNA
aggatatgtagaagcagtgc

SEQ ID NO: 10371 - DNA, 20 bp, synthetic construct
  misc_feature 1..20: note = Description of Artificial Sequence: Synthetic oligonucleotide
  source 1..20: mol_type = other DNA
ggatatgtagaagcagtgct

SEQ ID NO: 10372 - DNA, 20 bp, synthetic construct
  misc_feature 1..20: note = Description of Artificial Sequence: Synthetic oligonucleotide
  source 1..20: mol_type = other DNA
gatatgtagaagcagtgctg

SEQ ID NO: 10373 - DNA, 20 bp, synthetic construct
  misc_feature 1..20: note = Description of Artificial Sequence: Synthetic oligonucleotide
  source 1..20: mol_type = other DNA
atatgtagaagcagtgctgt

SEQ ID NO: 10374 - DNA, 20 bp, synthetic construct
  misc_feature 1..20: note = Description of Artificial Sequence: Synthetic oligonucleotide
  source 1..20: mol_type = other DNA
tatgtagaagcagtgctgta

SEQ ID NO: 10375 - DNA, 20 bp, synthetic construct
  misc_feature 1..20: note = Description of Artificial Sequence: Synthetic oligonucleotide
  source 1..20: mol_type = other DNA
atgtagaagcagtgctgtag

SEQ ID NO: 10376 - DNA, 20 bp, synthetic construct
  misc_feature 1..20: note = Description of Artificial Sequence: Synthetic oligonucleotide
  source 1..20: mol_type = other DNA
tgtagaagcagtgctgtaga

SEQ ID NO: 10377 - DNA, 20 bp, synthetic construct
  misc_feature 1..20: note = Description of Artificial Sequence: Synthetic oligonucleotide
  source 1..20: mol_type = other DNA
gtagaagcagtgctgtagat

SEQ ID NO: 10378 - DNA, 20 bp, synthetic construct
  misc_feature 1..20: note = Description of Artificial Sequence: Synthetic oligonucleotide
  source 1..20: mol_type = other DNA
tagaagcagtgctgtagatg

SEQ ID NO: 10379 - DNA, 20 bp, synthetic construct
  misc_feature 1..20: note = Description of Artificial Sequence: Synthetic oligonucleotide
  source 1..20: mol_type = other DNA
agaagcagtgctgtagatgg

SEQ ID NO: 10380 - DNA, 20 bp, synthetic construct
  misc_feature 1..20: note = Description of Artificial Sequence: Synthetic oligonucleotide
  source 1..20: mol_type = other DNA
gaagcagtgctgtagatggg

SEQ ID NO: 10381 - DNA, 20 bp, synthetic construct
  misc_feature 1..20: note = Description of Artificial Sequence: Synthetic oligonucleotide
  source 1..20: mol_type = other DNA
aagcagtgctgtagatgggg

SEQ ID NO: 10382 - DNA, 20 bp, synthetic construct
  misc_feature 1..20: note = Description of Artificial Sequence: Synthetic oligonucleotide
  source 1..20: mol_type = other DNA
agcagtgctgtagatgggga

SEQ ID NO: 10383 - DNA, 20 bp, synthetic construct
  misc_feature 1..20: note = Description of Artificial Sequence: Synthetic oligonucleotide
  source 1..20: mol_type = other DNA
gcagtgctgtagatggggag

SEQ ID NO: 10384 - DNA, 20 bp, synthetic construct
  misc_feature 1..20: note = Description of Artificial Sequence: Synthetic oligonucleotide
  source 1..20: mol_type = other DNA
cagtgctgtagatggggagg

SEQ ID NO: 10385 - DNA, 20 bp, synthetic construct
  misc_feature 1..20: note = Description of Artificial Sequence: Synthetic oligonucleotide
  source 1..20: mol_type = other DNA
agtgctgtagatggggaggc

SEQ ID NO: 10386 - DNA, 20 bp, synthetic construct
  misc_feature 1..20: note = Description of Artificial Sequence: Synthetic oligonucleotide
  source 1..20: mol_type = other DNA
gtgctgtagatggggaggca

SEQ ID NO: 10387 - DNA, 20 bp, synthetic construct
  misc_feature 1..20: note = Description of Artificial Sequence: Synthetic oligonucleotide
  source 1..20: mol_type = other DNA
tgctgtagatggggaggcac

SEQ ID NO: 10388 - DNA, 20 bp, synthetic construct
  misc_feature 1..20: note = Description of Artificial Sequence: Synthetic oligonucleotide
  source 1..20: mol_type = other DNA
gctgtagatggggaggcact

SEQ ID NO: 10389 - DNA, 20 bp, synthetic construct
  misc_feature 1..20: note = Description of Artificial Sequence: Synthetic oligonucleotide
  source 1..20: mol_type = other DNA
ctgtagatggggaggcactc

SEQ ID NO: 10390 - DNA, 20 bp, synthetic construct
  misc_feature 1..20: note = Description of Artificial Sequence: Synthetic oligonucleotide
  source 1..20: mol_type = other DNA
tgtagatggggaggcactcc

SEQ ID NO: 10391 - DNA, 20 bp, synthetic construct
  misc_feature 1..20: note = Description of Artificial Sequence: Synthetic oligonucleotide
  source 1..20: mol_type = other DNA
gtagatggggaggcactcca

SEQ ID NO: 10392 - DNA, 20 bp, synthetic construct
  misc_feature 1..20: note = Description of Artificial Sequence: Synthetic oligonucleotide
  source 1..20: mol_type = other DNA
tagatggggaggcactccac

SEQ ID NO: 10393 - DNA, 20 bp, synthetic construct
  misc_feature 1..20: note = Description of Artificial Sequence: Synthetic oligonucleotide
  source 1..20: mol_type = other DNA
agatggggaggcactccacg

SEQ ID NO: 10394 - DNA, 20 bp, synthetic construct
  misc_feature 1..20: note = Description of Artificial Sequence: Synthetic oligonucleotide
  source 1..20: mol_type = other DNA
gatggggaggcactccacgc

SEQ ID NO: 10395 - DNA, 20 bp, synthetic construct
  misc_feature 1..20: note = Description of Artificial Sequence: Synthetic oligonucleotide
  source 1..20: mol_type = other DNA
atggggaggcactccacgct

SEQ ID NO: 10396 - DNA, 20 bp, synthetic construct
  misc_feature 1..20: note = Description of Artificial Sequence: Synthetic oligonucleotide
  source 1..20: mol_type = other DNA
tggggaggcactccacgctc

SEQ ID NO: 10397 - DNA, 20 bp, synthetic construct
  misc_feature 1..20: note = Description of Artificial Sequence: Synthetic oligonucleotide
  source 1..20: mol_type = other DNA
ggggaggcactccacgctcc

SEQ ID NO: 10398 - DNA, 20 bp, synthetic construct
  misc_feature 1..20: note = Description of Artificial Sequence: Synthetic oligonucleotide
  source 1..20: mol_type = other DNA
gggaggcactccacgctccc

SEQ ID NO: 10399 - DNA, 20 bp, synthetic construct
  misc_feature 1..20: note = Description of Artificial Sequence: Synthetic oligonucleotide
  source 1..20: mol_type = other DNA
ggaggcactccacgctccct

SEQ ID NO: 10400 - DNA, 20 bp, synthetic construct
  misc_feature 1..20: note = Description of Artificial Sequence: Synthetic oligonucleotide
  source 1..20: mol_type = other DNA
gaggcactccacgctccctc

SEQ ID NO: 10401 - DNA, 20 bp, synthetic construct
  misc_feature 1..20: note = Description of Artificial Sequence: Synthetic oligonucleotide
  source 1..20: mol_type = other DNA
aggcactccacgctccctca

SEQ ID NO: 10402 - DNA, 20 bp, synthetic construct
  misc_feature 1..20: note = Description of Artificial Sequence: Synthetic oligonucleotide
  source 1..20: mol_type = other DNA
ggcactccacgctccctcag

SEQ ID NO: 10403 - DNA, 20 bp, synthetic construct
  misc_feature 1..20: note = Description of Artificial Sequence: Synthetic oligonucleotide
  source 1..20: mol_type = other DNA
gcactccacgctccctcagg

SEQ ID NO: 10404 - DNA, 20 bp, synthetic construct
  misc_feature 1..20: note = Description of Artificial Sequence: Synthetic oligonucleotide
  source 1..20: mol_type = other DNA
cactccacgctccctcaggg

SEQ ID NO: 10405 - DNA, 20 bp, synthetic construct
  misc_feature 1..20: note = Description of Artificial Sequence: Synthetic oligonucleotide
  source 1..20: mol_type = other DNA
actccacgctccctcagggg

SEQ ID NO: 10406 - DNA, 20 bp, synthetic construct
  misc_feature 1..20: note = Description of Artificial Sequence: Synthetic oligonucleotide
  source 1..20: mol_type = other DNA
ctccacgctccctcagggga

SEQ ID NO: 10407 - DNA, 20 bp, synthetic construct
  misc_feature 1..20: note = Description of Artificial Sequence: Synthetic oligonucleotide
  source 1..20: mol_type = other DNA
tccacgctccctcaggggac

SEQ ID NO: 10408 - DNA, 20 bp, synthetic construct
  misc_feature 1..20: note = Description of Artificial Sequence: Synthetic oligonucleotide
  source 1..20: mol_type = other DNA
ccacgctccctcaggggact

SEQ ID NO: 10409 - DNA, 20 bp, synthetic construct
  misc_feature 1..20: note = Description of Artificial Sequence: Synthetic oligonucleotide
  source 1..20: mol_type = other DNA
cacgctccctcaggggactg

SEQ ID NO: 10410 - DNA, 20 bp, synthetic construct
  misc_feature 1..20: note = Description of Artificial Sequence: Synthetic oligonucleotide
  source 1..20: mol_type = other DNA
acgctccctcaggggactgg

SEQ ID NO: 10411 - DNA, 20 bp, synthetic construct
  misc_feature 1..20: note = Description of Artificial Sequence: Synthetic oligonucleotide
  source 1..20: mol_type = other DNA
cgctccctcaggggactggt

SEQ ID NO: 10412 - DNA, 20 bp, synthetic construct
  misc_feature 1..20: note = Description of Artificial Sequence: Synthetic oligonucleotide
  source 1..20: mol_type = other DNA
gctccctcaggggactggtc

SEQ ID NO: 10413 - DNA, 20 bp, synthetic construct
  misc_feature 1..20: note = Description of Artificial Sequence: Synthetic oligonucleotide
  source 1..20: mol_type = other DNA
ctccctcaggggactggtct

SEQ ID NO: 10414 - DNA, 20 bp, synthetic construct
  misc_feature 1..20: note = Description of Artificial Sequence: Synthetic oligonucleotide
  source 1..20: mol_type = other DNA
tccctcaggggactggtctc

SEQ ID NO: 10415 - DNA, 20 bp, synthetic construct
  misc_feature 1..20: note = Description of Artificial Sequence: Synthetic oligonucleotide
  source 1..20: mol_type = other DNA
ccctcaggggactggtctcc

SEQ ID NO: 10416 - DNA, 20 bp, synthetic construct
  misc_feature 1..20: note = Description of Artificial Sequence: Synthetic oligonucleotide
  source 1..20: mol_type = other DNA
cctcaggggactggtctcct

SEQ ID NO: 10417 - DNA, 20 bp, synthetic construct
  misc_feature 1..20: note = Description of Artificial Sequence: Synthetic oligonucleotide
  source 1..20: mol_type = other DNA
ctcaggggactggtctcctt

SEQ ID NO: 10418 - DNA, 20 bp, synthetic construct
  misc_feature 1..20: note = Description of Artificial Sequence: Synthetic oligonucleotide
  source 1..20: mol_type = other DNA
tcaggggactggtctcctta

SEQ ID NO: 10419 - DNA, 20 bp, synthetic construct
  misc_feature 1..20: note = Description of Artificial Sequence: Synthetic oligonucleotide
  source 1..20: mol_type = other DNA
caggggactggtctccttac

SEQ ID NO: 10420 - DNA, 20 bp, synthetic construct
  misc_feature 1..20: note = Description of Artificial Sequence: Synthetic oligonucleotide
  source 1..20: mol_type = other DNA
aggggactggtctccttacc

SEQ ID NO: 10421 - DNA, 20 bp, synthetic construct
  misc_feature 1..20: note = Description of Artificial Sequence: Synthetic oligonucleotide
  source 1..20: mol_type = other DNA
ggggactggtctccttacct

SEQ ID NO: 10422 - DNA, 20 bp, synthetic construct
  misc_feature 1..20: note = Description of Artificial Sequence: Synthetic oligonucleotide
  source 1..20: mol_type = other DNA
gggactggtctccttacctg

SEQ ID NO: 10423 - DNA, 20 bp, synthetic construct
  misc_feature 1..20: note = Description of Artificial Sequence: Synthetic oligonucleotide
  source 1..20: mol_type = other DNA
ggactggtctccttacctgc

SEQ ID NO: 10424 - DNA, 20 bp, synthetic construct
  misc_feature 1..20: note = Description of Artificial Sequence: Synthetic oligonucleotide
  source 1..20: mol_type = other DNA
gactggtctccttacctgcg

SEQ ID NO: 10425 - DNA, 20 bp, synthetic construct
  misc_feature 1..20: note = Description of Artificial Sequence: Synthetic oligonucleotide
  source 1..20: mol_type = other DNA
actggtctccttacctgcgg

SEQ ID NO: 10426 - DNA, 20 bp, synthetic construct
  misc_feature 1..20: note = Description of Artificial Sequence: Synthetic oligonucleotide
  source 1..20: mol_type = other DNA
ctggtctccttacctgcgga

SEQ ID NO: 10427 - DNA, 20 bp, synthetic construct
  misc_feature 1..20: note = Description of Artificial Sequence: Synthetic oligonucleotide
  source 1..20: mol_type = other DNA
tggtctccttacctgcggag

SEQ ID NO: 10428 - DNA, 20 bp, synthetic construct
  misc_feature 1..20: note = Description of Artificial Sequence: Synthetic oligonucleotide
  source 1..20: mol_type = other DNA
ggtctccttacctgcggagg

SEQ ID NO: 10429 - DNA, 20 bp, synthetic construct
  misc_feature 1..20: note = Description of Artificial Sequence: Synthetic oligonucleotide
  source 1..20: mol_type = other DNA
gtctccttacctgcggaggt

SEQ ID NO: 10430 - DNA, 20 bp, synthetic construct
  misc_feature 1..20: note = Description of Artificial Sequence: Synthetic oligonucleotide
  source 1..20: mol_type = other DNA
tctccttacctgcggaggtc

SEQ ID NO: 10431 - DNA, 20 bp, synthetic construct
  misc_feature 1..20: note = Description of Artificial Sequence: Synthetic oligonucleotide
  source 1..20: mol_type = other DNA
ctccttacctgcggaggtct

SEQ ID NO: 10432 - DNA, 20 bp, synthetic construct
  misc_feature 1..20: note = Description of Artificial Sequence: Synthetic oligonucleotide
  source 1..20: mol_type = other DNA
tccttacctgcggaggtctg

SEQ ID NO: 10433 - DNA, 20 bp, synthetic construct
  misc_feature 1..20: note = Description of Artificial Sequence: Synthetic oligonucleotide
  source 1..20: mol_type = other DNA
ccttacctgcggaggtctga

SEQ ID NO: 10434 - DNA, 20 bp, synthetic construct
  misc_feature 1..20: note = Description of Artificial Sequence: Synthetic oligonucleotide
  source 1..20: mol_type = other DNA
cttacctgcggaggtctgag

SEQ ID NO: 10435 - DNA, 20 bp, synthetic construct
  misc_feature 1..20: note = Description of Artificial Sequence: Synthetic oligonucleotide
  source 1..20: mol_type = other DNA
ttacctgcggaggtctgagt

SEQ ID NO: 10436 - DNA, 20 bp, synthetic construct
  misc_feature 1..20: note = Description of Artificial Sequence: Synthetic oligonucleotide
  source 1..20: mol_type = other DNA
tacctgcggaggtctgagtg

SEQ ID NO: 10437 - DNA, 20 bp, synthetic construct
  misc_feature 1..20: note = Description of Artificial Sequence: Synthetic oligonucleotide
  source 1..20: mol_type = other DNA
acctgcggaggtctgagtga

SEQ ID NO: 10438 - DNA, 20 bp, synthetic construct
  misc_feature 1..20: note = Description of Artificial Sequence: Synthetic oligonucleotide
  source 1..20: mol_type = other DNA
cctgcggaggtctgagtgac

SEQ ID NO: 10439 - DNA, 20 bp, synthetic construct
  misc_feature 1..20: note = Description of Artificial Sequence: Synthetic oligonucleotide
  source 1..20: mol_type = other DNA
ctgcggaggtctgagtgacc

SEQ ID NO: 10440 - DNA, 20 bp, synthetic construct
  misc_feature 1..20: note = Description of Artificial Sequence: Synthetic oligonucleotide
  source 1..20: mol_type = other DNA
tgcggaggtctgagtgaccg

SEQ ID NO: 10441 - DNA, 20 bp, synthetic construct
  misc_feature 1..20: note = Description of Artificial Sequence: Synthetic oligonucleotide
  source 1..20: mol_type = other DNA
gcggaggtctgagtgaccgt

SEQ ID NO: 10442 - DNA, 20 bp, synthetic construct
  misc_feature 1..20: note = Description of Artificial Sequence: Synthetic oligonucleotide
  source 1..20: mol_type = other DNA
cggaggtctgagtgaccgtc

SEQ ID NO: 10443 - DNA, 20 bp, synthetic construct
  misc_feature 1..20: note = Description of Artificial Sequence: Synthetic oligonucleotide
  source 1..20: mol_type = other DNA
ggaggtctgagtgaccgtct

SEQ ID NO: 10444 - DNA, 20 bp, synthetic construct
  misc_feature 1..20: note = Description of Artificial Sequence: Synthetic oligonucleotide
  source 1..20: mol_type = other DNA
gaggtctgagtgaccgtctg

SEQ ID NO: 10445 - DNA, 20 bp, synthetic construct
  misc_feature 1..20: note = Description of Artificial Sequence: Synthetic oligonucleotide
  source 1..20: mol_type = other DNA
aggtctgagtgaccgtctgt

SEQ ID NO: 10446 - DNA, 20 bp, synthetic construct
  misc_feature 1..20: note = Description of Artificial Sequence: Synthetic oligonucleotide
  source 1..20: mol_type = other DNA
ggtctgagtgaccgtctgtg

SEQ ID NO: 10447 - DNA, 20 bp, synthetic construct
  misc_feature 1..20: note = Description of Artificial Sequence: Synthetic oligonucleotide
  source 1..20: mol_type = other DNA
gtctgagtgaccgtctgtgc

SEQ ID NO: 10448 - DNA, 20 bp, synthetic construct
  misc_feature 1..20: note = Description of Artificial Sequence: Synthetic oligonucleotide
  source 1..20: mol_type = other DNA
tctgagtgaccgtctgtgct

SEQ ID NO: 10449 - DNA, 20 bp, synthetic construct
  misc_feature 1..20: note = Description of Artificial Sequence: Synthetic oligonucleotide
  source 1..20: mol_type = other DNA
ctgagtgaccgtctgtgctg

SEQ ID NO: 10450 - DNA, 20 bp, synthetic construct
  misc_feature 1..20: note = Description of Artificial Sequence: Synthetic oligonucleotide
  source 1..20: mol_type = other DNA
tgagtgaccgtctgtgctgc

SEQ ID NO: 10451 - DNA, 20 bp, synthetic construct
  misc_feature 1..20: note = Description of Artificial Sequence: Synthetic oligonucleotide
  source 1..20: mol_type = other DNA
gagtgaccgtctgtgctgcc

SEQ ID NO: 10452 - DNA, 20 bp, synthetic construct
  misc_feature 1..20: note = Description of Artificial Sequence: Synthetic oligonucleotide
  source 1..20: mol_type = other DNA
agtgaccgtctgtgctgcct

SEQ ID NO: 10453 - DNA, 20 bp, synthetic construct
  misc_feature 1..20: note = Description of Artificial Sequence: Synthetic oligonucleotide
  source 1..20: mol_type = other DNA
gtgaccgtctgtgctgcctg

SEQ ID NO: 10454 - DNA, 20 bp, synthetic construct
  misc_feature 1..20: note = Description of Artificial Sequence: Synthetic oligonucleotide
  source 1..20: mol_type = other DNA
tgaccgtctgtgctgcctgc

SEQ ID NO: 10455 - DNA, 20 bp, synthetic construct
  misc_feature 1..20: note = Description of Artificial Sequence: Synthetic oligonucleotide
  source 1..20: mol_type = other DNA
gaccgtctgtgctgcctgca

SEQ ID NO: 10456 - DNA, 20 bp, synthetic construct
  misc_feature 1..20: note = Description of Artificial Sequence: Synthetic oligonucleotide
  source 1..20: mol_type = other DNA
accgtctgtgctgcctgcag

SEQ ID NO: 10457 - DNA, 20 bp, synthetic construct
  misc_feature 1..20: note = Description of Artificial Sequence: Synthetic oligonucleotide
  source 1..20: mol_type = other DNA
ccgtctgtgctgcctgcagc

SEQ ID NO: 10458 - DNA, 20 bp, synthetic construct
  misc_feature 1..20: note = Description of Artificial Sequence: Synthetic oligonucleotide
  source 1..20: mol_type = other DNA
cgtctgtgctgcctgcagct

SEQ ID NO: 10459 - DNA, 20 bp, synthetic construct
  misc_feature 1..20: note = Description of Artificial Sequence: Synthetic oligonucleotide
  source 1..20: mol_type = other DNA
gtctgtgctgcctgcagctg

SEQ ID NO: 10460 - DNA, 20 bp, synthetic construct
  misc_feature 1..20: note = Description of Artificial Sequence: Synthetic oligonucleotide
  source 1..20: mol_type = other DNA
tctgtgctgcctgcagctgc

SEQ ID NO: 10461 - DNA, 20 bp, synthetic construct
  misc_feature 1..20: note = Description of Artificial Sequence: Synthetic oligonucleotide
  source 1..20: mol_type = other DNA
ctgtgctgcctgcagctgca

SEQ ID NO: 10462 - DNA, 20 bp, synthetic construct
  misc_feature 1..20: note = Description of Artificial Sequence: Synthetic oligonucleotide
  source 1..20: mol_type = other DNA
tgtgctgcctgcagctgcat

SEQ ID NO: 10463 - DNA, 20 bp, synthetic construct
  misc_feature 1..20: note = Description of Artificial Sequence: Synthetic oligonucleotide
  source 1..20: mol_type = other DNA
gtgctgcctgcagctgcatg

SEQ ID NO: 10464 - DNA, 20 bp, synthetic construct
  misc_feature 1..20: note = Description of Artificial Sequence: Synthetic oligonucleotide
  source 1..20: mol_type = other DNA
tgctgcctgcagctgcatga

SEQ ID NO: 10465 - DNA, 20 bp, synthetic construct
  misc_feature 1..20: note = Description of Artificial Sequence: Synthetic oligonucleotide
  source 1..20: mol_type = other DNA
gctgcctgcagctgcatgat

SEQ ID NO: 10466 - DNA, 20 bp, synthetic construct
  misc_feature 1..20: note = Description of Artificial Sequence: Synthetic oligonucleotide
  source 1..20: mol_type = other DNA
ctgcctgcagctgcatgatg

SEQ ID NO: 10467 - DNA, 20 bp, synthetic construct
  misc_feature 1..20: note = Description of Artificial Sequence: Synthetic oligonucleotide
  source 1..20: mol_type = other DNA
tgcctgcagctgcatgatgt

SEQ ID NO: 10468 - DNA, 20 bp, synthetic construct
  misc_feature 1..20: note = Description of Artificial Sequence: Synthetic oligonucleotide
  source 1..20: mol_type = other DNA
gcctgcagctgcatgatgtc

SEQ ID NO: 10469 - DNA, 20 bp, synthetic construct
  misc_feature 1..20: note = Description of Artificial Sequence: Synthetic oligonucleotide
  source 1..20: mol_type = other DNA
cctgcagctgcatgatgtca

SEQ ID NO: 10470 - DNA, 20 bp, synthetic construct
  misc_feature 1..20: note = Description of Artificial Sequence: Synthetic oligonucleotide
  source 1..20: mol_type = other DNA
ctgcagctgcatgatgtcaa

SEQ ID NO: 10471 - DNA, 20 bp, synthetic construct
  misc_feature 1..20: note = Description of Artificial Sequence: Synthetic oligonucleotide
  source 1..20: mol_type = other DNA
tgcagctgcatgatgtcaat

SEQ ID NO: 10472 - DNA, 20 bp, synthetic construct
  misc_feature 1..20: note = Description of Artificial Sequence: Synthetic oligonucleotide
  source 1..20: mol_type = other DNA
gcagctgcatgatgtcaatt

SEQ ID NO: 10473 - DNA, 20 bp, synthetic construct
  misc_feature 1..20: note = Description of Artificial Sequence: Synthetic oligonucleotide
  source 1..20: mol_type = other DNA
cagctgcatgatgtcaattt

SEQ ID NO: 10474 - DNA, 20 bp, synthetic construct
  misc_feature 1..20: note = Description of Artificial Sequence: Synthetic oligonucleotide
  source 1..20: mol_type = other DNA
agctgcatgatgtcaatttg

SEQ ID NO: 10475 - DNA, 20 bp, synthetic construct
  misc_feature 1..20: note = Description of Artificial Sequence: Synthetic oligonucleotide
  source 1..20: mol_type = other DNA
gctgcatgatgtcaatttgg

SEQ ID NO: 10476 - DNA, 20 bp, synthetic construct
  misc_feature 1..20: note = Description of Artificial Sequence: Synthetic oligonucleotide
  source 1..20: mol_type = other DNA
ctgcatgatgtcaatttggt

SEQ ID NO: 10477 - DNA, 20 bp, synthetic construct
  misc_feature 1..20: note = Description of Artificial Sequence: Synthetic oligonucleotide
  source 1..20: mol_type = other DNA
tgcatgatgtcaatttggtt

SEQ ID NO: 10478 - DNA, 20 bp, synthetic construct
  misc_feature 1..20: note = Description of Artificial Sequence: Synthetic oligonucleotide
  source 1..20: mol_type = other DNA
gcatgatgtcaatttggttg

SEQ ID NO: 10479 - DNA, 20 bp, synthetic construct
  misc_feature 1..20: note = Description of Artificial Sequence: Synthetic oligonucleotide
  source 1..20: mol_type = other DNA
catgatgtcaatttggttgt

SEQ ID NO: 10480 - DNA, 20 bp, synthetic construct
  misc_feature 1..20: note = Description of Artificial Sequence: Synthetic oligonucleotide
  source 1..20: mol_type = other DNA
atgatgtcaatttggttgtt

SEQ ID NO: 10481 - DNA, 20 bp, synthetic construct
  misc_feature 1..20: note = Description of Artificial Sequence: Synthetic oligonucleotide
  source 1..20: mol_type = other DNA
tgatgtcaatttggttgttc

SEQ ID NO: 10482 - DNA, 20 bp, synthetic construct
  misc_feature 1..20: note = Description of Artificial Sequence: Synthetic oligonucleotide
  source 1..20: mol_type = other DNA
gatgtcaatttggttgttca

SEQ ID NO: 10483 - DNA, 20 bp, synthetic construct
  misc_feature 1..20: note = Description of Artificial Sequence: Synthetic oligonucleotide
  source 1..20: mol_type = other DNA
atgtcaatttggttgttcat

SEQ ID NO: 10484 - DNA, 20 bp, synthetic construct
  misc_feature 1..20: note = Description of Artificial Sequence: Synthetic oligonucleotide
  source 1..20: mol_type = other DNA
tgtcaatttggttgttcatc

SEQ ID NO: 10485 - DNA, 20 bp, synthetic construct
  misc_feature 1..20: note = Description of Artificial Sequence: Synthetic oligonucleotide
  source 1..20: mol_type = other DNA
gtcaatttggttgttcatct

SEQ ID NO: 10486 - DNA, 20 bp, synthetic construct
  misc_feature 1..20: note = Description of Artificial Sequence: Synthetic oligonucleotide
  source 1..20: mol_type = other DNA
tcaatttggttgttcatctc

SEQ ID NO: 10487 - DNA, 20 bp, synthetic construct
  misc_feature 1..20: note = Description of Artificial Sequence: Synthetic oligonucleotide
  source 1..20: mol_type = other DNA
caatttggttgttcatctcg

SEQ ID NO: 10488 - DNA, 20 bp, synthetic construct
  misc_feature 1..20: note = Description of Artificial Sequence: Synthetic oligonucleotide
  source 1..20: mol_type = other DNA
aatttggttgttcatctcgg

SEQ ID NO: 10489 - DNA, 20 bp, synthetic construct
  misc_feature 1..20: note = Description of Artificial Sequence: Synthetic oligonucleotide
  source 1..20: mol_type = other DNA
atttggttgttcatctcgga

SEQ ID NO: 10490 - DNA, 20 bp, synthetic construct
  misc_feature 1..20: note = Description of Artificial Sequence: Synthetic oligonucleotide
  source 1..20: mol_type = other DNA
tttggttgttcatctcggag

SEQ ID NO: 10491 - DNA, 20 bp, synthetic construct
  misc_feature 1..20: note = Description of Artificial Sequence: Synthetic oligonucleotide
  source 1..20: mol_type = other DNA
ttggttgttcatctcggagt

SEQ ID NO: 10492 - DNA, 20 bp, synthetic construct
  misc_feature 1..20: note = Description of Artificial Sequence: Synthetic oligonucleotide
  source 1..20: mol_type = other DNA
tggttgttcatctcggagta

SEQ ID NO: 10493 - DNA, 20 bp, synthetic construct
  misc_feature 1..20: note = Description of Artificial Sequence: Synthetic oligonucleotide
  source 1..20: mol_type = other DNA
ggttgttcatctcggagtac

SEQ ID NO: 10494 - DNA, 20 bp, synthetic construct
  misc_feature 1..20: note = Description of Artificial Sequence: Synthetic oligonucleotide
  source 1..20: mol_type = other DNA
gttgttcatctcggagtact

SEQ ID NO: 10495 - DNA, 20 bp, synthetic construct
  misc_feature 1..20: note = Description of Artificial Sequence: Synthetic oligonucleotide
  source 1..20: mol_type = other DNA
ttgttcatctcggagtactt

SEQ ID NO: 10496 - DNA, 20 bp, synthetic construct
  misc_feature 1..20: note = Description of Artificial Sequence: Synthetic oligonucleotide
  source 1..20: mol_type = other DNA
tgttcatctcggagtacttg

SEQ ID NO: 10497 - DNA, 20 bp, synthetic construct
  misc_feature 1..20: note = Description of Artificial Sequence: Synthetic oligonucleotide
  source 1..20: mol_type = other DNA
gttcatctcggagtacttgc

SEQ ID NO: 10498 - DNA, 20 bp, synthetic construct
  misc_feature 1..20: note = Description of Artificial Sequence: Synthetic oligonucleotide
  source 1..20: mol_type = other DNA
ttcatctcggagtacttgct

SEQ ID NO: 10499 - DNA, 20 bp, synthetic construct
  misc_feature 1..20: note = Description of Artificial Sequence: Synthetic oligonucleotide
  source 1..20: mol_type = other DNA
tcatctcggagtacttgctc

SEQ ID NO: 10500 - DNA, 20 bp, synthetic construct
  misc_feature 1..20: note = Description of Artificial Sequence: Synthetic oligonucleotide
  source 1..20: mol_type = other DNA
catctcggagtacttgctct

SEQ ID NO: 10501 - DNA, 20 bp, synthetic construct
  misc_feature 1..20: note = Description of Artificial Sequence: Synthetic oligonucleotide
  source 1..20: mol_type = other DNA
atctcggagtacttgctctc

SEQ ID NO: 10502 - DNA, 20 bp, synthetic construct
  misc_feature 1..20: note = Description of Artificial Sequence: Synthetic oligonucleotide
  source 1..20: mol_type = other DNA
tctcggagtacttgctctca

SEQ ID NO: 10503 - DNA, 20 bp, synthetic construct
  misc_feature 1..20: note = Description of Artificial Sequence: Synthetic oligonucleotide
  source 1..20: mol_type = other DNA
ctcggagtacttgctctcag

SEQ ID NO: 10504 - DNA, 20 bp, synthetic construct
  misc_feature 1..20: note = Description of Artificial Sequence: Synthetic oligonucleotide
  source 1..20: mol_type = other DNA
tcggagtacttgctctcagc

SEQ ID NO: 10505 - DNA, 20 bp, synthetic construct
  misc_feature 1..20: note = Description of Artificial Sequence: Synthetic oligonucleotide
  source 1..20: mol_type = other DNA
cggagtacttgctctcagca

SEQ ID NO: 10506 - DNA, 20 bp, synthetic construct
  misc_feature 1..20: note = Description of Artificial Sequence: Synthetic oligonucleotide
  source 1..20: mol_type = other DNA
ggagtacttgctctcagcat

SEQ ID NO: 10507 - DNA, 20 bp, synthetic construct
  misc_feature 1..20: note = Description of Artificial Sequence: Synthetic oligonucleotide
  source 1..20: mol_type = other DNA
gagtacttgctctcagcatc

SEQ ID NO: 10508 - DNA, 20 bp, synthetic construct
  misc_feature 1..20: note = Description of Artificial Sequence: Synthetic oligonucleotide
  source 1..20: mol_type = other DNA
agtacttgctctcagcatct

SEQ ID NO: 10509 - DNA, 20 bp, synthetic construct
  misc_feature 1..20: note = Description of Artificial Sequence: Synthetic oligonucleotide
  source 1..20: mol_type = other DNA
gtacttgctctcagcatctg

SEQ ID NO: 10510 - DNA, 20 bp, synthetic construct
  misc_feature 1..20: note = Description of Artificial Sequence: Synthetic oligonucleotide
  source 1..20: mol_type = other DNA
tacttgctctcagcatctgt

SEQ ID NO: 10511 - DNA, 20 bp, synthetic construct
  misc_feature 1..20: note = Description of Artificial Sequence: Synthetic oligonucleotide
  source 1..20: mol_type = other DNA
acttgctctcagcatctgtg

SEQ ID NO: 10512 - DNA, 20 bp, synthetic construct
  misc_feature 1..20: note = Description of Artificial Sequence: Synthetic oligonucleotide
  source 1..20: mol_type = other DNA
cttgctctcagcatctgtga

SEQ ID NO: 10513 - DNA, 20 bp, synthetic construct
  misc_feature 1..20: note = Description of Artificial Sequence: Synthetic oligonucleotide
  source 1..20: mol_type = other DNA
ttgctctcagcatctgtgag

SEQ ID NO: 10514 - DNA, 20 bp, synthetic construct
  misc_feature 1..20: note = Description of Artificial Sequence: Synthetic oligonucleotide
  source 1..20: mol_type = other DNA
tgctctcagcatctgtgagc

SEQ ID NO: 10515 - DNA, 20 bp, synthetic construct
  misc_feature 1..20: note = Description of Artificial Sequence: Synthetic oligonucleotide
  source 1..20: mol_type = other DNA
gctctcagcatctgtgagcc

SEQ ID NO: 10516 - DNA, 20 bp, synthetic construct
  misc_feature 1..20: note = Description of Artificial Sequence: Synthetic oligonucleotide
  source 1..20: mol_type = other DNA
ctctcagcatctgtgagccg

SEQ ID NO: 10517 - DNA, 20 bp, synthetic construct
  misc_feature 1..20: note = Description of Artificial Sequence: Synthetic oligonucleotide
  source 1..20: mol_type = other DNA
tctcagcatctgtgagccgc

SEQ ID NO: 10518 - DNA, 20 bp, synthetic construct
  misc_feature 1..20: note = Description of Artificial Sequence: Synthetic oligonucleotide
  source 1..20: mol_type = other DNA
ctcagcatctgtgagccgcg

SEQ ID NO: 10519 - DNA, 20 bp, synthetic construct
  misc_feature 1..20: note = Description of Artificial Sequence: Synthetic oligonucleotide
  source 1..20: mol_type = other DNA
tcagcatctgtgagccgcga

SEQ ID NO: 10520 - DNA, 20 bp, synthetic construct
  misc_feature 1..20: note = Description of Artificial Sequence: Synthetic oligonucleotide
  source 1..20: mol_type = other DNA
cagcatctgtgagccgcgac

SEQ ID NO: 10521 - DNA, 20 bp, synthetic construct
  misc_feature 1..20: note = Description of Artificial Sequence: Synthetic oligonucleotide
  source 1..20: mol_type = other DNA
agcatctgtgagccgcgact

SEQ ID NO: 10522 - DNA, 20 bp, synthetic construct
  misc_feature 1..20: note = Description of Artificial Sequence: Synthetic oligonucleotide
  source 1..20: mol_type = other DNA
gcatctgtgagccgcgactc

SEQ ID NO: 10523 - DNA, 20 bp, synthetic construct
  misc_feature 1..20: note = Description of Artificial Sequence: Synthetic oligonucleotide
  source 1..20: mol_type = other DNA
catctgtgagccgcgactcc

SEQ ID NO: 10524 - DNA, 20 bp, synthetic construct
  misc_feature 1..20: note = Description of Artificial Sequence: Synthetic oligonucleotide
  source 1..20: mol_type = other DNA
atctgtgagccgcgactcca

SEQ ID NO: 10525 - DNA, 20 bp, synthetic construct
  misc_feature 1..20: note = Description of Artificial Sequence: Synthetic oligonucleotide
  source 1..20: mol_type = other DNA
tctgtgagccgcgactccat

SEQ ID NO: 10526 - DNA, 20 bp, synthetic construct
  misc_feature 1..20: note = Description of Artificial Sequence: Synthetic oligonucleotide
  source 1..20: mol_type = other DNA
ctgtgagccgcgactccatg

SEQ ID NO: 10527 - DNA, 20 bp, synthetic construct
  misc_feature 1..20: note = Description of Artificial Sequence: Synthetic oligonucleotide
  source 1..20: mol_type = other DNA
tgtgagccgcgactccatgc

SEQ ID NO: 10528 - DNA, 20 bp, synthetic construct
  misc_feature 1..20: note = Description of Artificial Sequence: Synthetic oligonucleotide
  source 1..20: mol_type = other DNA
gtgagccgcgactccatgcg

SEQ ID NO: 10529 - DNA, 20 bp, synthetic construct
  misc_feature 1..20: note = Description of Artificial Sequence: Synthetic oligonucleotide
  source 1..20: mol_type = other DNA
tgagccgcgactccatgcgc

SEQ ID NO: 10530 - DNA, 20 bp, synthetic construct
  misc_feature 1..20: note = Description of Artificial Sequence: Synthetic oligonucleotide
  source 1..20: mol_type = other DNA
gagccgcgactccatgcgct

SEQ ID NO: 10531 - DNA, 20 bp, synthetic construct
  misc_feature 1..20: note = Description of Artificial Sequence: Synthetic oligonucleotide
  source 1..20: mol_type = other DNA
agccgcgactccatgcgctt

SEQ ID NO: 10532 - DNA, 20 bp, synthetic construct
  misc_feature 1..20: note = Description of Artificial Sequence: Synthetic oligonucleotide
  source 1..20: mol_type = other DNA
gccgcgactccatgcgcttg

SEQ ID NO: 10533 - DNA, 20 bp, synthetic construct
  misc_feature 1..20: note = Description of Artificial Sequence: Synthetic oligonucleotide
  source 1..20: mol_type = other DNA
ccgcgactccatgcgcttgc

SEQ ID NO: 10534 - DNA, 20 bp, synthetic construct
  misc_feature 1..20: note = Description of Artificial Sequence: Synthetic oligonucleotide
  source 1..20: mol_type = other DNA
cgcgactccatgcgcttgct

SEQ ID NO: 10535 - DNA, 20 bp, synthetic construct
  misc_feature 1..20: note = Description of Artificial Sequence: Synthetic oligonucleotide
  source 1..20: mol_type = other DNA
gcgactccatgcgcttgctg

SEQ ID NO: 10536 - DNA, 20 bp, synthetic construct
  misc_feature 1..20: note = Description of Artificial Sequence: Synthetic oligonucleotide
  source 1..20: mol_type = other DNA
cgactccatgcgcttgctgt

SEQ ID NO: 10537 - DNA, 20 bp, synthetic construct
  misc_feature 1..20: note = Description of Artificial Sequence: Synthetic oligonucleotide
  source 1..20: mol_type = other DNA
gactccatgcgcttgctgtt

SEQ ID NO: 10538 - DNA, 20 bp, synthetic construct
  misc_feature 1..20: note = Description of Artificial Sequence: Synthetic oligonucleotide
  source 1..20: mol_type = other DNA
actccatgcgcttgctgttg

SEQ ID NO: 10539 - DNA, 20 bp, synthetic construct
  misc_feature 1..20: note = Description of Artificial Sequence: Synthetic oligonucleotide
  source 1..20: mol_type = other DNA
ctccatgcgcttgctgttgc

SEQ ID NO: 10540 - DNA, 20 bp, synthetic construct
  misc_feature 1..20: note = Description of Artificial Sequence: Synthetic oligonucleotide
  source 1..20: mol_type = other DNA
tccatgcgcttgctgttgct

SEQ ID NO: 10541 - DNA, 20 bp, synthetic construct
  misc_feature 1..20: note = Description of Artificial Sequence: Synthetic oligonucleotide
  source 1..20: mol_type = other DNA
ccatgcgcttgctgttgctc

SEQ ID NO: 10542 - DNA, 20 bp, synthetic construct
  misc_feature 1..20: note = Description of Artificial Sequence: Synthetic oligonucleotide
  source 1..20: mol_type = other DNA
catgcgcttgctgttgctct

SEQ ID NO: 10543 - DNA, 20 bp, synthetic construct
  misc_feature 1..20: note = Description of Artificial Sequence: Synthetic oligonucleotide
  source 1..20: mol_type = other DNA
atgcgcttgctgttgctctc

SEQ ID NO: 10544 - DNA, 20 bp, synthetic construct
  misc_feature 1..20: note = Description of Artificial Sequence: Synthetic oligonucleotide
  source 1..20: mol_type = other DNA
tgcgcttgctgttgctctcc

SEQ ID NO: 10545 - DNA, 20 bp, synthetic construct
  misc_feature 1..20: note = Description of Artificial Sequence: Synthetic oligonucleotide
  source 1..20: mol_type = other DNA
gcgcttgctgttgctctcca

SEQ ID NO: 10546 - DNA, 20 bp, synthetic construct
  misc_feature 1..20: note = Description of Artificial Sequence: Synthetic oligonucleotide
  source 1..20: mol_type = other DNA
cgcttgctgttgctctccag

SEQ ID NO: 10547 - DNA, 20 bp, synthetic construct
  misc_feature 1..20: note = Description of Artificial Sequence: Synthetic oligonucleotide
  source 1..20: mol_type = other DNA
gcttgctgttgctctccagc

SEQ ID NO: 10548 - DNA, 20 bp, synthetic construct
  misc_feature 1..20: note = Description of Artificial Sequence: Synthetic oligonucleotide
  source 1..20: mol_type = other DNA
cttgctgttgctctccagct

SEQ ID NO: 10549 - DNA, 20 bp, synthetic construct
  misc_feature 1..20: note = Description of Artificial Sequence: Synthetic oligonucleotide
  source 1..20: mol_type = other DNA
ttgctgttgctctccagctc

SEQ ID NO: 10550 - DNA, 20 bp, synthetic construct
  misc_feature 1..20: note = Description of Artificial Sequence: Synthetic oligonucleotide
  source 1..20: mol_type = other DNA
tgctgttgctctccagctcc

SEQ ID NO: 10551 - DNA, 20 bp, synthetic construct
  misc_feature 1..20: note = Description of Artificial Sequence: Synthetic oligonucleotide
  source 1..20: mol_type = other DNA
gctgttgctctccagctcca

SEQ ID NO: 10552 - DNA, 20 bp, synthetic construct
  misc_feature 1..20: note = Description of Artificial Sequence: Synthetic oligonucleotide
  source 1..20: mol_type = other DNA
ctgttgctctccagctccat

SEQ ID NO: 10553 - DNA, 20 bp, synthetic construct
  misc_feature 1..20: note = Description of Artificial Sequence: Synthetic oligonucleotide
  source 1..20: mol_type = other DNA
tgttgctctccagctccatc

SEQ ID NO: 10554 - DNA, 20 bp, synthetic construct
  misc_feature 1..20: note = Description of Artificial Sequence: Synthetic oligonucleotide
  source 1..20: mol_type = other DNA
gttgctctccagctccatca

SEQ ID NO: 10555 - DNA, 20 bp, synthetic construct
  misc_feature 1..20: note = Description of Artificial Sequence: Synthetic oligonucleotide
  source 1..20: mol_type = other DNA
ttgctctccagctccatcac

SEQ ID NO: 10556 - DNA, 20 bp, synthetic construct
  misc_feature 1..20: note = Description of Artificial Sequence: Synthetic oligonucleotide
  source 1..20: mol_type = other DNA
tgctctccagctccatcacc

SEQ ID NO: 10557 - DNA, 20 bp, synthetic construct
  misc_feature 1..20: note = Description of Artificial Sequence: Synthetic oligonucleotide
  source 1..20: mol_type = other DNA
gctctccagctccatcacct

SEQ ID NO: 10558 - DNA, 20 bp, synthetic construct
  misc_feature 1..20: note = Description of Artificial Sequence: Synthetic oligonucleotide
  source 1..20: mol_type = other DNA
ctctccagctccatcacctg

SEQ ID NO: 10559 - DNA, 20 bp, synthetic construct
  misc_feature 1..20: note = Description of Artificial Sequence: Synthetic oligonucleotide
  source 1..20: mol_type = other DNA
tctccagctccatcacctgc

SEQ ID NO: 10560 - DNA, 20 bp, synthetic construct
  misc_feature 1..20: note = Description of Artificial Sequence: Synthetic oligonucleotide
  source 1..20: mol_type = other DNA
ctccagctccatcacctgca

SEQ ID NO: 10561 - DNA, 20 bp, synthetic construct
  misc_feature 1..20: note = Description of Artificial Sequence: Synthetic oligonucleotide
  source 1..20: mol_type = other DNA
tccagctccatcacctgcat

SEQ ID NO: 10562 - DNA, 20 bp, synthetic construct
  misc_feature 1..20: note = Description of Artificial Sequence: Synthetic oligonucleotide
  source 1..20: mol_type = other DNA
ccagctccatcacctgcatg

SEQ ID NO: 10563 - DNA, 20 bp, synthetic construct
  misc_feature 1..20: note = Description of Artificial Sequence: Synthetic oligonucleotide
  source 1..20: mol_type = other DNA
cagctccatcacctgcatga

SEQ ID NO: 10564 - DNA, 20 bp, synthetic construct
  misc_feature 1..20: note = Description of Artificial Sequence: Synthetic oligonucleotide
  source 1..20: mol_type = other DNA
agctccatcacctgcatgac

SEQ ID NO: 10565 - DNA, 20 bp, synthetic construct
  misc_feature 1..20: note = Description of Artificial Sequence: Synthetic oligonucleotide
  source 1..20: mol_type = other DNA
gctccatcacctgcatgacc

SEQ ID NO: 10566 - DNA, 20 bp, synthetic construct
  misc_feature 1..20: note = Description of Artificial Sequence: Synthetic oligonucleotide
  source 1..20: mol_type = other DNA
ctccatcacctgcatgacca

SEQ ID NO: 10567 - DNA, 20 bp, synthetic construct
  misc_feature 1..20: note = Description of Artificial Sequence: Synthetic oligonucleotide
  source 1..20: mol_type = other DNA
tccatcacctgcatgaccac

SEQ ID NO: 10568 - DNA, 20 bp, synthetic construct
  misc_feature 1..20: note = Description of Artificial Sequence: Synthetic oligonucleotide
  source 1..20: mol_type = other DNA
ccatcacctgcatgaccacg

SEQ ID NO: 10569 - DNA, 20 bp, synthetic construct
  misc_feature 1..20: note = Description of Artificial Sequence: Synthetic oligonucleotide
  source 1..20: mol_type = other DNA
catcacctgcatgaccacgc

SEQ ID NO: 10570 - DNA, 20 bp, synthetic construct
  misc_feature 1..20: note = Description of Artificial Sequence: Synthetic oligonucleotide
  source 1..20: mol_type = other DNA
atcacctgcatgaccacgct

SEQ ID NO: 10571 - DNA, 20 bp, synthetic construct
  misc_feature 1..20: note = Description of Artificial Sequence: Synthetic oligonucleotide
  source 1..20: mol_type = other DNA
tcacctgcatgaccacgctg

SEQ ID NO: 10572 - DNA, 20 bp, synthetic construct
  misc_feature 1..20: note = Description of Artificial Sequence: Synthetic oligonucleotide
  source 1..20: mol_type = other DNA
cacctgcatgaccacgctga

SEQ ID NO: 10573 - DNA, 20 bp, synthetic construct
  misc_feature 1..20: note = Description of Artificial Sequence: Synthetic oligonucleotide
  source 1..20: mol_type = other DNA
acctgcatgaccacgctgac

SEQ ID NO: 10574 - DNA, 20 bp, synthetic construct
  misc_feature 1..20: note = Description of Artificial Sequence: Synthetic oligonucleotide
  source 1..20: mol_type = other DNA
cctgcatgaccacgctgacc

SEQ ID NO: 10575 - DNA, 20 bp, synthetic construct
  misc_feature 1..20: note = Description of Artificial Sequence: Synthetic oligonucleotide
  source 1..20: mol_type = other DNA
ctgcatgaccacgctgaccc

SEQ ID NO: 10576 - DNA, 20 bp, synthetic construct
  misc_feature 1..20: note = Description of Artificial Sequence: Synthetic oligonucleotide
  source 1..20: mol_type = other DNA
tgcatgaccacgctgaccca

SEQ ID NO: 10577 - DNA, 20 bp, synthetic construct
  misc_feature 1..20: note = Description of Artificial Sequence: Synthetic oligonucleotide
  source 1..20: mol_type = other DNA
gcatgaccacgctgacccag

SEQ ID NO: 10578 - DNA, 20 bp, synthetic construct
  misc_feature 1..20: note = Description of Artificial Sequence: Synthetic oligonucleotide
  source 1..20: mol_type = other DNA
catgaccacgctgacccagt

SEQ ID NO: 10579 - DNA, 20 bp, synthetic construct
  misc_feature 1..20: note = Description of Artificial Sequence: Synthetic oligonucleotide
  source 1..20: mol_type = other DNA
atgaccacgctgacccagtc

SEQ ID NO: 10580 - DNA, 20 bp, synthetic construct
  misc_feature 1..20: note = Description of Artificial Sequence: Synthetic oligonucleotide
  source 1..20: mol_type = other DNA
tgaccacgctgacccagtcc

SEQ ID NO: 10581 - DNA, 20 bp, synthetic construct
  misc_feature 1..20: note = Description of Artificial Sequence: Synthetic oligonucleotide
  source 1..20: mol_type = other DNA
gaccacgctgacccagtccc

SEQ ID NO: 10582 - DNA, 20 bp, synthetic construct
  misc_feature 1..20: note = Description of Artificial Sequence: Synthetic oligonucleotide
  source 1..20: mol_type = other DNA
accacgctgacccagtccct

SEQ ID NO: 10583 - DNA, 20 bp, synthetic construct
  misc_feature 1..20: note = Description of Artificial Sequence: Synthetic oligonucleotide
  source 1..20: mol_type = other DNA
ccacgctgacccagtccctc

SEQ ID NO: 10584 - DNA, 20 bp, synthetic construct
  misc_feature 1..20: note = Description of Artificial Sequence: Synthetic oligonucleotide
  source 1..20: mol_type = other DNA
cacgctgacccagtccctct

SEQ ID NO: 10585 - DNA, 20 bp, synthetic construct
  misc_feature 1..20: note = Description of Artificial Sequence: Synthetic oligonucleotide
  source 1..20: mol_type = other DNA
acgctgacccagtccctctc

SEQ ID NO: 10586 - DNA, 20 bp, synthetic construct
  misc_feature 1..20: note = Description of Artificial Sequence: Synthetic oligonucleotide
  source 1..20: mol_type = other DNA
cgctgacccagtccctctcc

SEQ ID NO: 10587 - DNA, 20 bp, synthetic construct
  misc_feature 1..20: note = Description of Artificial Sequence: Synthetic oligonucleotide
  source 1..20: mol_type = other DNA
gctgacccagtccctctcct

SEQ ID NO: 10588 - DNA, 20 bp, synthetic construct
  misc_feature 1..20: note = Description of Artificial Sequence: Synthetic oligonucleotide
  source 1..20: mol_type = other DNA
ctgacccagtccctctcctg

SEQ ID NO: 10589 - DNA, 20 bp, synthetic construct
  misc_feature 1..20: note = Description of Artificial Sequence: Synthetic oligonucleotide
  source 1..20: mol_type = other DNA
tgacccagtccctctcctgc

SEQ ID NO: 10590 - DNA, 20 bp, synthetic construct
  misc_feature 1..20: note = Description of Artificial Sequence: Synthetic oligonucleotide
  source 1..20: mol_type = other DNA
gacccagtccctctcctgct

SEQ ID NO: 10591 - DNA, 20 bp, synthetic construct
  misc_feature 1..20: note = Description of Artificial Sequence: Synthetic oligonucleotide
  source 1..20: mol_type = other DNA
acccagtccctctcctgctt

SEQ ID NO: 10592 - DNA, 20 bp, synthetic construct
  misc_feature 1..20: note = Description of Artificial Sequence: Synthetic oligonucleotide
  source 1..20: mol_type = other DNA
cccagtccctctcctgcttc

SEQ ID NO: 10593 - DNA, 20 bp, synthetic construct
  misc_feature 1..20: note = Description of Artificial Sequence: Synthetic oligonucleotide
  source 1..20: mol_type = other DNA
ccagtccctctcctgcttct

SEQ ID NO: 10594 - DNA, 20 bp, synthetic construct
  misc_feature 1..20: note = Description of Artificial Sequence: Synthetic oligonucleotide
  source 1..20: mol_type = other DNA
cagtccctctcctgcttctt

SEQ ID NO: 10595 - DNA, 20 bp, synthetic construct
  misc_feature 1..20: note = Description of Artificial Sequence: Synthetic oligonucleotide
  source 1..20: mol_type = other DNA
agtccctctcctgcttcttg

SEQ ID NO: 10596 - DNA, 20 bp, synthetic construct
  misc_feature 1..20: note = Description of Artificial Sequence: Synthetic oligonucleotide
  source 1..20: mol_type = other DNA
gtccctctcctgcttcttgt

SEQ ID NO: 10597 - DNA, 20 bp, synthetic construct
  misc_feature 1..20: note = Description of Artificial Sequence: Synthetic oligonucleotide
  source 1..20: mol_type = other DNA
tccctctcctgcttcttgtt

SEQ ID NO: 10598 - DNA, 20 bp, synthetic construct
  misc_feature 1..20: note = Description of Artificial Sequence: Synthetic oligonucleotide
  source 1..20: mol_type = other DNA
ccctctcctgcttcttgttc

SEQ ID NO: 10599 - DNA, 20 bp, synthetic construct
  misc_feature 1..20: note = Description of Artificial Sequence: Synthetic oligonucleotide
  source 1..20: mol_type = other DNA
cctctcctgcttcttgttca

SEQ ID NO: 10600 - DNA, 20 bp, synthetic construct
  misc_feature 1..20: note = Description of Artificial Sequence: Synthetic oligonucleotide
  source 1..20: mol_type = other DNA
ctctcctgcttcttgttcag

SEQ ID NO: 10601 - DNA, 20 bp, synthetic construct
  misc_feature 1..20: note = Description of Artificial Sequence: Synthetic oligonucleotide
  source 1..20: mol_type = other DNA
tctcctgcttcttgttcagt

SEQ ID NO: 10602 - DNA, 20 bp, synthetic construct
  misc_feature 1..20: note = Description of Artificial Sequence: Synthetic oligonucleotide
  source 1..20: mol_type = other DNA
ctcctgcttcttgttcagtt

SEQ ID NO: 10603 - DNA, 20 bp, synthetic construct
  misc_feature 1..20: note = Description of Artificial Sequence: Synthetic oligonucleotide
  source 1..20: mol_type = other DNA
tcctgcttcttgttcagttc

SEQ ID NO: 10604 - DNA, 20 bp, synthetic construct
  misc_feature 1..20: note = Description of Artificial Sequence: Synthetic oligonucleotide
  source 1..20: mol_type = other DNA
cctgcttcttgttcagttca

SEQ ID NO: 10605 - DNA, 20 bp, synthetic construct
  misc_feature 1..20: note = Description of Artificial Sequence: Synthetic oligonucleotide
  source 1..20: mol_type = other DNA
ctgcttcttgttcagttcac

SEQ ID NO: 10606 - DNA, 20 bp, synthetic construct
  misc_feature 1..20: note = Description of Artificial Sequence: Synthetic oligonucleotide
  source 1..20: mol_type = other DNA
tgcttcttgttcagttcact

SEQ ID NO: 10607 - DNA, 20 bp, synthetic construct
  misc_feature 1..20: note = Description of Artificial Sequence: Synthetic oligonucleotide
  source 1..20: mol_type = other DNA
gcttcttgttcagttcactc

SEQ ID NO: 10608 - DNA, 20 bp, synthetic construct
  misc_feature 1..20: note = Description of Artificial Sequence: Synthetic oligonucleotide
  source 1..20: mol_type = other DNA
cttcttgttcagttcactca

SEQ ID NO: 10609 - DNA, 20 bp, synthetic construct
  misc_feature 1..20: note = Description of Artificial Sequence: Synthetic oligonucleotide
  source 1..20: mol_type = other DNA
ttcttgttcagttcactcag

SEQ ID NO: 10610 - DNA, 20 bp, synthetic construct
  misc_feature 1..20: note = Description of Artificial Sequence: Synthetic oligonucleotide
  source 1..20: mol_type = other DNA
tcttgttcagttcactcagc

SEQ ID NO: 10611 - DNA, 20 bp, synthetic construct
  misc_feature 1..20: note = Description of Artificial Sequence: Synthetic oligonucleotide
  source 1..20: mol_type = other DNA
cttgttcagttcactcagca

SEQ ID NO: 10612 - DNA, 20 bp, synthetic construct
  misc_feature 1..20: note = Description of Artificial Sequence: Synthetic oligonucleotide
  source 1..20: mol_type = other DNA
ttgttcagttcactcagcag

SEQ ID NO: 10613 - DNA, 20 bp, synthetic construct
  misc_feature 1..20: note = Description of Artificial Sequence: Synthetic oligonucleotide
  source 1..20: mol_type = other DNA
tgttcagttcactcagcagg

SEQ ID NO: 10614 - DNA, 20 bp, synthetic construct
  misc_feature 1..20: note = Description of Artificial Sequence: Synthetic oligonucleotide
  source 1..20: mol_type = other DNA
gttcagttcactcagcaggc

SEQ ID NO: 10615 - DNA, 20 bp, synthetic construct
  misc_feature 1..20: note = Description of Artificial Sequence: Synthetic oligonucleotide
  source 1..20: mol_type = other DNA
ttcagttcactcagcaggct

SEQ ID NO: 10616 - DNA, 20 bp, synthetic construct
  misc_feature 1..20: note = Description of Artificial Sequence: Synthetic oligonucleotide
  source 1..20: mol_type = other DNA
tcagttcactcagcaggctg

SEQ ID NO: 10617 - DNA, 20 bp, synthetic construct
  misc_feature 1..20: note = Description of Artificial Sequence: Synthetic oligonucleotide
  source 1..20: mol_type = other DNA
cagttcactcagcaggctgc

SEQ ID NO: 10618 - DNA, 20 bp, synthetic construct
  misc_feature 1..20: note = Description of Artificial Sequence: Synthetic oligonucleotide
  source 1..20: mol_type = other DNA
agttcactcagcaggctgct

SEQ ID NO: 10619 - DNA, 20 bp, synthetic construct
  misc_feature 1..20: note = Description of Artificial Sequence: Synthetic oligonucleotide
  source 1..20: mol_type = other DNA
gttcactcagcaggctgcta

SEQ ID NO: 10620 - DNA, 20 bp, synthetic construct
  misc_feature 1..20: note = Description of Artificial Sequence: Synthetic oligonucleotide
  source 1..20: mol_type = other DNA
ttcactcagcaggctgctaa

SEQ ID NO: 10621 - DNA, 20 bp, synthetic construct
  misc_feature 1..20: note = Description of Artificial Sequence: Synthetic oligonucleotide
  source 1..20: mol_type = other DNA
tcactcagcaggctgctaag

SEQ ID NO: 10622 - DNA, 20 bp, synthetic construct
  misc_feature 1..20: note = Description of Artificial Sequence: Synthetic oligonucleotide
  source 1..20: mol_type = other DNA
cactcagcaggctgctaagg

SEQ ID NO: 10623 - DNA, 20 bp, synthetic construct
  misc_feature 1..20: note = Description of Artificial Sequence: Synthetic oligonucleotide
  source 1..20: mol_type = other DNA
actcagcaggctgctaaggt

SEQ ID NO: 10624 - DNA, 20 bp, synthetic construct
  misc_feature 1..20: note = Description of Artificial Sequence: Synthetic oligonucleotide
  source 1..20: mol_type = other DNA
ctcagcaggctgctaaggtt

SEQ ID NO: 10625 - DNA, 20 bp, synthetic construct
  misc_feature 1..20: note = Description of Artificial Sequence: Synthetic oligonucleotide
  source 1..20: mol_type = other DNA
tcagcaggctgctaaggttg

SEQ ID NO: 10626 - DNA, 20 bp, synthetic construct
  misc_feature 1..20: note = Description of Artificial Sequence: Synthetic oligonucleotide
  source 1..20: mol_type = other DNA
cagcaggctgctaaggttgg

SEQ ID NO: 10627 - DNA, 20 bp, synthetic construct
  misc_feature 1..20: note = Description of Artificial Sequence: Synthetic oligonucleotide
  source 1..20: mol_type = other DNA
agcaggctgctaaggttggc

SEQ ID NO: 10628 - DNA, 20 bp, synthetic construct
  misc_feature 1..20: note = Description of Artificial Sequence: Synthetic oligonucleotide
  source 1..20: mol_type = other DNA
gcaggctgctaaggttggca

SEQ ID NO: 10629 - DNA, 20 bp, synthetic construct
  misc_feature 1..20: note = Description of Artificial Sequence: Synthetic oligonucleotide
  source 1..20: mol_type = other DNA
caggctgctaaggttggcaa

SEQ ID NO: 10630 - DNA, 20 bp, synthetic construct
  misc_feature 1..20: note = Description of Artificial Sequence: Synthetic oligonucleotide
  source 1..20: mol_type = other DNA
aggctgctaaggttggcaac

SEQ ID NO: 10631 - DNA, 20 bp, synthetic construct
  misc_feature 1..20: note = Description of Artificial Sequence: Synthetic oligonucleotide
  source 1..20: mol_type = other DNA
ggctgctaaggttggcaact

SEQ ID NO: 10632 - DNA, 20 bp, synthetic construct
  misc_feature 1..20: note = Description of Artificial Sequence: Synthetic oligonucleotide
  source 1..20: mol_type = other DNA
gctgctaaggttggcaactt

SEQ ID NO: 10633 - DNA, 20 bp, synthetic construct
  misc_feature 1..20: note = Description of Artificial Sequence: Synthetic oligonucleotide
  source 1..20: mol_type = other DNA
ctgctaaggttggcaacttg

SEQ ID NO: 10634 - DNA, 20 bp, synthetic construct
  misc_feature 1..20: note = Description of Artificial Sequence: Synthetic oligonucleotide
  source 1..20: mol_type = other DNA
tgctaaggttggcaacttgg

SEQ ID NO: 10635 - DNA, 20 bp, synthetic construct
  misc_feature 1..20: note = Description of Artificial Sequence: Synthetic oligonucleotide
  source 1..20: mol_type = other DNA
gctaaggttggcaacttggg

SEQ ID NO: 10636 - DNA, 20 bp, synthetic construct
  misc_feature 1..20: note = Description of Artificial Sequence: Synthetic oligonucleotide
  source 1..20: mol_type = other DNA
ctaaggttggcaacttgggc

SEQ ID NO: 10637 - DNA, 20 bp, synthetic construct
  misc_feature 1..20: note = Description of Artificial Sequence: Synthetic oligonucleotide
  source 1..20: mol_type = other DNA
taaggttggcaacttgggcc

SEQ ID NO: 10638 - DNA, 20 bp, synthetic construct
  misc_feature 1..20: note = Description of Artificial Sequence: Synthetic oligonucleotide
  source 1..20: mol_type = other DNA
aaggttggcaacttgggcct

SEQ ID NO: 10639 - DNA, 20 bp, synthetic construct
  misc_feature 1..20: note = Description of Artificial Sequence: Synthetic oligonucleotide
  source 1..20: mol_type = other DNA
aggttggcaacttgggcctt

SEQ ID NO: 10640 - DNA, 20 bp, synthetic construct
  misc_feature 1..20: note = Description of Artificial Sequence: Synthetic oligonucleotide
  source 1..20: mol_type = other DNA
ggttggcaacttgggccttg

SEQ ID NO: 10641 - DNA, 20 bp, synthetic construct
  misc_feature 1..20: note = Description of Artificial Sequence: Synthetic oligonucleotide
  source 1..20: mol_type = other DNA
gttggcaacttgggccttga

SEQ ID NO: 10642 - DNA, 20 bp, synthetic construct
  misc_feature 1..20: note = Description of Artificial Sequence: Synthetic oligonucleotide
  source 1..20: mol_type = other DNA
ttggcaacttgggccttgag

SEQ ID NO: 10643 - DNA, 20 bp, synthetic construct
  misc_feature 1..20: note = Description of Artificial Sequence: Synthetic oligonucleotide
  source 1..20: mol_type = other DNA
tggcaacttgggccttgagc

SEQ ID NO: 10644 - DNA, 20 bp, synthetic construct
  misc_feature 1..20: note = Description of Artificial Sequence: Synthetic oligonucleotide
  source 1..20: mol_type = other DNA
ggcaacttgggccttgagct

SEQ ID NO: 10645 - DNA, 20 bp, synthetic construct
  misc_feature 1..20: note = Description of Artificial Sequence: Synthetic oligonucleotide
  source 1..20: mol_type = other DNA
gcaacttgggccttgagctc

SEQ ID NO: 10646 - DNA, 20 bp, synthetic construct
  misc_feature 1..20: note = Description of Artificial Sequence: Synthetic oligonucleotide
  source 1..20: mol_type = other DNA
caacttgggccttgagctcc

SEQ ID NO: 10647 - DNA, 20 bp, synthetic construct
  misc_feature 1..20: note = Description of Artificial Sequence: Synthetic oligonucleotide
  source 1..20: mol_type = other DNA
aacttgggccttgagctcct

SEQ ID NO: 10648 - DNA, 20 bp, synthetic construct
  misc_feature 1..20: note = Description of Artificial Sequence: Synthetic oligonucleotide
  source 1..20: mol_type = other DNA
acttgggccttgagctcctt

SEQ ID NO: 10649 - DNA, 20 bp, synthetic construct
  misc_feature 1..20: note = Description of Artificial Sequence: Synthetic oligonucleotide
  source 1..20: mol_type = other DNA
cttgggccttgagctccttc

SEQ ID NO: 10650 - DNA, 20 bp, synthetic construct
  misc_feature 1..20: note = Description of Artificial Sequence: Synthetic oligonucleotide
  source 1..20: mol_type = other DNA
ttgggccttgagctccttca

SEQ ID NO: 10651 - DNA, 20 bp, synthetic construct
  misc_feature 1..20: note = Description of Artificial Sequence: Synthetic oligonucleotide
  source 1..20: mol_type = other DNA
tgggccttgagctccttcac

SEQ ID NO: 10652 - DNA, 20 bp, synthetic construct
  misc_feature 1..20: note = Description of Artificial Sequence: Synthetic oligonucleotide
  source 1..20: mol_type = other DNA
gggccttgagctccttcacc

SEQ ID NO: 10653 - DNA, 20 bp, synthetic construct
  misc_feature 1..20: note = Description of Artificial Sequence: Synthetic oligonucleotide
  source 1..20: mol_type = other DNA
ggccttgagctccttcacct

SEQ ID NO: 10654 - DNA, 20 bp, synthetic construct
  misc_feature 1..20: note = Description of Artificial Sequence: Synthetic oligonucleotide
  source 1..20: mol_type = other DNA
gccttgagctccttcacctc

SEQ ID NO: 10655 - DNA, 20 bp, synthetic construct
  misc_feature 1..20: note = Description of Artificial Sequence: Synthetic oligonucleotide
  source 1..20: mol_type = other DNA
ccttgagctccttcacctcc

SEQ ID NO: 10656 - DNA, 20 bp, synthetic construct
  misc_feature 1..20: note = Description of Artificial Sequence: Synthetic oligonucleotide
  source 1..20: mol_type = other DNA
cttgagctccttcacctcct

SEQ ID NO: 10657 - DNA, 20 bp, synthetic construct
  misc_feature 1..20: note = Description of Artificial Sequence: Synthetic oligonucleotide
  source 1..20: mol_type = other DNA
ttgagctccttcacctcctc

SEQ ID NO: 10658 - DNA, 20 bp, synthetic construct
  misc_feature 1..20: note = Description of Artificial Sequence: Synthetic oligonucleotide
  source 1..20: mol_type = other DNA
tgagctccttcacctcctca

SEQ ID NO: 10659 - DNA, 20 bp, synthetic construct
  misc_feature 1..20: note = Description of Artificial Sequence: Synthetic oligonucleotide
  source 1..20: mol_type = other DNA
gagctccttcacctcctcac

SEQ ID NO: 10660 - DNA, 20 bp, synthetic construct
  misc_feature 1..20: note = Description of Artificial Sequence: Synthetic oligonucleotide
  source 1..20: mol_type = other DNA
agctccttcacctcctcaca

SEQ ID NO: 10661 - DNA, 20 bp, synthetic construct
  misc_feature 1..20: note = Description of Artificial Sequence: Synthetic oligonucleotide
  source 1..20: mol_type = other DNA
gctccttcacctcctcacag

SEQ ID NO: 10662 - DNA, 20 bp, synthetic construct
  misc_feature 1..20: note = Description of Artificial Sequence: Synthetic oligonucleotide
  source 1..20: mol_type = other DNA
ctccttcacctcctcacagc

SEQ ID NO: 10663 - DNA, 20 bp, synthetic construct
  misc_feature 1..20: note = Description of Artificial Sequence: Synthetic oligonucleotide
  source 1..20: mol_type = other DNA
tccttcacctcctcacagca

SEQ ID NO: 10664 - DNA, 20 bp, synthetic construct
  misc_feature 1..20: note = Description of Artificial Sequence: Synthetic oligonucleotide
  source 1..20: mol_type = other DNA
ccttcacctcctcacagcag

SEQ ID NO: 10665 - DNA, 20 bp, synthetic construct
  misc_feature 1..20: note = Description of Artificial Sequence: Synthetic oligonucleotide
  source 1..20: mol_type = other DNA
cttcacctcctcacagcagt

SEQ ID NO: 10666 - DNA, 20 bp, synthetic construct
  misc_feature 1..20: note = Description of Artificial Sequence: Synthetic oligonucleotide
  source 1..20: mol_type = other DNA
ttcacctcctcacagcagtt

SEQ ID NO: 10667 - DNA, 20 bp, synthetic construct
  misc_feature 1..20: note = Description of Artificial Sequence: Synthetic oligonucleotide
  source 1..20: mol_type = other DNA
tcacctcctcacagcagttg

SEQ ID NO: 10668 - DNA, 20 bp, synthetic construct
  misc_feature 1..20: note = Description of Artificial Sequence: Synthetic oligonucleotide
  source 1..20: mol_type = other DNA
cacctcctcacagcagttgg

SEQ ID NO: 10669 - DNA, 20 bp, synthetic construct
  misc_feature 1..20: note = Description of Artificial Sequence: Synthetic oligonucleotide
  source 1..20: mol_type = other DNA
acctcctcacagcagttggc

SEQ ID NO: 10670 - DNA, 20 bp, synthetic construct
  misc_feature 1..20: note = Description of Artificial Sequence: Synthetic oligonucleotide
  source 1..20: mol_type = other DNA
cctcctcacagcagttggcc

SEQ ID NO: 10671 - DNA, 20 bp, synthetic construct
  misc_feature 1..20: note = Description of Artificial Sequence: Synthetic oligonucleotide
  source 1..20: mol_type = other DNA
ctcctcacagcagttggccg

SEQ ID NO: 10672 - DNA, 20 bp, synthetic construct
  misc_feature 1..20: note = Description of Artificial Sequence: Synthetic oligonucleotide
  source 1..20: mol_type = other DNA
tcctcacagcagttggccgc

SEQ ID NO: 10673 - DNA, 20 bp, synthetic construct
  misc_feature 1..20: note = Description of Artificial Sequence: Synthetic oligonucleotide
  source 1..20: mol_type = other DNA
cctcacagcagttggccgct

SEQ ID NO: 10674 - DNA, 20 bp, synthetic construct
  misc_feature 1..20: note = Description of Artificial Sequence: Synthetic oligonucleotide
  source 1..20: mol_type = other DNA
ctcacagcagttggccgctt

SEQ ID NO: 10675 - DNA, 20 bp, synthetic construct
  misc_feature 1..20: note = Description of Artificial Sequence: Synthetic oligonucleotide
  source 1..20: mol_type = other DNA
tcacagcagttggccgcttt

SEQ ID NO: 10676 - DNA, 20 bp, synthetic construct
  misc_feature 1..20: note = Description of Artificial Sequence: Synthetic oligonucleotide
  source 1..20: mol_type = other DNA
cacagcagttggccgctttg

SEQ ID NO: 10677 - DNA, 20 bp, synthetic construct
  misc_feature 1..20: note = Description of Artificial Sequence: Synthetic oligonucleotide
  source 1..20: mol_type = other DNA
acagcagttggccgctttga

SEQ ID NO: 10678 - DNA, 20 bp, synthetic construct
  misc_feature 1..20: note = Description of Artificial Sequence: Synthetic oligonucleotide
  source 1..20: mol_type = other DNA
cagcagttggccgctttgag

SEQ ID NO: 10679 - DNA, 20 bp, synthetic construct
  misc_feature 1..20: note = Description of Artificial Sequence: Synthetic oligonucleotide
  source 1..20: mol_type = other DNA
agcagttggccgctttgagc

SEQ ID NO: 10680 - DNA, 20 bp, synthetic construct
  misc_feature 1..20: note = Description of Artificial Sequence: Synthetic oligonucleotide
  source 1..20: mol_type = other DNA
gcagttggccgctttgagct

SEQ ID NO: 10681 - DNA, 20 bp, synthetic construct
  misc_feature 1..20: note = Description of Artificial Sequence: Synthetic oligonucleotide
  source 1..20: mol_type = other DNA
cagttggccgctttgagctg

SEQ ID NO: 10682 - DNA, 20 bp, synthetic construct
  misc_feature 1..20: note = Description of Artificial Sequence: Synthetic oligonucleotide
  source 1..20: mol_type = other DNA
agttggccgctttgagctgt

SEQ ID NO: 10683 - DNA, 20 bp, synthetic construct
  misc_feature 1..20: note = Description of Artificial Sequence: Synthetic oligonucleotide
  source 1..20: mol_type = other DNA
gttggccgctttgagctgtg

SEQ ID NO: 10684 - DNA, 20 bp, synthetic construct
  misc_feature 1..20: note = Description of Artificial Sequence: Synthetic oligonucleotide
  source 1..20: mol_type = other DNA
ttggccgctttgagctgtgg

SEQ ID NO: 10685 - DNA, 20 bp, synthetic construct
  misc_feature 1..20: note = Description of Artificial Sequence: Synthetic oligonucleotide
  source 1..20: mol_type = other DNA
tggccgctttgagctgtggc

SEQ ID NO: 10686 - DNA, 20 bp, synthetic construct
  misc_feature 1..20: note = Description of Artificial Sequence: Synthetic oligonucleotide
  source 1..20: mol_type = other DNA
ggccgctttgagctgtggct

SEQ ID NO: 10687 - DNA, 20 bp, synthetic construct
  misc_feature 1..20: note = Description of Artificial Sequence: Synthetic oligonucleotide
  source 1..20: mol_type = other DNA
gccgctttgagctgtggctg

SEQ ID NO: 10688 - DNA, 20 bp, synthetic construct
  misc_feature 1..20: note = Description of Artificial Sequence: Synthetic oligonucleotide
  source 1..20: mol_type = other DNA
ccgctttgagctgtggctgt

SEQ ID NO: 10689 - DNA, 20 bp, synthetic construct
  misc_feature 1..20: note = Description of Artificial Sequence: Synthetic oligonucleotide
  source 1..20: mol_type = other DNA
cgctttgagctgtggctgtg

SEQ ID NO: 10690 - DNA, 20 bp, synthetic construct
  misc_feature 1..20: note = Description of Artificial Sequence: Synthetic oligonucleotide
  source 1..20: mol_type = other DNA
gctttgagctgtggctgtgc

SEQ ID NO: 10691 - DNA, 20 bp, synthetic construct
  misc_feature 1..20: note = Description of Artificial Sequence: Synthetic oligonucleotide
  source 1..20: mol_type = other DNA
ctttgagctgtggctgtgct

SEQ ID NO: 10692 - DNA, 20 bp, synthetic construct
  misc_feature 1..20: note = Description of Artificial Sequence: Synthetic oligonucleotide
  source 1..20: mol_type = other DNA
tttgagctgtggctgtgctg

SEQ ID NO: 10693 - DNA, 20 bp, synthetic construct
  misc_feature 1..20: note = Description of Artificial Sequence: Synthetic oligonucleotide
  source 1..20: mol_type = other DNA
ttgagctgtggctgtgctgg

SEQ ID NO: 10694 - DNA, 20 bp, synthetic construct
  misc_feature 1..20: note = Description of Artificial Sequence: Synthetic oligonucleotide
  source 1..20: mol_type = other DNA
tgagctgtggctgtgctggt

SEQ ID NO: 10695 - DNA, 20 bp, synthetic construct
  misc_feature 1..20: note = Description of Artificial Sequence: Synthetic oligonucleotide
  source 1..20: mol_type = other DNA
gagctgtggctgtgctggtg

SEQ ID NO: 10696 - DNA, 20 bp, synthetic construct
  misc_feature 1..20: note = Description of Artificial Sequence: Synthetic oligonucleotide
  source 1..20: mol_type = other DNA
agctgtggctgtgctggtgt

SEQ ID NO: 10697 - DNA, 20 bp, synthetic construct
  misc_feature 1..20: note = Description of Artificial Sequence: Synthetic oligonucleotide
  source 1..20: mol_type = other DNA
gctgtggctgtgctggtgtc

SEQ ID NO: 10698 - DNA, 20 bp, synthetic construct
  misc_feature 1..20: note = Description of Artificial Sequence: Synthetic oligonucleotide
  source 1..20: mol_type = other DNA
ctgtggctgtgctggtgtct

SEQ ID NO: 10699 - DNA, 20 bp, synthetic construct
  misc_feature 1..20: note = Description of Artificial Sequence: Synthetic oligonucleotide
  source 1..20: mol_type = other DNA
tgtggctgtgctggtgtctt

SEQ ID NO: 10700 - DNA, 20 bp, synthetic construct
  misc_feature 1..20: note = Description of Artificial Sequence: Synthetic oligonucleotide
  source 1..20: mol_type = other DNA
gtggctgtgctggtgtcttg

SEQ ID NO: 10701 - DNA, 20 bp, synthetic construct
  misc_feature 1..20: note = Description of Artificial Sequence: Synthetic oligonucleotide
  source 1..20: mol_type = other DNA
tggctgtgctggtgtcttgt

SEQ ID NO: 10702 - DNA, 20 bp, synthetic construct
  misc_feature 1..20: note = Description of Artificial Sequence: Synthetic oligonucleotide
  source 1..20: mol_type = other DNA
ggctgtgctggtgtcttgtg

SEQ ID NO: 10703 - DNA, 20 bp, synthetic construct
  misc_feature 1..20: note = Description of Artificial Sequence: Synthetic oligonucleotide
  source 1..20: mol_type = other DNA
gctgtgctggtgtcttgtgc

SEQ ID NO: 10704 - DNA, 20 bp, synthetic construct
  misc_feature 1..20: note = Description of Artificial Sequence: Synthetic oligonucleotide
  source 1..20: mol_type = other DNA
ctgtgctggtgtcttgtgct

SEQ ID NO: 10705 - DNA, 20 bp, synthetic construct
  misc_feature 1..20: note = Description of Artificial Sequence: Synthetic oligonucleotide
  source 1..20: mol_type = other DNA
tgtgctggtgtcttgtgctt

SEQ ID NO: 10706 - DNA, 20 bp, synthetic construct
  misc_feature 1..20: note = Description of Artificial Sequence: Synthetic oligonucleotide
  source 1..20: mol_type = other DNA
gtgctggtgtcttgtgctta

SEQ ID NO: 10707 - DNA, 20 bp, synthetic construct
  misc_feature 1..20: note = Description of Artificial Sequence: Synthetic oligonucleotide
  source 1..20: mol_type = other DNA
tgctggtgtcttgtgcttag

SEQ ID NO: 10708 - DNA, 20 bp, synthetic construct
  misc_feature 1..20: note = Description of Artificial Sequence: Synthetic oligonucleotide
  source 1..20: mol_type = other DNA
gctggtgtcttgtgcttaga

SEQ ID NO: 10709 - DNA, 20 bp, synthetic construct
  misc_feature 1..20: note = Description of Artificial Sequence: Synthetic oligonucleotide
  source 1..20: mol_type = other DNA
ctggtgtcttgtgcttagag

SEQ ID NO: 10710 - DNA, 20 bp, synthetic construct
  misc_feature 1..20: note = Description of Artificial Sequence: Synthetic oligonucleotide
  source 1..20: mol_type = other DNA
tggtgtcttgtgcttagaga

SEQ ID NO: 10711 - DNA, 20 bp, synthetic construct
  misc_feature 1..20: note = Description of Artificial Sequence: Synthetic oligonucleotide
  source 1..20: mol_type = other DNA
ggtgtcttgtgcttagagag

SEQ ID NO: 10712 - DNA, 20 bp, synthetic construct
  misc_feature 1..20: note = Description of Artificial Sequence: Synthetic oligonucleotide
  source 1..20: mol_type = other DNA
gtgtcttgtgcttagagagc

SEQ ID NO: 10713 - DNA, 20 bp, synthetic construct
  misc_feature 1..20: note = Description of Artificial Sequence: Synthetic oligonucleotide
  source 1..20: mol_type = other DNA
tgtcttgtgcttagagagct

SEQ ID NO: 10714 - DNA, 20 bp, synthetic construct
  misc_feature 1..20: note = Description of Artificial Sequence: Synthetic oligonucleotide
  source 1..20: mol_type = other DNA
gtcttgtgcttagagagctt

SEQ ID NO: 10715 - DNA, 20 bp, synthetic construct
  misc_feature 1..20: note = Description of Artificial Sequence: Synthetic oligonucleotide
  source 1..20: mol_type = other DNA
tcttgtgcttagagagcttc

SEQ ID NO: 10716 - DNA, 20 bp, synthetic construct
  misc_feature 1..20: note = Description of Artificial Sequence: Synthetic oligonucleotide
  source 1..20: mol_type = other DNA
cttgtgcttagagagcttct

SEQ ID NO: 10717 - DNA, 20 bp, synthetic construct
  misc_feature 1..20: note = Description of Artificial Sequence: Synthetic oligonucleotide
  source 1..20: mol_type = other DNA
ttgtgcttagagagcttctg

SEQ ID NO: 10718 - DNA, 20 bp, synthetic construct
  misc_feature 1..20: note = Description of Artificial Sequence: Synthetic oligonucleotide
  source 1..20: mol_type = other DNA
tgtgcttagagagcttctgc

SEQ ID NO: 10719 - DNA, 20 bp, synthetic construct
  misc_feature 1..20: note = Description of Artificial Sequence: Synthetic oligonucleotide
  source 1..20: mol_type = other DNA
gtgcttagagagcttctgca

SEQ ID NO: 10720 - DNA, 20 bp, synthetic construct
  misc_feature 1..20: note = Description of Artificial Sequence: Synthetic oligonucleotide
  source 1..20: mol_type = other DNA
tgcttagagagcttctgcag

SEQ ID NO: 10721 - DNA, 20 bp, synthetic construct
  misc_feature 1..20: note = Description of Artificial Sequence: Synthetic oligonucleotide
  source 1..20: mol_type = other DNA
gcttagagagcttctgcagc

SEQ ID NO: 10722 - DNA, 20 bp, synthetic construct
  misc_feature 1..20: note = Description of Artificial Sequence: Synthetic oligonucleotide
  source 1..20: mol_type = other DNA
cttagagagcttctgcagcc

SEQ ID NO: 10723 - DNA, 20 bp, synthetic construct
  misc_feature 1..20: note = Description of Artificial Sequence: Synthetic oligonucleotide
  source 1..20: mol_type = other DNA
ttagagagcttctgcagcca

SEQ ID NO: 10724 - DNA, 20 bp, synthetic construct
  misc_feature 1..20: note = Description of Artificial Sequence: Synthetic oligonucleotide
  source 1..20: mol_type = other DNA
tagagagcttctgcagccac

SEQ ID NO: 10725 - DNA, 20 bp, synthetic construct
  misc_feature 1..20: note = Description of Artificial Sequence: Synthetic oligonucleotide
  source 1..20: mol_type = other DNA
agagagcttctgcagccacg

SEQ ID NO: 10726 - DNA, 20 bp, synthetic construct
  misc_feature 1..20: note = Description of Artificial Sequence: Synthetic oligonucleotide
  source 1..20: mol_type = other DNA
gagagcttctgcagccacgc

SEQ ID NO: 10727 - DNA, 20 bp, synthetic construct
  misc_feature 1..20: note = Description of Artificial Sequence: Synthetic oligonucleotide
  source 1..20: mol_type = other DNA
agagcttctgcagccacgct

SEQ ID NO: 10728 - DNA, 20 bp, synthetic construct
  misc_feature 1..20: note = Description of Artificial Sequence: Synthetic oligonucleotide
  source 1..20: mol_type = other DNA
gagcttctgcagccacgctg

SEQ ID NO: 10729 - DNA, 20 bp, synthetic construct
  misc_feature 1..20: note = Description of Artificial Sequence: Synthetic oligonucleotide
  source 1..20: mol_type = other DNA
agcttctgcagccacgctgg

SEQ ID NO: 10730 - DNA, 20 bp, synthetic construct
  misc_feature 1..20: note = Description of Artificial Sequence: Synthetic oligonucleotide
  source 1..20: mol_type = other DNA
gcttctgcagccacgctggg

SEQ ID NO: 10731 - DNA, 20 bp, synthetic construct
  misc_feature 1..20: note = Description of Artificial Sequence: Synthetic oligonucleotide
  source 1..20: mol_type = other DNA
cttctgcagccacgctgggt

SEQ ID NO: 10732 - DNA, 20 bp, synthetic construct
  misc_feature 1..20: note = Description of Artificial Sequence: Synthetic oligonucleotide
  source 1..20: mol_type = other DNA
ttctgcagccacgctgggtg

SEQ ID NO: 10733 - DNA, 20 bp, synthetic construct
  misc_feature 1..20: note = Description of Artificial Sequence: Synthetic oligonucleotide
  source 1..20: mol_type = other DNA
tctgcagccacgctgggtgg

SEQ ID NO: 10734 - DNA, 20 bp, synthetic construct
  misc_feature 1..20: note = Description of Artificial Sequence: Synthetic oligonucleotide
  source 1..20: mol_type = other DNA
ctgcagccacgctgggtggc

SEQ ID NO: 10735 - DNA, 20 bp, synthetic construct
  misc_feature 1..20: note = Description of Artificial Sequence: Synthetic oligonucleotide
  source 1..20: mol_type = other DNA
tgcagccacgctgggtggct

SEQ ID NO: 10736 - DNA, 20 bp, synthetic construct
  misc_feature 1..20: note = Description of Artificial Sequence: Synthetic oligonucleotide
  source 1..20: mol_type = other DNA
gcagccacgctgggtggctg

SEQ ID NO: 10737 - DNA, 20 bp, synthetic construct
  misc_feature 1..20: note = Description of Artificial Sequence: Synthetic oligonucleotide
  source 1..20: mol_type = other DNA
cagccacgctgggtggctga

SEQ ID NO: 10738 - DNA, 20 bp, synthetic construct
  misc_feature 1..20: note = Description of Artificial Sequence: Synthetic oligonucleotide
  source 1..20: mol_type = other DNA
agccacgctgggtggctgac

SEQ ID NO: 10739 - DNA, 20 bp, synthetic construct
  misc_feature 1..20: note = Description of Artificial Sequence: Synthetic oligonucleotide
  source 1..20: mol_type = other DNA
gccacgctgggtggctgaca

SEQ ID NO: 10740 - DNA, 20 bp, synthetic construct
  misc_feature 1..20: note = Description of Artificial Sequence: Synthetic oligonucleotide
  source 1..20: mol_type = other DNA
ccacgctgggtggctgacaa

SEQ ID NO: 10741 - DNA, 20 bp, synthetic construct
  misc_feature 1..20: note = Description of Artificial Sequence: Synthetic oligonucleotide
  source 1..20: mol_type = other DNA
cacgctgggtggctgacaaa

SEQ ID NO: 10742 - DNA, 20 bp, synthetic construct
  misc_feature 1..20: note = Description of Artificial Sequence: Synthetic oligonucleotide
  source 1..20: mol_type = other DNA
acgctgggtggctgacaaag

SEQ ID NO: 10743 - DNA, 20 bp, synthetic construct
  misc_feature 1..20: note = Description of Artificial Sequence: Synthetic oligonucleotide
  source 1..20: mol_type = other DNA
cgctgggtggctgacaaagg

SEQ ID NO: 10744 - DNA, 20 bp, synthetic construct
  misc_feature 1..20: note = Description of Artificial Sequence: Synthetic oligonucleotide
  source 1..20: mol_type = other DNA
gctgggtggctgacaaaggc

SEQ ID NO: 10745 - DNA, 20 bp, synthetic construct
  misc_feature 1..20: note = Description of Artificial Sequence: Synthetic oligonucleotide
  source 1..20: mol_type = other DNA
ctgggtggctgacaaaggcc

SEQ ID NO: 10746 - DNA, 20 bp, synthetic construct
  misc_feature 1..20: note = Description of Artificial Sequence: Synthetic oligonucleotide
  source 1..20: mol_type = other DNA
tgggtggctgacaaaggcca

SEQ ID NO: 10747 - DNA, 20 bp, synthetic construct
  misc_feature 1..20: note = Description of Artificial Sequence: Synthetic oligonucleotide
  source 1..20: mol_type = other DNA
gggtggctgacaaaggccac

SEQ ID NO: 10748 - DNA, 20 bp, synthetic construct
  misc_feature 1..20: note = Description of Artificial Sequence: Synthetic oligonucleotide
  source 1..20: mol_type = other DNA
ggtggctgacaaaggccacg

SEQ ID NO: 10749 - DNA, 20 bp, synthetic construct
  misc_feature 1..20: note = Description of Artificial Sequence: Synthetic oligonucleotide
  source 1..20: mol_type = other DNA
gtggctgacaaaggccacga

SEQ ID NO: 10750 - DNA, 20 bp, synthetic construct
  misc_feature 1..20: note = Description of Artificial Sequence: Synthetic oligonucleotide
  source 1..20: mol_type = other DNA
tggctgacaaaggccacgat

SEQ ID NO: 10751 - DNA, 20 bp, synthetic construct
  misc_feature 1..20: note = Description of Artificial Sequence: Synthetic oligonucleotide
  source 1..20: mol_type = other DNA
ggctgacaaaggccacgatg

SEQ ID NO: 10752 - DNA, 20 bp, synthetic construct
  misc_feature 1..20: note = Description of Artificial Sequence: Synthetic oligonucleotide
  source 1..20: mol_type = other DNA
gctgacaaaggccacgatga

SEQ ID NO: 10753 - DNA, 20 bp, synthetic construct
  misc_feature 1..20: note = Description of Artificial Sequence: Synthetic oligonucleotide
  source 1..20: mol_type = other DNA
ctgacaaaggccacgatgaa

SEQ ID NO: 10754 - DNA, 20 bp, synthetic construct
  misc_feature 1..20: note = Description of Artificial Sequence: Synthetic oligonucleotide
  source 1..20: mol_type = other DNA
tgacaaaggccacgatgaaa

SEQ ID NO: 10755 - DNA, 20 bp, synthetic construct
  misc_feature 1..20: note = Description of Artificial Sequence: Synthetic oligonucleotide
  source 1..20: mol_type = other DNA
gacaaaggccacgatgaaaa

SEQ ID NO: 10756 - DNA, 20 bp, synthetic construct
  misc_feature 1..20: note = Description of Artificial Sequence: Synthetic oligonucleotide
  source 1..20: mol_type = other DNA
acaaaggccacgatgaaaat

SEQ ID NO: 10757 - DNA, 20 bp, synthetic construct
  misc_feature 1..20: note = Description of Artificial Sequence: Synthetic oligonucleotide
  source 1..20: mol_type = other DNA
caaaggccacgatgaaaatg

SEQ ID NO: 10758 - DNA, 20 bp, synthetic construct
  misc_feature 1..20: note = Description of Artificial Sequence: Synthetic oligonucleotide
  source 1..20: mol_type = other DNA
aaaggccacgatgaaaatgc

SEQ ID NO: 10759 - DNA, 20 bp, synthetic construct
  misc_feature 1..20: note = Description of Artificial Sequence: Synthetic oligonucleotide
  source 1..20: mol_type = other DNA
aaggccacgatgaaaatgca

SEQ ID NO: 10760 - DNA, 20 bp, synthetic construct
  misc_feature 1..20: note = Description of Artificial Sequence: Synthetic oligonucleotide
  source 1..20: mol_type = other DNA
aggccacgatgaaaatgcag

SEQ ID NO: 10761 - DNA, 20 bp, synthetic construct
  misc_feature 1..20: note = Description of Artificial Sequence: Synthetic oligonucleotide
  source 1..20: mol_type = other DNA
ggccacgatgaaaatgcaga

SEQ ID NO: 10762 - DNA, 20 bp, synthetic construct
  misc_feature 1..20: note = Description of Artificial Sequence: Synthetic oligonucleotide
  source 1..20: mol_type = other DNA
gccacgatgaaaatgcagag

SEQ ID NO: 10763 - DNA, 20 bp, synthetic construct
  misc_feature 1..20: note = Description of Artificial Sequence: Synthetic oligonucleotide
  source 1..20: mol_type = other DNA
ccacgatgaaaatgcagagc

SEQ ID NO: 10764 - DNA, 20 bp, synthetic construct
  misc_feature 1..20: note = Description of Artificial Sequence: Synthetic oligonucleotide
  source 1..20: mol_type = other DNA
cacgatgaaaatgcagagcc

SEQ ID NO: 10765 - DNA, 20 bp, synthetic construct
  misc_feature 1..20: note = Description of Artificial Sequence: Synthetic oligonucleotide
  source 1..20: mol_type = other DNA
acgatgaaaatgcagagcca

SEQ ID NO: 10766 - DNA, 20 bp, synthetic construct
  misc_feature 1..20: note = Description of Artificial Sequence: Synthetic oligonucleotide
  source 1..20: mol_type = other DNA
cgatgaaaatgcagagccag

SEQ ID NO: 10767 - DNA, 20 bp, synthetic construct
  misc_feature 1..20: note = Description of Artificial Sequence: Synthetic oligonucleotide
  source 1..20: mol_type = other DNA
gatgaaaatgcagagccagg

SEQ ID NO: 10768 - DNA, 20 bp, synthetic construct
  misc_feature 1..20: note = Description of Artificial Sequence: Synthetic oligonucleotide
  source 1..20: mol_type = other DNA
atgaaaatgcagagccaggt

SEQ ID NO: 10769 - DNA, 20 bp, synthetic construct
  misc_feature 1..20: note = Description of Artificial Sequence: Synthetic oligonucleotide
  source 1..20: mol_type = other DNA
tgaaaatgcagagccaggtc

SEQ ID NO: 10770 - DNA, 20 bp, synthetic construct
  misc_feature 1..20: note = Description of Artificial Sequence: Synthetic oligonucleotide
  source 1..20: mol_type = other DNA
gaaaatgcagagccaggtca

SEQ ID NO: 10771 - DNA, 20 bp, synthetic construct
  misc_feature 1..20: note = Description of Artificial Sequence: Synthetic oligonucleotide
  source 1..20: mol_type = other DNA
aaaatgcagagccaggtcac

SEQ ID NO: 10772 - DNA, 20 bp, synthetic construct
  misc_feature 1..20: note = Description of Artificial Sequence: Synthetic oligonucleotide
  source 1..20: mol_type = other DNA
aaatgcagagccaggtcaca

SEQ ID NO: 10773 - DNA, 20 bp, synthetic construct
  misc_feature 1..20: note = Description of Artificial Sequence: Synthetic oligonucleotide
  source 1..20: mol_type = other DNA
aatgcagagccaggtcacag

SEQ ID NO: 10774 - DNA, 20 bp, synthetic construct
  misc_feature 1..20: note = Description of Artificial Sequence: Synthetic oligonucleotide
  source 1..20: mol_type = other DNA
atgcagagccaggtcacagc

SEQ ID NO: 10775 - DNA, 20 bp, synthetic construct
  misc_feature 1..20: note = Description of Artificial Sequence: Synthetic oligonucleotide
  source 1..20: mol_type = other DNA
tgcagagccaggtcacagct

SEQ ID NO: 10776 - DNA, 20 bp, synthetic construct
  misc_feature 1..20: note = Description of Artificial Sequence: Synthetic oligonucleotide
  source 1..20: mol_type = other DNA
gcagagccaggtcacagctg

SEQ ID NO: 10777 - DNA, 20 bp, synthetic construct
  misc_feature 1..20: note = Description of Artificial Sequence: Synthetic oligonucleotide
  source 1..20: mol_type = other DNA
cagagccaggtcacagctga

SEQ ID NO: 10778 - DNA, 20 bp, synthetic construct
  misc_feature 1..20: note = Description of Artificial Sequence: Synthetic oligonucleotide
  source 1..20: mol_type = other DNA
agagccaggtcacagctgag

SEQ ID NO: 10779 - DNA, 20 bp, synthetic construct
  misc_feature 1..20: note = Description of Artificial Sequence: Synthetic oligonucleotide
  source 1..20: mol_type = other DNA
gagccaggtcacagctgaga

SEQ ID NO: 10780 - DNA, 20 bp, synthetic construct
  misc_feature 1..20: note = Description of Artificial Sequence: Synthetic oligonucleotide
  source 1..20: mol_type = other DNA
agccaggtcacagctgagag

SEQ ID NO: 10781 - DNA, 20 bp, synthetic construct
  misc_feature 1..20: note = Description of Artificial Sequence: Synthetic oligonucleotide
  source 1..20: mol_type = other DNA
gccaggtcacagctgagaga

SEQ ID NO: 10782 - DNA, 20 bp, synthetic construct
  misc_feature 1..20: note = Description of Artificial Sequence: Synthetic oligonucleotide
  source 1..20: mol_type = other DNA
ccaggtcacagctgagagag

SEQ ID NO: 10783 - DNA, 20 bp, synthetic construct
  misc_feature 1..20: note = Description of Artificial Sequence: Synthetic oligonucleotide
  source 1..20: mol_type = other DNA
caggtcacagctgagagagg

SEQ ID NO: 10784 - DNA, 20 bp, synthetic construct
  misc_feature 1..20: note = Description of Artificial Sequence: Synthetic oligonucleotide
  source 1..20: mol_type = other DNA
aggtcacagctgagagaggc

SEQ ID NO: 10785 - DNA, 20 bp, synthetic construct
  misc_feature 1..20: note = Description of Artificial Sequence: Synthetic oligonucleotide
  source 1..20: mol_type = other DNA
ggtcacagctgagagaggct

SEQ ID NO: 10786 - DNA, 20 bp, synthetic construct
  misc_feature 1..20: note = Description of Artificial Sequence: Synthetic oligonucleotide
  source 1..20: mol_type = other DNA
gtcacagctgagagaggctt

SEQ ID NO: 10787 - DNA, 20 bp, synthetic construct
  misc_feature 1..20: note = Description of Artificial Sequence: Synthetic oligonucleotide
  source 1..20: mol_type = other DNA
tcacagctgagagaggcttt

SEQ ID NO: 10788 - DNA, 20 bp, synthetic construct
  misc_feature 1..20: note = Description of Artificial Sequence: Synthetic oligonucleotide
  source 1..20: mol_type = other DNA
cacagctgagagaggctttt

SEQ ID NO: 10789 - DNA, 20 bp, synthetic construct
  misc_feature 1..20: note = Description of Artificial Sequence: Synthetic oligonucleotide
  source 1..20: mol_type = other DNA
acagctgagagaggcttttt

SEQ ID NO: 10790 - DNA, 20 bp, synthetic construct
  misc_feature 1..20: note = Description of Artificial Sequence: Synthetic oligonucleotide
  source 1..20: mol_type = other DNA
cagctgagagaggctttttc

SEQ ID NO: 10791 - DNA, 20 bp, synthetic construct
  misc_feature 1..20: note = Description of Artificial Sequence: Synthetic oligonucleotide
  source 1..20: mol_type = other DNA
agctgagagaggctttttca

SEQ ID NO: 10792 - DNA, 20 bp, synthetic construct
  misc_feature 1..20: note = Description of Artificial Sequence: Synthetic oligonucleotide
  source 1..20: mol_type = other DNA
gctgagagaggctttttcag

SEQ ID NO: 10793 - DNA, 20 bp, synthetic construct
  misc_feature 1..20: note = Description of Artificial Sequence: Synthetic oligonucleotide
  source 1..20: mol_type = other DNA
ctgagagaggctttttcagc

SEQ ID NO: 10794 - DNA, 20 bp, synthetic construct
  misc_feature 1..20: note = Description of Artificial Sequence: Synthetic oligonucleotide
  source 1..20: mol_type = other DNA
tgagagaggctttttcagca

SEQ ID NO: 10795 - DNA, 20 bp, synthetic construct
  misc_feature 1..20: note = Description of Artificial Sequence: Synthetic oligonucleotide
  source 1..20: mol_type = other DNA
gagagaggctttttcagcat

SEQ ID NO: 10796 - DNA, 20 bp, synthetic construct
  misc_feature 1..20: note = Description of Artificial Sequence: Synthetic oligonucleotide
  source 1..20: mol_type = other DNA
agagaggctttttcagcatc

SEQ ID NO: 10797 - DNA, 20 bp, synthetic construct
  misc_feature 1..20: note = Description of Artificial Sequence: Synthetic oligonucleotide
  source 1..20: mol_type = other DNA
gagaggctttttcagcatct

SEQ ID NO: 10798 - DNA, 20 bp, synthetic construct
  misc_feature 1..20: note = Description of Artificial Sequence: Synthetic oligonucleotide
  source 1..20: mol_type = other DNA
agaggctttttcagcatctt

SEQ ID NO: 10799 - DNA, 20 bp, synthetic construct
  misc_feature 1..20: note = Description of Artificial Sequence: Synthetic oligonucleotide
  source 1..20: mol_type = other DNA
gaggctttttcagcatcttt

SEQ ID NO: 10800 - DNA, 20 bp, synthetic construct
  misc_feature 1..20: note = Description of Artificial Sequence: Synthetic oligonucleotide
  source 1..20: mol_type = other DNA
aggctttttcagcatctttt

SEQ ID NO: 10801 - DNA, 20 bp, synthetic construct
  misc_feature 1..20: note = Description of Artificial Sequence: Synthetic oligonucleotide
  source 1..20: mol_type = other DNA
ggctttttcagcatcttttg

SEQ ID NO: 10802 - DNA, 20 bp, synthetic construct
  misc_feature 1..20: note = Description of Artificial Sequence: Synthetic oligonucleotide
  source 1..20: mol_type = other DNA
gctttttcagcatcttttgt

SEQ ID NO: 10803 - DNA, 20 bp, synthetic construct
  misc_feature 1..20: note = Description of Artificial Sequence: Synthetic oligonucleotide
  source 1..20: mol_type = other DNA
ctttttcagcatcttttgtg

SEQ ID NO: 10804 - DNA, 20 bp, synthetic construct
  misc_feature 1..20: note = Description of Artificial Sequence: Synthetic oligonucleotide
  source 1..20: mol_type = other DNA
tttttcagcatcttttgtgg

SEQ ID NO: 10805 - DNA, 20 bp, synthetic construct
  misc_feature 1..20: note = Description of Artificial Sequence: Synthetic oligonucleotide
  source 1..20: mol_type = other DNA
ttttcagcatcttttgtggg

SEQ ID NO: 10806 - DNA, 20 bp, synthetic construct
  misc_feature 1..20: note = Description of Artificial Sequence: Synthetic oligonucleotide
  source 1..20: mol_type = other DNA
tttcagcatcttttgtgggt

SEQ ID NO: 10807 - DNA, 20 bp, synthetic construct
  misc_feature 1..20: note = Description of Artificial Sequence: Synthetic oligonucleotide
  source 1..20: mol_type = other DNA
ttcagcatcttttgtgggtt

SEQ ID NO: 10808 - DNA, 20 bp, synthetic construct
  misc_feature 1..20: note = Description of Artificial Sequence: Synthetic oligonucleotide
  source 1..20: mol_type = other DNA
tcagcatcttttgtgggttt

SEQ ID NO: 10809 - DNA, 20 bp, synthetic construct
  misc_feature 1..20: note = Description of Artificial Sequence: Synthetic oligonucleotide
  source 1..20: mol_type = other DNA
cagcatcttttgtgggtttg

SEQ ID NO: 10810 - DNA, 20 bp, synthetic construct
  misc_feature 1..20: note = Description of Artificial Sequence: Synthetic oligonucleotide
  source 1..20: mol_type = other DNA
agcatcttttgtgggtttgg

SEQ ID NO: 10811 - DNA, 20 bp, synthetic construct
  misc_feature 1..20: note = Description of Artificial Sequence: Synthetic oligonucleotide
  source 1..20: mol_type = other DNA
gcatcttttgtgggtttggg

SEQ ID NO: 10812 - DNA, 20 bp, synthetic construct
  misc_feature 1..20: note = Description of Artificial Sequence: Synthetic oligonucleotide
  source 1..20: mol_type = other DNA
catcttttgtgggtttgggt

SEQ ID NO: 10813 - DNA, 20 bp, synthetic construct
  misc_feature 1..20: note = Description of Artificial Sequence: Synthetic oligonucleotide
  source 1..20: mol_type = other DNA
atcttttgtgggtttgggtg

SEQ ID NO: 10814 - DNA, 20 bp, synthetic construct
  misc_feature 1..20: note = Description of Artificial Sequence: Synthetic oligonucleotide
  source 1..20: mol_type = other DNA
tcttttgtgggtttgggtga

SEQ ID NO: 10815 - DNA, 20 bp, synthetic construct
  misc_feature 1..20: note = Description of Artificial Sequence: Synthetic oligonucleotide
  source 1..20: mol_type = other DNA
cttttgtgggtttgggtgag

SEQ ID NO: 10816 - DNA, 20 bp, synthetic construct
  misc_feature 1..20: note = Description of Artificial Sequence: Synthetic oligonucleotide
  source 1..20: mol_type = other DNA
ttttgtgggtttgggtgagg

SEQ ID NO: 10817 - DNA, 20 bp, synthetic construct
  misc_feature 1..20: note = Description of Artificial Sequence: Synthetic oligonucleotide
  source 1..20: mol_type = other DNA
tttgtgggtttgggtgagga

SEQ ID NO: 10818 - DNA, 20 bp, synthetic construct
  misc_feature 1..20: note = Description of Artificial Sequence: Synthetic oligonucleotide
  source 1..20: mol_type = other DNA
ttgtgggtttgggtgaggaa

SEQ ID NO: 10819 - DNA, 20 bp, synthetic construct
  misc_feature 1..20: note = Description of Artificial Sequence: Synthetic oligonucleotide
  source 1..20: mol_type = other DNA
tgtgggtttgggtgaggaag

SEQ ID NO: 10820 - DNA, 20 bp, synthetic construct
  misc_feature 1..20: note = Description of Artificial Sequence: Synthetic oligonucleotide
  source 1..20: mol_type = other DNA
gtgggtttgggtgaggaagg

SEQ ID NO: 10821 - DNA, 20 bp, synthetic construct
  misc_feature 1..20: note = Description of Artificial Sequence: Synthetic oligonucleotide
  source 1..20: mol_type = other DNA
tgggtttgggtgaggaaggc

SEQ ID NO: 10822 - DNA, 20 bp, synthetic construct
  misc_feature 1..20: note = Description of Artificial Sequence: Synthetic oligonucleotide
  source 1..20: mol_type = other DNA
gggtttgggtgaggaaggct

SEQ ID NO: 10823 - DNA, 20 bp, synthetic construct
  misc_feature 1..20: note = Description of Artificial Sequence: Synthetic oligonucleotide
  source 1..20: mol_type = other DNA
ggtttgggtgaggaaggctc

SEQ ID NO: 10824 - DNA, 20 bp, synthetic construct
  misc_feature 1..20: note = Description of Artificial Sequence: Synthetic oligonucleotide
  source 1..20: mol_type = other DNA
gtttgggtgaggaaggctct

SEQ ID NO: 10825 - DNA, 20 bp, synthetic construct
  misc_feature 1..20: note = Description of Artificial Sequence: Synthetic oligonucleotide
  source 1..20: mol_type = other DNA
tttgggtgaggaaggctctt

SEQ ID NO: 10826 - DNA, 20 bp, synthetic construct
  misc_feature 1..20: note = Description of Artificial Sequence: Synthetic oligonucleotide
  source 1..20: mol_type = other DNA
ttgggtgaggaaggctcttc

SEQ ID NO: 10827 - DNA, 20 bp, synthetic construct
  misc_feature 1..20: note = Description of Artificial Sequence: Synthetic oligonucleotide
  source 1..20: mol_type = other DNA
tgggtgaggaaggctcttcc

SEQ ID NO: 10828 - DNA, 20 bp, synthetic construct
  misc_feature 1..20: note = Description of Artificial Sequence: Synthetic oligonucleotide
  source 1..20: mol_type = other DNA
gggtgaggaaggctcttcct

SEQ ID NO: 10829 - DNA, 20 bp, synthetic construct
  misc_feature 1..20: note = Description of Artificial Sequence: Synthetic oligonucleotide
  source 1..20: mol_type = other DNA
ggtgaggaaggctcttcctt

SEQ ID NO: 10830 - DNA, 20 bp, synthetic construct
  misc_feature 1..20: note = Description of Artificial Sequence: Synthetic oligonucleotide
  source 1..20: mol_type = other DNA
gtgaggaaggctcttccttc

SEQ ID NO: 10831 - DNA, 20 bp, synthetic construct
  misc_feature 1..20: note = Description of Artificial Sequence: Synthetic oligonucleotide
  source 1..20: mol_type = other DNA
tgaggaaggctcttccttca

SEQ ID NO: 10832 - DNA, 20 bp, synthetic construct
  misc_feature 1..20: note = Description of Artificial Sequence: Synthetic oligonucleotide
  source 1..20: mol_type = other DNA
gaggaaggctcttccttcag

SEQ ID NO: 10833 - DNA, 20 bp, synthetic construct
  misc_feature 1..20: note = Description of Artificial Sequence: Synthetic oligonucleotide
  source 1..20: mol_type = other DNA
aggaaggctcttccttcagg

SEQ ID NO: 10834 - DNA, 20 bp, synthetic construct
  misc_feature 1..20: note = Description of Artificial Sequence: Synthetic oligonucleotide
  source 1..20: mol_type = other DNA
ggaaggctcttccttcaggg

SEQ ID NO: 10835 - DNA, 20 bp, synthetic construct
  misc_feature 1..20: note = Description of Artificial Sequence: Synthetic oligonucleotide
  source 1..20: mol_type = other DNA
gaaggctcttccttcagggg

SEQ ID NO: 10836 - DNA, 20 bp, synthetic construct
  misc_feature 1..20: note = Description of Artificial Sequence: Synthetic oligonucleotide
  source 1..20: mol_type = other DNA
aaggctcttccttcagggga

SEQ ID NO: 10837 - DNA, 20 bp, synthetic construct
  misc_feature 1..20: note = Description of Artificial Sequence: Synthetic oligonucleotide
  source 1..20: mol_type = other DNA
aggctcttccttcaggggag

SEQ ID NO: 10838 - DNA, 20 bp, synthetic construct
  misc_feature 1..20: note = Description of Artificial Sequence: Synthetic oligonucleotide
  source 1..20: mol_type = other DNA
ggctcttccttcaggggagt

SEQ ID NO: 10839 - DNA, 20 bp, synthetic construct
  misc_feature 1..20: note = Description of Artificial Sequence: Synthetic oligonucleotide
  source 1..20: mol_type = other DNA
gctcttccttcaggggagtc

SEQ ID NO: 10840 - DNA, 20 bp, synthetic construct
  misc_feature 1..20: note = Description of Artificial Sequence: Synthetic oligonucleotide
  source 1..20: mol_type = other DNA
ctcttccttcaggggagtct

SEQ ID NO: 10841 - DNA, 20 bp, synthetic construct
  misc_feature 1..20: note = Description of Artificial Sequence: Synthetic oligonucleotide
  source 1..20: mol_type = other DNA
tcttccttcaggggagtctg

SEQ ID NO: 10842 - DNA, 20 bp, synthetic construct
  misc_feature 1..20: note = Description of Artificial Sequence: Synthetic oligonucleotide
  source 1..20: mol_type = other DNA
cttccttcaggggagtctgg

SEQ ID NO: 10843 - DNA, 20 bp, synthetic construct
  misc_feature 1..20: note = Description of Artificial Sequence: Synthetic oligonucleotide
  source 1..20: mol_type = other DNA
ttccttcaggggagtctgga

SEQ ID NO: 10844 - DNA, 20 bp, synthetic construct
  misc_feature 1..20: note = Description of Artificial Sequence: Synthetic oligonucleotide
  source 1..20: mol_type = other DNA
tccttcaggggagtctggag

SEQ ID NO: 10845 - DNA, 20 bp, synthetic construct
  misc_feature 1..20: note = Description of Artificial Sequence: Synthetic oligonucleotide
  source 1..20: mol_type = other DNA
ccttcaggggagtctggaga

SEQ ID NO: 10846 - DNA, 20 bp, synthetic construct
  misc_feature 1..20: note = Description of Artificial Sequence: Synthetic oligonucleotide
  source 1..20: mol_type = other DNA
cttcaggggagtctggagat

SEQ ID NO: 10847 - DNA, 20 bp, synthetic construct
  misc_feature 1..20: note = Description of Artificial Sequence: Synthetic oligonucleotide
  source 1..20: mol_type = other DNA
ttcaggggagtctggagatg

SEQ ID NO: 10848 - DNA, 20 bp, synthetic construct
  misc_feature 1..20: note = Description of Artificial Sequence: Synthetic oligonucleotide
  source 1..20: mol_type = other DNA
tcaggggagtctggagatgc

SEQ ID NO: 10849 - DNA, 20 bp, synthetic construct
  misc_feature 1..20: note = Description of Artificial Sequence: Synthetic oligonucleotide
  source 1..20: mol_type = other DNA
caggggagtctggagatgcc

SEQ ID NO: 10850 - DNA, 20 bp, synthetic construct
  misc_feature 1..20: note = Description of Artificial Sequence: Synthetic oligonucleotide
  source 1..20: mol_type = other DNA
aggggagtctggagatgccc

SEQ ID NO: 10851 - DNA, 20 bp, synthetic construct
  misc_feature 1..20: note = Description of Artificial Sequence: Synthetic oligonucleotide
  source 1..20: mol_type = other DNA
ggggagtctggagatgccca

SEQ ID NO: 10852 - DNA, 20 bp, synthetic construct
  misc_feature 1..20: note = Description of Artificial Sequence: Synthetic oligonucleotide
  source 1..20: mol_type = other DNA
gggagtctggagatgcccag

SEQ ID NO: 10853 - DNA, 20 bp, synthetic construct
  misc_feature 1..20: note = Description of Artificial Sequence: Synthetic oligonucleotide
  source 1..20: mol_type = other DNA
ggagtctggagatgcccagc

SEQ ID NO: 10854 - DNA, 20 bp, synthetic construct
  misc_feature 1..20: note = Description of Artificial Sequence: Synthetic oligonucleotide
  source 1..20: mol_type = other DNA
gagtctggagatgcccagct

SEQ ID NO: 10855 - DNA, 20 bp, synthetic construct
  misc_feature 1..20: note = Description of Artificial Sequence: Synthetic oligonucleotide
  source 1..20: mol_type = other DNA
agtctggagatgcccagctg

SEQ ID NO: 10856 - DNA, 20 bp, synthetic construct
  misc_feature 1..20: note = Description of Artificial Sequence: Synthetic oligonucleotide
  source 1..20: mol_type = other DNA
gtctggagatgcccagctga

SEQ ID NO: 10857 - DNA, 20 bp, synthetic construct
  misc_feature 1..20: note = Description of Artificial Sequence: Synthetic oligonucleotide
  source 1..20: mol_type = other DNA
tctggagatgcccagctgag

SEQ ID NO: 10858 - DNA, 20 bp, synthetic construct
  misc_feature 1..20: note = Description of Artificial Sequence: Synthetic oligonucleotide
  source 1..20: mol_type = other DNA
ctggagatgcccagctgagg

SEQ ID NO: 10859 - DNA, 20 bp, synthetic construct
  misc_feature 1..20: note = Description of Artificial Sequence: Synthetic oligonucleotide
  source 1..20: mol_type = other DNA
tggagatgcccagctgaggt

SEQ ID NO: 10860 - DNA, 20 bp, synthetic construct
  misc_feature 1..20: note = Description of Artificial Sequence: Synthetic oligonucleotide
  source 1..20: mol_type = other DNA
ggagatgcccagctgaggtc

SEQ ID NO: 10861 - DNA, 20 bp, synthetic construct
  misc_feature 1..20: note = Description of Artificial Sequence: Synthetic oligonucleotide
  source 1..20: mol_type = other DNA
gagatgcccagctgaggtct

SEQ ID NO: 10862 - DNA, 20 bp, synthetic construct
  misc_feature 1..20: note = Description of Artificial Sequence: Synthetic oligonucleotide
  source 1..20: mol_type = other DNA
agatgcccagctgaggtctg

SEQ ID NO: 10863 - DNA, 20 bp, synthetic construct
  misc_feature 1..20: note = Description of Artificial Sequence: Synthetic oligonucleotide
  source 1..20: mol_type = other DNA
gatgcccagctgaggtctgc

SEQ ID NO: 10864 - DNA, 20 bp, synthetic construct
  misc_feature 1..20: note = Description of Artificial Sequence: Synthetic oligonucleotide
  source 1..20: mol_type = other DNA
atgcccagctgaggtctgca

SEQ ID NO: 10865 - DNA, 20 bp, synthetic construct
  misc_feature 1..20: note = Description of Artificial Sequence: Synthetic oligonucleotide
  source 1..20: mol_type = other DNA
tgcccagctgaggtctgcaa

SEQ ID NO: 10866 - DNA, 20 bp, synthetic construct
  misc_feature 1..20: note = Description of Artificial Sequence: Synthetic oligonucleotide
  source 1..20: mol_type = other DNA
gcccagctgaggtctgcaaa

SEQ ID NO: 10867 - DNA, 20 bp, synthetic construct
  misc_feature 1..20: note = Description of Artificial Sequence: Synthetic oligonucleotide
  source 1..20: mol_type = other DNA
cccagctgaggtctgcaaag

SEQ ID NO: 10868 - DNA, 20 bp, synthetic construct
  misc_feature 1..20: note = Description of Artificial Sequence: Synthetic oligonucleotide
  source 1..20: mol_type = other DNA
ccagctgaggtctgcaaagc

SEQ ID NO: 10869 - DNA, 20 bp, synthetic construct
  misc_feature 1..20: note = Description of Artificial Sequence: Synthetic oligonucleotide
  source 1..20: mol_type = other DNA
cagctgaggtctgcaaagct

SEQ ID NO: 10870 - DNA, 20 bp, synthetic construct
  misc_feature 1..20: note = Description of Artificial Sequence: Synthetic oligonucleotide
  source 1..20: mol_type = other DNA
agctgaggtctgcaaagctg

SEQ ID NO: 10871 - DNA, 20 bp, synthetic construct
  misc_feature 1..20: note = Description of Artificial Sequence: Synthetic oligonucleotide
  source 1..20: mol_type = other DNA
gctgaggtctgcaaagctgc

SEQ ID NO: 10872 - DNA, 20 bp, synthetic construct
  misc_feature 1..20: note = Description of Artificial Sequence: Synthetic oligonucleotide
  source 1..20: mol_type = other DNA
ctgaggtctgcaaagctgca

SEQ ID NO: 10873 - DNA, 20 bp, synthetic construct
  misc_feature 1..20: note = Description of Artificial Sequence: Synthetic oligonucleotide
  source 1..20: mol_type = other DNA
tgaggtctgcaaagctgcag

SEQ ID NO: 10874 - DNA, 20 bp, synthetic construct
  misc_feature 1..20: note = Description of Artificial Sequence: Synthetic oligonucleotide
  source 1..20: mol_type = other DNA
gaggtctgcaaagctgcagc

SEQ ID NO: 10875 - DNA, 20 bp, synthetic construct
  misc_feature 1..20: note = Description of Artificial Sequence: Synthetic oligonucleotide
  source 1..20: mol_type = other DNA
aggtctgcaaagctgcagca

SEQ ID NO: 10876 - DNA, 20 bp, synthetic construct
  misc_feature 1..20: note = Description of Artificial Sequence: Synthetic oligonucleotide
  source 1..20: mol_type = other DNA
ggtctgcaaagctgcagcag

SEQ ID NO: 10877 - DNA, 20 bp, synthetic construct
  misc_feature 1..20: note = Description of Artificial Sequence: Synthetic oligonucleotide
  source 1..20: mol_type = other DNA
gtctgcaaagctgcagcagg

SEQ ID NO: 10878 - DNA, 20 bp, synthetic construct
  misc_feature 1..20: note = Description of Artificial Sequence: Synthetic oligonucleotide
  source 1..20: mol_type = other DNA
tctgcaaagctgcagcaggc

SEQ ID NO: 10879 - DNA, 20 bp, synthetic construct
  misc_feature 1..20: note = Description of Artificial Sequence: Synthetic oligonucleotide
  source 1..20: mol_type = other DNA
ctgcaaagctgcagcaggct

SEQ ID NO: 10880 - DNA, 20 bp, synthetic construct
  misc_feature 1..20: note = Description of Artificial Sequence: Synthetic oligonucleotide
  source 1..20: mol_type = other DNA
tgcaaagctgcagcaggctg

SEQ ID NO: 10881 - DNA, 20 bp, synthetic construct
  misc_feature 1..20: note = Description of Artificial Sequence: Synthetic oligonucleotide
  source 1..20: mol_type = other DNA
gcaaagctgcagcaggctga

SEQ ID NO: 10882 - DNA, 20 bp, synthetic construct
  misc_feature 1..20: note = Description of Artificial Sequence: Synthetic oligonucleotide
  source 1..20: mol_type = other DNA
caaagctgcagcaggctgac

SEQ ID NO: 10883 - DNA, 20 bp, synthetic construct
  misc_feature 1..20: note = Description of Artificial Sequence: Synthetic oligonucleotide
  source 1..20: mol_type = other DNA
aaagctgcagcaggctgact

SEQ ID NO: 10884 - DNA, 20 bp, synthetic construct
  misc_feature 1..20: note = Description of Artificial Sequence: Synthetic oligonucleotide
  source 1..20: mol_type = other DNA
aagctgcagcaggctgactg

SEQ ID NO: 10885 - DNA, 20 bp, synthetic construct
  misc_feature 1..20: note = Description of Artificial Sequence: Synthetic oligonucleotide
  source 1..20: mol_type = other DNA
agctgcagcaggctgactga

SEQ ID NO: 10886 - DNA, 20 bp, synthetic construct
  misc_feature 1..20: note = Description of Artificial Sequence: Synthetic oligonucleotide
  source 1..20: mol_type = other DNA
gctgcagcaggctgactgaa

SEQ ID NO: 10887 - DNA, 20 bp, synthetic construct
  misc_feature 1..20: note = Description of Artificial Sequence: Synthetic oligonucleotide
  source 1..20: mol_type = other DNA
ctgcagcaggctgactgaac

SEQ ID NO: 10888 - DNA, 20 bp, synthetic construct
  misc_feature 1..20: note = Description of Artificial Sequence: Synthetic oligonucleotide
  source 1..20: mol_type = other DNA
tgcagcaggctgactgaacc

SEQ ID NO: 10889 - DNA, 20 bp, synthetic construct
  misc_feature 1..20: note = Description of Artificial Sequence: Synthetic oligonucleotide
  source 1..20: mol_type = other DNA
gcagcaggctgactgaacct

SEQ ID NO: 10890 - DNA, 20 bp, synthetic construct
  misc_feature 1..20: note = Description of Artificial Sequence: Synthetic oligonucleotide
  source 1..20: mol_type = other DNA
cagcaggctgactgaacctt

SEQ ID NO: 10891 - DNA, 20 bp, synthetic construct
  misc_feature 1..20: note = Description of Artificial Sequence: Synthetic oligonucleotide
  source 1..20: mol_type = other DNA
agcaggctgactgaacctta

SEQ ID NO: 10892 - DNA, 20 bp, synthetic construct
  misc_feature 1..20: note = Description of Artificial Sequence: Synthetic oligonucleotide
  source 1..20: mol_type = other DNA
gcaggctgactgaaccttac

SEQ ID NO: 10893 - DNA, 20 bp, synthetic construct
  misc_feature 1..20: note = Description of Artificial Sequence: Synthetic oligonucleotide
  source 1..20: mol_type = other DNA
caggctgactgaaccttacg

SEQ ID NO: 10894 - DNA, 20 bp, synthetic construct
  misc_feature 1..20: note = Description of Artificial Sequence: Synthetic oligonucleotide
  source 1..20: mol_type = other DNA
aggctgactgaaccttacgc

SEQ ID NO: 10895 - DNA, 20 bp, synthetic construct
  misc_feature 1..20: note = Description of Artificial Sequence: Synthetic oligonucleotide
  source 1..20: mol_type = other DNA
ggctgactgaaccttacgct

SEQ ID NO: 10896 - DNA, 20 bp, synthetic construct
  misc_feature 1..20: note = Description of Artificial Sequence: Synthetic oligonucleotide
  source 1..20: mol_type = other DNA
gctgactgaaccttacgctt

SEQ ID NO: 10897 - DNA, 20 bp, synthetic construct
  misc_feature 1..20: note = Description of Artificial Sequence: Synthetic oligonucleotide
  source 1..20: mol_type = other DNA
ctgactgaaccttacgcttt

SEQ ID NO: 10898 - DNA, 20 bp, synthetic construct
  misc_feature 1..20: note = Description of Artificial Sequence: Synthetic oligonucleotide
  source 1..20: mol_type = other DNA
tgactgaaccttacgctttc

SEQ ID NO: 10899 - DNA, 20 bp, synthetic construct
  misc_feature 1..20: note = Description of Artificial Sequence: Synthetic oligonucleotide
  source 1..20: mol_type = other DNA
gactgaaccttacgctttca

SEQ ID NO: 10900 - DNA, 20 bp, synthetic construct
  misc_feature 1..20: note = Description of Artificial Sequence: Synthetic oligonucleotide
  source 1..20: mol_type = other DNA
actgaaccttacgctttcac

SEQ ID NO: 10901 - DNA, 20 bp, synthetic construct
  misc_feature 1..20: note = Description of Artificial Sequence: Synthetic oligonucleotide
  source 1..20: mol_type = other DNA
ctgaaccttacgctttcact

SEQ ID NO: 10902 - DNA, 20 bp, synthetic construct
  misc_feature 1..20: note = Description of Artificial Sequence: Synthetic oligonucleotide
  source 1..20: mol_type = other DNA
tgaaccttacgctttcactc

SEQ ID NO: 10903 - DNA, 20 bp, synthetic construct
  misc_feature 1..20: note = Description of Artificial Sequence: Synthetic oligonucleotide
  source 1..20: mol_type = other DNA
gaaccttacgctttcactct

SEQ ID NO: 10904 - DNA, 20 bp, synthetic construct
  misc_feature 1..20: note = Description of Artificial Sequence: Synthetic oligonucleotide
  source 1..20: mol_type = other DNA
aaccttacgctttcactctg

SEQ ID NO: 10905 - DNA, 20 bp, synthetic construct
  misc_feature 1..20: note = Description of Artificial Sequence: Synthetic oligonucleotide
  source 1..20: mol_type = other DNA
accttacgctttcactctga

SEQ ID NO: 10906 - DNA, 20 bp, synthetic construct
  misc_feature 1..20: note = Description of Artificial Sequence: Synthetic oligonucleotide
  source 1..20: mol_type = other DNA
ccttacgctttcactctgag

SEQ ID NO: 10907 - DNA, 20 bp, synthetic construct
  misc_feature 1..20: note = Description of Artificial Sequence: Synthetic oligonucleotide
  source 1..20: mol_type = other DNA
cttacgctttcactctgagg

SEQ ID NO: 10908 - DNA, 20 bp, synthetic construct
  misc_feature 1..20: note = Description of Artificial Sequence: Synthetic oligonucleotide
  source 1..20: mol_type = other DNA
ttacgctttcactctgaggg

SEQ ID NO: 10909 - DNA, 20 bp, synthetic construct
  misc_feature 1..20: note = Description of Artificial Sequence: Synthetic oligonucleotide
  source 1..20: mol_type = other DNA
tacgctttcactctgagggc

SEQ ID NO: 10910 - DNA, 20 bp, synthetic construct
  misc_feature 1..20: note = Description of Artificial Sequence: Synthetic oligonucleotide
  source 1..20: mol_type = other DNA
acgctttcactctgagggcc

SEQ ID NO: 10911 - DNA, 20 bp, synthetic construct
  misc_feature 1..20: note = Description of Artificial Sequence: Synthetic oligonucleotide
  source 1..20: mol_type = other DNA
cgctttcactctgagggcct

SEQ ID NO: 10912 - DNA, 20 bp, synthetic construct
  misc_feature 1..20: note = Description of Artificial Sequence: Synthetic oligonucleotide
  source 1..20: mol_type = other DNA
gctttcactctgagggcctc

SEQ ID NO: 10913 - DNA, 20 bp, synthetic construct
  misc_feature 1..20: note = Description of Artificial Sequence: Synthetic oligonucleotide
  source 1..20: mol_type = other DNA
ctttcactctgagggcctcg

SEQ ID NO: 10914 - DNA, 20 bp, synthetic construct
  misc_feature 1..20: note = Description of Artificial Sequence: Synthetic oligonucleotide
  source 1..20: mol_type = other DNA
tttcactctgagggcctcgc

SEQ ID NO: 10915 - DNA, 20 bp, synthetic construct
  misc_feature 1..20: note = Description of Artificial Sequence: Synthetic oligonucleotide
  source 1..20: mol_type = other DNA
ttcactctgagggcctcgcc

SEQ ID NO: 10916 - DNA, 20 bp, synthetic construct
  misc_feature 1..20: note = Description of Artificial Sequence: Synthetic oligonucleotide
  source 1..20: mol_type = other DNA
tcactctgagggcctcgcca

SEQ ID NO: 10917 - DNA, 20 bp, synthetic construct
  misc_feature 1..20: note = Description of Artificial Sequence: Synthetic oligonucleotide
  source 1..20: mol_type = other DNA
cactctgagggcctcgccac

SEQ ID NO: 10918 - DNA, 20 bp, synthetic construct
  misc_feature 1..20: note = Description of Artificial Sequence: Synthetic oligonucleotide
  source 1..20: mol_type = other DNA
actctgagggcctcgccact

SEQ ID NO: 10919 - DNA, 20 bp, synthetic construct
  misc_feature 1..20: note = Description of Artificial Sequence: Synthetic oligonucleotide
  source 1..20: mol_type = other DNA
ctctgagggcctcgccactt

SEQ ID NO: 10920 - DNA, 20 bp, synthetic construct
  misc_feature 1..20: note = Description of Artificial Sequence: Synthetic oligonucleotide
  source 1..20: mol_type = other DNA
tctgagggcctcgccacttt

SEQ ID NO: 10921 - DNA, 20 bp, synthetic construct
  misc_feature 1..20: note = Description of Artificial Sequence: Synthetic oligonucleotide
  source 1..20: mol_type = other DNA
ctgagggcctcgccactttg

SEQ ID NO: 10922 - DNA, 20 bp, synthetic construct
  misc_feature 1..20: note = Description of Artificial Sequence: Synthetic oligonucleotide
  source 1..20: mol_type = other DNA
tgagggcctcgccactttgt

SEQ ID NO: 10923 - DNA, 20 bp, synthetic construct
  misc_feature 1..20: note = Description of Artificial Sequence: Synthetic oligonucleotide
  source 1..20: mol_type = other DNA
gagggcctcgccactttgtt

SEQ ID NO: 10924 - DNA, 20 bp, synthetic construct
  misc_feature 1..20: note = Description of Artificial Sequence: Synthetic oligonucleotide
  source 1..20: mol_type = other DNA
agggcctcgccactttgttg

SEQ ID NO: 10925 - DNA, 20 bp, synthetic construct
  misc_feature 1..20: note = Description of Artificial Sequence: Synthetic oligonucleotide
  source 1..20: mol_type = other DNA
gggcctcgccactttgttgt

SEQ ID NO: 10926 - DNA, 20 bp, synthetic construct
  misc_feature 1..20: note = Description of Artificial Sequence: Synthetic oligonucleotide
  source 1..20: mol_type = other DNA
ggcctcgccactttgttgtt

SEQ ID NO: 10927 - DNA, 20 bp, synthetic construct
  misc_feature 1..20: note = Description of Artificial Sequence: Synthetic oligonucleotide
  source 1..20: mol_type = other DNA
gcctcgccactttgttgttt

SEQ ID NO: 10928 - DNA, 20 bp, synthetic construct
  misc_feature 1..20: note = Description of Artificial Sequence: Synthetic oligonucleotide
  source 1..20: mol_type = other DNA
cctcgccactttgttgtttt

SEQ ID NO: 10929 - DNA, 20 bp, synthetic construct
  misc_feature 1..20: note = Description of Artificial Sequence: Synthetic oligonucleotide
  source 1..20: mol_type = other DNA
ctcgccactttgttgttttc

SEQ ID NO: 10930 - DNA, 20 bp, synthetic construct
  misc_feature 1..20: note = Description of Artificial Sequence: Synthetic oligonucleotide
  source 1..20: mol_type = other DNA
tcgccactttgttgttttct

SEQ ID NO: 10931 - DNA, 20 bp, synthetic construct
  misc_feature 1..20: note = Description of Artificial Sequence: Synthetic oligonucleotide
  source 1..20: mol_type = other DNA
cgccactttgttgttttctc

SEQ ID NO: 10932 - DNA, 20 bp, synthetic construct
  misc_feature 1..20: note = Description of Artificial Sequence: Synthetic oligonucleotide
  source 1..20: mol_type = other DNA
gccactttgttgttttctct

SEQ ID NO: 10933 - DNA, 20 bp, synthetic construct
  misc_feature 1..20: note = Description of Artificial Sequence: Synthetic oligonucleotide
  source 1..20: mol_type = other DNA
ccactttgttgttttctctc

SEQ ID NO: 10934 - DNA, 20 bp, synthetic construct
  misc_feature 1..20: note = Description of Artificial Sequence: Synthetic oligonucleotide
  source 1..20: mol_type = other DNA
cactttgttgttttctctct

SEQ ID NO: 10935 - DNA, 20 bp, synthetic construct
  misc_feature 1..20: note = Description of Artificial Sequence: Synthetic oligonucleotide
  source 1..20: mol_type = other DNA
actttgttgttttctctctt

SEQ ID NO: 10936 - DNA, 20 bp, synthetic construct
  misc_feature 1..20: note = Description of Artificial Sequence: Synthetic oligonucleotide
  source 1..20: mol_type = other DNA
ctttgttgttttctctcttt

SEQ ID NO: 10937 - DNA, 20 bp, synthetic construct
  misc_feature 1..20: note = Description of Artificial Sequence: Synthetic oligonucleotide
  source 1..20: mol_type = other DNA
tttgttgttttctctctttc

SEQ ID NO: 10938 - DNA, 20 bp, synthetic construct
  misc_feature 1..20: note = Description of Artificial Sequence: Synthetic oligonucleotide
  source 1..20: mol_type = other DNA
ttgttgttttctctctttcc

SEQ ID NO: 10939 - DNA, 20 bp, synthetic construct
  misc_feature 1..20: note = Description of Artificial Sequence: Synthetic oligonucleotide
  source 1..20: mol_type = other DNA
tgttgttttctctctttcct

SEQ ID NO: 10940 - DNA, 20 bp, synthetic construct
  misc_feature 1..20: note = Description of Artificial Sequence: Synthetic oligonucleotide
  source 1..20: mol_type = other DNA
gttgttttctctctttcctt

SEQ ID NO: 10941 - DNA, 20 bp, synthetic construct
  misc_feature 1..20: note = Description of Artificial Sequence: Synthetic oligonucleotide
  source 1..20: mol_type = other DNA
ttgttttctctctttccttg

SEQ ID NO: 10942 - DNA, 20 bp, synthetic construct
  misc_feature 1..20: note = Description of Artificial Sequence: Synthetic oligonucleotide
  source 1..20: mol_type = other DNA
tgttttctctctttccttgc

SEQ ID NO: 10943 - DNA, 20 bp, synthetic construct
  misc_feature 1..20: note = Description of Artificial Sequence: Synthetic oligonucleotide
  source 1..20: mol_type = other DNA
gttttctctctttccttgct

SEQ ID NO: 10944 - DNA, 20 bp, synthetic construct
  misc_feature 1..20: note = Description of Artificial Sequence: Synthetic oligonucleotide
  source 1..20: mol_type = other DNA
ttttctctctttccttgctc

SEQ ID NO: 10945 - DNA, 20 bp, synthetic construct
  misc_feature 1..20: note = Description of Artificial Sequence: Synthetic oligonucleotide
  source 1..20: mol_type = other DNA
tttctctctttccttgctct

SEQ ID NO: 10946 - DNA, 20 bp, synthetic construct
  misc_feature 1..20: note = Description of Artificial Sequence: Synthetic oligonucleotide
  source 1..20: mol_type = other DNA
ttctctctttccttgctctt

SEQ ID NO: 10947 - DNA, 20 bp, synthetic construct
  misc_feature 1..20: note = Description of Artificial Sequence: Synthetic oligonucleotide
  source 1..20: mol_type = other DNA
tctctctttccttgctcttt

SEQ ID NO: 10948 - DNA, 20 bp, synthetic construct
  misc_feature 1..20: note = Description of Artificial Sequence: Synthetic oligonucleotide
  source 1..20: mol_type = other DNA
ctctctttccttgctctttg

SEQ ID NO: 10949 - DNA, 20 bp, synthetic construct
  misc_feature 1..20: note = Description of Artificial Sequence: Synthetic oligonucleotide
  source 1..20: mol_type = other DNA
tctctttccttgctctttgc

SEQ ID NO: 10950 - DNA, 20 bp, synthetic construct
  misc_feature 1..20: note = Description of Artificial Sequence: Synthetic oligonucleotide
  source 1..20: mol_type = other DNA
ctctttccttgctctttgct

SEQ ID NO: 10951 - DNA, 20 bp, synthetic construct
  misc_feature 1..20: note = Description of Artificial Sequence: Synthetic oligonucleotide
  source 1..20: mol_type = other DNA
tctttccttgctctttgcta

SEQ ID NO: 10952 - DNA, 20 bp, synthetic construct
  misc_feature 1..20: note = Description of Artificial Sequence: Synthetic oligonucleotide
  source 1..20: mol_type = other DNA
ctttccttgctctttgctag

SEQ ID NO: 10953 - DNA, 20 bp, synthetic construct
  misc_feature 1..20: note = Description of Artificial Sequence: Synthetic oligonucleotide
  source 1..20: mol_type = other DNA
tttccttgctctttgctagc

SEQ ID NO: 10954 - DNA, 20 bp, synthetic construct
  misc_feature 1..20: note = Description of Artificial Sequence: Synthetic oligonucleotide
  source 1..20: mol_type = other DNA
ttccttgctctttgctagcc

SEQ ID NO: 10955 - DNA, 20 bp, synthetic construct
  misc_feature 1..20: note = Description of Artificial Sequence: Synthetic oligonucleotide
  source 1..20: mol_type = other DNA
tccttgctctttgctagcct

SEQ ID NO: 10956 - DNA, 20 bp, synthetic construct
  misc_feature 1..20: note = Description of Artificial Sequence: Synthetic oligonucleotide
  source 1..20: mol_type = other DNA
ccttgctctttgctagcctt

SEQ ID NO: 10957 - DNA, 20 bp, synthetic construct
  misc_feature 1..20: note = Description of Artificial Sequence: Synthetic oligonucleotide
  source 1..20: mol_type = other DNA
cttgctctttgctagccttt

SEQ ID NO: 10958 - DNA, 20 bp, synthetic construct
  misc_feature 1..20: note = Description of Artificial Sequence: Synthetic oligonucleotide
  source 1..20: mol_type = other DNA
ttgctctttgctagcctttc

SEQ ID NO: 10959 - DNA, 20 bp, synthetic construct
  misc_feature 1..20: note = Description of Artificial Sequence: Synthetic oligonucleotide
  source 1..20: mol_type = other DNA
tgctctttgctagcctttct

SEQ ID NO: 10960 - DNA, 20 bp, synthetic construct
  misc_feature 1..20: note = Description of Artificial Sequence: Synthetic oligonucleotide
  source 1..20: mol_type = other DNA
gctctttgctagcctttctc

SEQ ID NO: 10961 - DNA, 20 bp, synthetic construct
  misc_feature 1..20: note = Description of Artificial Sequence: Synthetic oligonucleotide
  source 1..20: mol_type = other DNA
ctctttgctagcctttctca

SEQ ID NO: 10962 - DNA, 20 bp, synthetic construct
  misc_feature 1..20: note = Description of Artificial Sequence: Synthetic oligonucleotide
  source 1..20: mol_type = other DNA
tctttgctagcctttctcaa

SEQ ID NO: 10963 - DNA, 20 bp, synthetic construct
  misc_feature 1..20: note = Description of Artificial Sequence: Synthetic oligonucleotide
  source 1..20: mol_type = other DNA
ctttgctagcctttctcaaa

SEQ ID NO: 10964 - DNA, 20 bp, synthetic construct
  misc_feature 1..20: note = Description of Artificial Sequence: Synthetic oligonucleotide
  source 1..20: mol_type = other DNA
tttgctagcctttctcaaag

SEQ ID NO: 10965 - DNA, 20 bp, synthetic construct
  misc_feature 1..20: note = Description of Artificial Sequence: Synthetic oligonucleotide
  source 1..20: mol_type = other DNA
ttgctagcctttctcaaagc

SEQ ID NO: 10966 - DNA, 20 bp, synthetic construct
  misc_feature 1..20: note = Description of Artificial Sequence: Synthetic oligonucleotide
  source 1..20: mol_type = other DNA
tgctagcctttctcaaagct

SEQ ID NO: 10967 - DNA, 20 bp, synthetic construct
  misc_feature 1..20: note = Description of Artificial Sequence: Synthetic oligonucleotide
  source 1..20: mol_type = other DNA
gctagcctttctcaaagctt

SEQ ID NO: 10968 - DNA, 20 bp, synthetic construct
  misc_feature 1..20: note = Description of Artificial Sequence: Synthetic oligonucleotide
  source 1..20: mol_type = other DNA
ctagcctttctcaaagcttg

SEQ ID NO: 10969 - DNA, 20 bp, synthetic construct
  misc_feature 1..20: note = Description of Artificial Sequence: Synthetic oligonucleotide
  source 1..20: mol_type = other DNA
tagcctttctcaaagcttga

SEQ ID NO: 10970 - DNA, 20 bp, synthetic construct
  misc_feature 1..20: note = Description of Artificial Sequence: Synthetic oligonucleotide
  source 1..20: mol_type = other DNA
agcctttctcaaagcttgag

SEQ ID NO: 10971 - DNA, 20 bp, synthetic construct
  misc_feature 1..20: note = Description of Artificial Sequence: Synthetic oligonucleotide
  source 1..20: mol_type = other DNA
gcctttctcaaagcttgagt

SEQ ID NO: 10972 - DNA, 20 bp, synthetic construct
  misc_feature 1..20: note = Description of Artificial Sequence: Synthetic oligonucleotide
  source 1..20: mol_type = other DNA
cctttctcaaagcttgagtc

SEQ ID NO: 10973 - DNA, 20 bp, synthetic construct
  misc_feature 1..20: note = Description of Artificial Sequence: Synthetic oligonucleotide
  source 1..20: mol_type = other DNA
ctttctcaaagcttgagtct

SEQ ID NO: 10974 - DNA, 20 bp, synthetic construct
  misc_feature 1..20: note = Description of Artificial Sequence: Synthetic oligonucleotide
  source 1..20: mol_type = other DNA
tttctcaaagcttgagtctc

SEQ ID NO: 10975 - DNA, 20 bp, synthetic construct
  misc_feature 1..20: note = Description of Artificial Sequence: Synthetic oligonucleotide
  source 1..20: mol_type = other DNA
ttctcaaagcttgagtctct

SEQ ID NO: 10976 - DNA, 20 bp, synthetic construct
  misc_feature 1..20: note = Description of Artificial Sequence: Synthetic oligonucleotide
  source 1..20: mol_type = other DNA
tctcaaagcttgagtctctg

SEQ ID NO: 10977 - DNA, 20 bp, synthetic construct
  misc_feature 1..20: note = Description of Artificial Sequence: Synthetic oligonucleotide
  source 1..20: mol_type = other DNA
ctcaaagcttgagtctctga

SEQ ID NO: 10978 - DNA, 20 bp, synthetic construct
  misc_feature 1..20: note = Description of Artificial Sequence: Synthetic oligonucleotide
  source 1..20: mol_type = other DNA
tcaaagcttgagtctctgac

SEQ ID NO: 10979 - DNA, 20 bp, synthetic construct
  misc_feature 1..20: note = Description of Artificial Sequence: Synthetic oligonucleotide
  source 1..20: mol_type = other DNA
caaagcttgagtctctgaca

SEQ ID NO: 10980 - DNA, 20 bp, synthetic construct
  misc_feature 1..20: note = Description of Artificial Sequence: Synthetic oligonucleotide
  source 1..20: mol_type = other DNA
aaagcttgagtctctgacag

SEQ ID NO: 10981 - DNA, 20 bp, synthetic construct
  misc_feature 1..20: note = Description of Artificial Sequence: Synthetic oligonucleotide
  source 1..20: mol_type = other DNA
aagcttgagtctctgacagg

SEQ ID NO: 10982 - DNA, 20 bp, synthetic construct
  misc_feature 1..20: note = Description of Artificial Sequence: Synthetic oligonucleotide
  source 1..20: mol_type = other DNA
agcttgagtctctgacaggg

SEQ ID NO: 10983 - DNA, 20 bp, synthetic construct
  misc_feature 1..20: note = Description of Artificial Sequence: Synthetic oligonucleotide
  source 1..20: mol_type = other DNA
gcttgagtctctgacagggg

SEQ ID NO: 10984 - DNA, 20 bp, synthetic construct
  misc_feature 1..20: note = Description of Artificial Sequence: Synthetic oligonucleotide
  source 1..20: mol_type = other DNA
cttgagtctctgacagggga

SEQ ID NO: 10985 - DNA, 20 bp, synthetic construct
  misc_feature 1..20: note = Description of Artificial Sequence: Synthetic oligonucleotide
  source 1..20: mol_type = other DNA
ttgagtctctgacaggggag

SEQ ID NO: 10986 - DNA, 20 bp, synthetic construct
  misc_feature 1..20: note = Description of Artificial Sequence: Synthetic oligonucleotide
  source 1..20: mol_type = other DNA
tgagtctctgacaggggagc

SEQ ID NO: 10987 - DNA, 20 bp, synthetic construct
  misc_feature 1..20: note = Description of Artificial Sequence: Synthetic oligonucleotide
  source 1..20: mol_type = other DNA
gagtctctgacaggggagct

SEQ ID NO: 10988 - DNA, 20 bp, synthetic construct
  misc_feature 1..20: note = Description of Artificial Sequence: Synthetic oligonucleotide
  source 1..20: mol_type = other DNA
agtctctgacaggggagctg

SEQ ID NO: 10989 - DNA, 20 bp, synthetic construct
  misc_feature 1..20: note = Description of Artificial Sequence: Synthetic oligonucleotide
  source 1..20: mol_type = other DNA
gtctctgacaggggagctga

SEQ ID NO: 10990 - DNA, 20 bp, synthetic construct
  misc_feature 1..20: note = Description of Artificial Sequence: Synthetic oligonucleotide
  source 1..20: mol_type = other DNA
tctctgacaggggagctgaa

SEQ ID NO: 10991 - DNA, 20 bp, synthetic construct
  misc_feature 1..20: note = Description of Artificial Sequence: Synthetic oligonucleotide
  source 1..20: mol_type = other DNA
ctctgacaggggagctgaat

SEQ ID NO: 10992 - DNA, 20 bp, synthetic construct
  misc_feature 1..20: note = Description of Artificial Sequence: Synthetic oligonucleotide
  source 1..20: mol_type = other DNA
tctgacaggggagctgaatg

SEQ ID NO: 10993 - DNA, 20 bp, synthetic construct
  misc_feature 1..20: note = Description of Artificial Sequence: Synthetic oligonucleotide
  source 1..20: mol_type = other DNA
ctgacaggggagctgaatgg

SEQ ID NO: 10994 - DNA, 20 bp, synthetic construct
  misc_feature 1..20: note = Description of Artificial Sequence: Synthetic oligonucleotide
  source 1..20: mol_type = other DNA
tgacaggggagctgaatggg

SEQ ID NO: 10995 - DNA, 20 bp, synthetic construct
  misc_feature 1..20: note = Description of Artificial Sequence: Synthetic oligonucleotide
  source 1..20: mol_type = other DNA
gacaggggagctgaatgggt

SEQ ID NO: 10996 - DNA, 20 bp, synthetic construct
  misc_feature 1..20: note = Description of Artificial Sequence: Synthetic oligonucleotide
  source 1..20: mol_type = other DNA
acaggggagctgaatgggta

SEQ ID NO: 10997 - DNA, 20 bp, synthetic construct
  misc_feature 1..20: note = Description of Artificial Sequence: Synthetic oligonucleotide
  source 1..20: mol_type = other DNA
caggggagctgaatgggtag

SEQ ID NO: 10998 - DNA, 20 bp, synthetic construct
  misc_feature 1..20: note = Description of Artificial Sequence: Synthetic oligonucleotide
  source 1..20: mol_type = other DNA
aggggagctgaatgggtagc

SEQ ID NO: 10999 - DNA, 20 bp, synthetic construct
  misc_feature 1..20: note = Description of Artificial Sequence: Synthetic oligonucleotide
  source 1..20: mol_type = other DNA
ggggagctgaatgggtagcc

SEQ ID NO: 11000 - DNA, 20 bp, synthetic construct
  misc_feature 1..20: note = Description of Artificial Sequence: Synthetic oligonucleotide
  source 1..20: mol_type = other DNA
gggagctgaatgggtagcct

SEQ ID NO: 11001 - DNA, 20 bp, synthetic construct
  misc_feature 1..20: note = Description of Artificial Sequence: Synthetic oligonucleotide
  source 1..20: mol_type = other DNA
ggagctgaatgggtagccta

SEQ ID NO: 11002 - DNA, 20 bp, synthetic construct
  misc_feature 1..20: note = Description of Artificial Sequence: Synthetic oligonucleotide
  source 1..20: mol_type = other DNA
gagctgaatgggtagcctat

SEQ ID NO: 11003 - DNA, 20 bp, synthetic construct
  misc_feature 1..20: note = Description of Artificial Sequence: Synthetic oligonucleotide
  source 1..20: mol_type = other DNA
agctgaatgggtagcctata

SEQ ID NO: 11004 - DNA, 20 bp, synthetic construct
  misc_feature 1..20: note = Description of Artificial Sequence: Synthetic oligonucleotide
  source 1..20: mol_type = other DNA
gctgaatgggtagcctatag

SEQ ID NO: 11005 - DNA, 20 bp, synthetic construct
  misc_feature 1..20: note = Description of Artificial Sequence: Synthetic oligonucleotide
  source 1..20: mol_type = other DNA
ctgaatgggtagcctatagc

SEQ ID NO: 11006 - DNA, 20 bp, synthetic construct
  misc_feature 1..20: note = Description of Artificial Sequence: Synthetic oligonucleotide
  source 1..20: mol_type = other DNA
tgaatgggtagcctatagct

SEQ ID NO: 11007 - DNA, 20 bp, synthetic construct
  misc_feature 1..20: note = Description of Artificial Sequence: Synthetic oligonucleotide
  source 1..20: mol_type = other DNA
gaatgggtagcctatagctt

SEQ ID NO: 11008 - DNA, 20 bp, synthetic construct
  misc_feature 1..20: note = Description of Artificial Sequence: Synthetic oligonucleotide
  source 1..20: mol_type = other DNA
aatgggtagcctatagcttt

SEQ ID NO: 11009 - DNA, 20 bp, synthetic construct
  misc_feature 1..20: note = Description of Artificial Sequence: Synthetic oligonucleotide
  source 1..20: mol_type = other DNA
atgggtagcctatagctttc

SEQ ID NO: 11010 - DNA, 20 bp, synthetic construct
  misc_feature 1..20: note = Description of Artificial Sequence: Synthetic oligonucleotide
  source 1..20: mol_type = other DNA
tgggtagcctatagctttcc

SEQ ID NO: 11011 - DNA, 20 bp, synthetic construct
  misc_feature 1..20: note = Description of Artificial Sequence: Synthetic oligonucleotide
  source 1..20: mol_type = other DNA
gggtagcctatagctttcct

SEQ ID NO: 11012 - DNA, 20 bp, synthetic construct
  misc_feature 1..20: note = Description of Artificial Sequence: Synthetic oligonucleotide
  source 1..20: mol_type = other DNA
ggtagcctatagctttcctt

SEQ ID NO: 11013 - DNA, 20 bp, synthetic construct
  misc_feature 1..20: note = Description of Artificial Sequence: Synthetic oligonucleotide
  source 1..20: mol_type = other DNA
gtagcctatagctttccttc

SEQ ID NO: 11014 - DNA, 20 bp, synthetic construct
  misc_feature 1..20: note = Description of Artificial Sequence: Synthetic oligonucleotide
  source 1..20: mol_type = other DNA
tagcctatagctttccttcc

SEQ ID NO: 11015 - DNA, 20 bp, synthetic construct
  misc_feature 1..20: note = Description of Artificial Sequence: Synthetic oligonucleotide
  source 1..20: mol_type = other DNA
agcctatagctttccttcca

SEQ ID NO: 11016 - DNA, 20 bp, synthetic construct
  misc_feature 1..20: note = Description of Artificial Sequence: Synthetic oligonucleotide
  source 1..20: mol_type = other DNA
gcctatagctttccttccaa

SEQ ID NO: 11017 - DNA, 20 bp, synthetic construct
  misc_feature 1..20: note = Description of Artificial Sequence: Synthetic oligonucleotide
  source 1..20: mol_type = other DNA
cctatagctttccttccaag

SEQ ID NO: 11018 - DNA, 20 bp, synthetic construct
  misc_feature 1..20: note = Description of Artificial Sequence: Synthetic oligonucleotide
  source 1..20: mol_type = other DNA
ctatagctttccttccaagc

SEQ ID NO: 11019 - DNA, 20 bp, synthetic construct
  misc_feature 1..20: note = Description of Artificial Sequence: Synthetic oligonucleotide
  source 1..20: mol_type = other DNA
tatagctttccttccaagcc

SEQ ID NO: 11020 - DNA, 20 bp, synthetic construct
  misc_feature 1..20: note = Description of Artificial Sequence: Synthetic oligonucleotide
  source 1..20: mol_type = other DNA
atagctttccttccaagccc

SEQ ID NO: 11021 - DNA, 20 bp, synthetic construct
  misc_feature 1..20: note = Description of Artificial Sequence: Synthetic oligonucleotide
  source 1..20: mol_type = other DNA
tagctttccttccaagcccg

SEQ ID NO: 11022 - DNA, 20 bp, synthetic construct
  misc_feature 1..20: note = Description of Artificial Sequence: Synthetic oligonucleotide
  source 1..20: mol_type = other DNA
agctttccttccaagcccga

SEQ ID NO: 11023 - DNA, 20 bp, synthetic construct
  misc_feature 1..20: note = Description of Artificial Sequence: Synthetic oligonucleotide
  source 1..20: mol_type = other DNA
gctttccttccaagcccgaa

SEQ ID NO: 11024 - DNA, 20 bp, synthetic construct
  misc_feature 1..20: note = Description of Artificial Sequence: Synthetic oligonucleotide
  source 1..20: mol_type = other DNA
ctttccttccaagcccgaat

SEQ ID NO: 11025 - DNA, 20 bp, synthetic construct
  misc_feature 1..20: note = Description of Artificial Sequence: Synthetic oligonucleotide
  source 1..20: mol_type = other DNA
tttccttccaagcccgaatg

SEQ ID NO: 11026 - DNA, 20 bp, synthetic construct
  misc_feature 1..20: note = Description of Artificial Sequence: Synthetic oligonucleotide
  source 1..20: mol_type = other DNA
ttccttccaagcccgaatgc

SEQ ID NO: 11027 - DNA, 20 bp, synthetic construct
  misc_feature 1..20: note = Description of Artificial Sequence: Synthetic oligonucleotide
  source 1..20: mol_type = other DNA
tccttccaagcccgaatgct

SEQ ID NO: 11028 - DNA, 20 bp, synthetic construct
  misc_feature 1..20: note = Description of Artificial Sequence: Synthetic oligonucleotide
  source 1..20: mol_type = other DNA
ccttccaagcccgaatgctc

SEQ ID NO: 11029 - DNA, 20 bp, synthetic construct
  misc_feature 1..20: note = Description of Artificial Sequence: Synthetic oligonucleotide
  source 1..20: mol_type = other DNA
cttccaagcccgaatgctcc

SEQ ID NO: 11030 - DNA, 20 bp, synthetic construct
  misc_feature 1..20: note = Description of Artificial Sequence: Synthetic oligonucleotide
  source 1..20: mol_type = other DNA
ttccaagcccgaatgctcca

SEQ ID NO: 11031 - DNA, 20 bp, synthetic construct
  misc_feature 1..20: note = Description of Artificial Sequence: Synthetic oligonucleotide
  source 1..20: mol_type = other DNA
tccaagcccgaatgctccac

SEQ ID NO: 11032 - DNA, 20 bp, synthetic construct
  misc_feature 1..20: note = Description of Artificial Sequence: Synthetic oligonucleotide
  source 1..20: mol_type = other DNA
ccaagcccgaatgctccaca

SEQ ID NO: 11033 - DNA, 20 bp, synthetic construct
  misc_feature 1..20: note = Description of Artificial Sequence: Synthetic oligonucleotide
  source 1..20: mol_type = other DNA
caagcccgaatgctccacaa

SEQ ID NO: 11034 - DNA, 20 bp, synthetic construct
  misc_feature 1..20: note = Description of Artificial Sequence: Synthetic oligonucleotide
  source 1..20: mol_type = other DNA
aagcccgaatgctccacaag

SEQ ID NO: 11035 - DNA, 20 bp, synthetic construct
  misc_feature 1..20: note = Description of Artificial Sequence: Synthetic oligonucleotide
  source 1..20: mol_type = other DNA
agcccgaatgctccacaagt

SEQ ID NO: 11036 - DNA, 20 bp, synthetic construct
  misc_feature 1..20: note = Description of Artificial Sequence: Synthetic oligonucleotide
  source 1..20: mol_type = other DNA
gcccgaatgctccacaagtc

SEQ ID NO: 11037 - DNA, 20 bp, synthetic construct
  misc_feature 1..20: note = Description of Artificial Sequence: Synthetic oligonucleotide
  source 1..20: mol_type = other DNA
cccgaatgctccacaagtca

SEQ ID NO: 11038 - DNA, 20 bp, synthetic construct
  misc_feature 1..20: note = Description of Artificial Sequence: Synthetic oligonucleotide
  source 1..20: mol_type = other DNA
ccgaatgctccacaagtcag

SEQ ID NO: 11039 - DNA, 20 bp, synthetic construct
  misc_feature 1..20: note = Description of Artificial Sequence: Synthetic oligonucleotide
  source 1..20: mol_type = other DNA
cgaatgctccacaagtcagc

SEQ ID NO: 11040 - DNA, 20 bp, synthetic construct
  misc_feature 1..20: note = Description of Artificial Sequence: Synthetic oligonucleotide
  source 1..20: mol_type = other DNA
gaatgctccacaagtcagca

SEQ ID NO: 11041 - DNA, 20 bp, synthetic construct
  misc_feature 1..20: note = Description of Artificial Sequence: Synthetic oligonucleotide
  source 1..20: mol_type = other DNA
aatgctccacaagtcagcat

SEQ ID NO: 11042 - DNA, 20 bp, synthetic construct
  misc_feature 1..20: note = Description of Artificial Sequence: Synthetic oligonucleotide
  source 1..20: mol_type = other DNA
atgctccacaagtcagcatc

SEQ ID NO: 11043 - DNA, 20 bp, synthetic construct
  misc_feature 1..20: note = Description of Artificial Sequence: Synthetic oligonucleotide
  source 1..20: mol_type = other DNA
tgctccacaagtcagcatct

SEQ ID NO: 11044 - DNA, 20 bp, synthetic construct
  misc_feature 1..20: note = Description of Artificial Sequence: Synthetic oligonucleotide
  source 1..20: mol_type = other DNA
gctccacaagtcagcatctt

SEQ ID NO: 11045 - DNA, 20 bp, synthetic construct
  misc_feature 1..20: note = Description of Artificial Sequence: Synthetic oligonucleotide
  source 1..20: mol_type = other DNA
ctccacaagtcagcatctta

SEQ ID NO: 11046 - DNA, 20 bp, synthetic construct
  misc_feature 1..20: note = Description of Artificial Sequence: Synthetic oligonucleotide
  source 1..20: mol_type = other DNA
tccacaagtcagcatcttaa

SEQ ID NO: 11047 - DNA, 20 bp, synthetic construct
  misc_feature 1..20: note = Description of Artificial Sequence: Synthetic oligonucleotide
  source 1..20: mol_type = other DNA
ccacaagtcagcatcttaaa

SEQ ID NO: 11048 - DNA, 20 bp, synthetic construct
  misc_feature 1..20: note = Description of Artificial Sequence: Synthetic oligonucleotide
  source 1..20: mol_type = other DNA
cacaagtcagcatcttaaat

SEQ ID NO: 11049 - DNA, 20 bp, synthetic construct
  misc_feature 1..20: note = Description of Artificial Sequence: Synthetic oligonucleotide
  source 1..20: mol_type = other DNA
acaagtcagcatcttaaata

SEQ ID NO: 11050 - DNA, 20 bp, synthetic construct
  misc_feature 1..20: note = Description of Artificial Sequence: Synthetic oligonucleotide
  source 1..20: mol_type = other DNA
caagtcagcatcttaaatat

SEQ ID NO: 11051 - DNA, 20 bp, synthetic construct
  misc_feature 1..20: note = Description of Artificial Sequence: Synthetic oligonucleotide
  source 1..20: mol_type = other DNA
aagtcagcatcttaaatatt

SEQ ID NO: 11052 - DNA, 20 bp, synthetic construct
  misc_feature 1..20: note = Description of Artificial Sequence: Synthetic oligonucleotide
  source 1..20: mol_type = other DNA
agtcagcatcttaaatattg

SEQ ID NO: 11053 - DNA, 20 bp, synthetic construct
  misc_feature 1..20: note = Description of Artificial Sequence: Synthetic oligonucleotide
  source 1..20: mol_type = other DNA
gtcagcatcttaaatattgt

SEQ ID NO: 11054 - DNA, 20 bp, synthetic construct
  misc_feature 1..20: note = Description of Artificial Sequence: Synthetic oligonucleotide
  source 1..20: mol_type = other DNA
tcagcatcttaaatattgtt

SEQ ID NO: 11055 - DNA, 20 bp, synthetic construct
  misc_feature 1..20: note = Description of Artificial Sequence: Synthetic oligonucleotide
  source 1..20: mol_type = other DNA
cagcatcttaaatattgttt

SEQ ID NO: 11056 - DNA, 20 bp, synthetic construct
  misc_feature 1..20: note = Description of Artificial Sequence: Synthetic oligonucleotide
  source 1..20: mol_type = other DNA
agcatcttaaatattgtttg

SEQ ID NO: 11057 - DNA, 20 bp, synthetic construct
  misc_feature 1..20: note = Description of Artificial Sequence: Synthetic oligonucleotide
  source 1..20: mol_type = other DNA
gcatcttaaatattgtttgc

SEQ ID NO: 11058 - DNA, 20 bp, synthetic construct
  misc_feature 1..20: note = Description of Artificial Sequence: Synthetic oligonucleotide
  source 1..20: mol_type = other DNA
catcttaaatattgtttgct

SEQ ID NO: 11059 - DNA, 20 bp, synthetic construct
  misc_feature 1..20: note = Description of Artificial Sequence: Synthetic oligonucleotide
  source 1..20: mol_type = other DNA
atcttaaatattgtttgctg

SEQ ID NO: 11060 - DNA, 20 bp, synthetic construct
  misc_feature 1..20: note = Description of Artificial Sequence: Synthetic oligonucleotide
  source 1..20: mol_type = other DNA
tcttaaatattgtttgctgc

SEQ ID NO: 11061 - DNA, 20 bp, synthetic construct
  misc_feature 1..20: note = Description of Artificial Sequence: Synthetic oligonucleotide
  source 1..20: mol_type = other DNA
cttaaatattgtttgctgcc

SEQ ID NO: 11062 - DNA, 20 bp, synthetic construct
  misc_feature 1..20: note = Description of Artificial Sequence: Synthetic oligonucleotide
  source 1..20: mol_type = other DNA
ttaaatattgtttgctgcct

SEQ ID NO: 11063 - DNA, 20 bp, synthetic construct
  misc_feature 1..20: note = Description of Artificial Sequence: Synthetic oligonucleotide
  source 1..20: mol_type = other DNA
taaatattgtttgctgcctg

SEQ ID NO: 11064 - DNA, 20 bp, synthetic construct
  misc_feature 1..20: note = Description of Artificial Sequence: Synthetic oligonucleotide
  source 1..20: mol_type = other DNA
aaatattgtttgctgcctgt

SEQ ID NO: 11065 - DNA, 20 bp, synthetic construct
  misc_feature 1..20: note = Description of Artificial Sequence: Synthetic oligonucleotide
  source 1..20: mol_type = other DNA
aatattgtttgctgcctgta

SEQ ID NO: 11066 - DNA, 20 bp, synthetic construct
  misc_feature 1..20: note = Description of Artificial Sequence: Synthetic oligonucleotide
  source 1..20: mol_type = other DNA
atattgtttgctgcctgtac

SEQ ID NO: 11067 - DNA, 20 bp, synthetic construct
  misc_feature 1..20: note = Description of Artificial Sequence: Synthetic oligonucleotide
  source 1..20: mol_type = other DNA
tattgtttgctgcctgtacc

SEQ ID NO: 11068 - DNA, 20 bp, synthetic construct
  misc_feature 1..20: note = Description of Artificial Sequence: Synthetic oligonucleotide
  source 1..20: mol_type = other DNA
attgtttgctgcctgtacct

SEQ ID NO: 11069 - DNA, 20 bp, synthetic construct
  misc_feature 1..20: note = Description of Artificial Sequence: Synthetic oligonucleotide
  source 1..20: mol_type = other DNA
ttgtttgctgcctgtacctc

SEQ ID NO: 11070 - DNA, 20 bp, synthetic construct
  misc_feature 1..20: note = Description of Artificial Sequence: Synthetic oligonucleotide
  source 1..20: mol_type = other DNA
tgtttgctgcctgtacctcc

SEQ ID NO: 11071 - DNA, 20 bp, synthetic construct
  misc_feature 1..20: note = Description of Artificial Sequence: Synthetic oligonucleotide
  source 1..20: mol_type = other DNA
gtttgctgcctgtacctcca

SEQ ID NO: 11072 - DNA, 20 bp, synthetic construct
  misc_feature 1..20: note = Description of Artificial Sequence: Synthetic oligonucleotide
  source 1..20: mol_type = other DNA
tttgctgcctgtacctccac

SEQ ID NO: 11073 - DNA, 20 bp, synthetic construct
  misc_feature 1..20: note = Description of Artificial Sequence: Synthetic oligonucleotide
  source 1..20: mol_type = other DNA
ttgctgcctgtacctccacc

SEQ ID NO: 11074 - DNA, 20 bp, synthetic construct
  misc_feature 1..20: note = Description of Artificial Sequence: Synthetic oligonucleotide
  source 1..20: mol_type = other DNA
tgctgcctgtacctccaccc

SEQ ID NO: 11075 - DNA, 20 bp, synthetic construct
  misc_feature 1..20: note = Description of Artificial Sequence: Synthetic oligonucleotide
  source 1..20: mol_type = other DNA
gctgcctgtacctccacccc

SEQ ID NO: 11076 - DNA, 20 bp, synthetic construct
  misc_feature 1..20: note = Description of Artificial Sequence: Synthetic oligonucleotide
  source 1..20: mol_type = other DNA
ctgcctgtacctccacccct

SEQ ID NO: 11077 - DNA, 20 bp, synthetic construct
  misc_feature 1..20: note = Description of Artificial Sequence: Synthetic oligonucleotide
  source 1..20: mol_type = other DNA
tgcctgtacctccaccccta

SEQ ID NO: 11078 - DNA, 20 bp, synthetic construct
  misc_feature 1..20: note = Description of Artificial Sequence: Synthetic oligonucleotide
  source 1..20: mol_type = other DNA
gcctgtacctccacccctac

SEQ ID NO: 11079 - DNA, 20 bp, synthetic construct
  misc_feature 1..20: note = Description of Artificial Sequence: Synthetic oligonucleotide
  source 1..20: mol_type = other DNA
cctgtacctccacccctacc

SEQ ID NO: 11080 - DNA, 20 bp, synthetic construct
  misc_feature 1..20: note = Description of Artificial Sequence: Synthetic oligonucleotide
  source 1..20: mol_type = other DNA
ctgtacctccacccctacca

SEQ ID NO: 11081 - DNA, 20 bp, synthetic construct
  misc_feature 1..20: note = Description of Artificial Sequence: Synthetic oligonucleotide
  source 1..20: mol_type = other DNA
tgtacctccacccctaccat

SEQ ID NO: 11082 - DNA, 20 bp, synthetic construct
  source 1..20: mol_type = other DNA
gtacctccacccctaccatg

SEQ ID NO: 11083 - DNA, 20 bp, synthetic construct
  source 1..20: mol_type = other DNA
tacctccacccctaccatgg

SEQ ID NO: 11084 - RNA, 21 nt, synthetic construct
  source 1..21: mol_type = other RNA
ttgtagactcaagataatttt

SEQ ID NO: 11085 - DNA, 2224 bp, Homo sapiens
  source 1..2224: mol_type = other DNA
gggcttggaaggaaagctataggctacccattcagctcccctgtcagagactcaagctttgagaaaggctagcaaagagcaaggaaagagagaaaacaacaaagtggcgaggccctcagagtgaaagcgtaaggttcagtcagcctgctgcagctttgcagacctcagctgggcatctccagactcccctgaaggaagagccttcctcacccaaacccacaaaagatgctgaaaaagcctctctcagctgtgacctggctctgcattttcatcgtggcctttgtcagccacccagcgtggctgcagaagctctctaagcacaagacaccagcacagccacagctcaaagcggccaactgctgtgaggaggtgaaggagctcaaggcccaagttgccaaccttagcagcctgctgagtgaactgaacaagaagcaggagagggactgggtcagcgtggtcatgcaggtgatggagctggagagcaacagcaagcgcatggagtcgcggctcacagatgctgagagcaagtactccgagatgaacaaccaaattgacatcatgcagctgcaggcagcacagacggtcactcagacctccgcagatgccatctacgactgctcttccctctaccagaagaactaccgcatctctggagtgtataagcttcctcctgatgacttcctgggcagccctgaactggaggtgttctgtgacatggagacttcaggcggaggctggaccatcatccagagacgaaaaagtggccttgtctccttctaccgggactggaagcagtacaagcagggctttggcagcatccgtggggacttctggctggggaacgaacacatccaccggctctccagacagccaacccggctgcgtgtagagatggaggactgggagggcaacctgcgctacgctgagtatagccactttgttttgggcaatgaactcaacagctatcgcctcttcctggggaactacactggcaatgtggggaacgacgccctccagtatcataacaacacagccttcagcaccaaggacaaggacaatgacaactgcttggacaagtgtgcacagctccgcaaaggtggctactggtacaactgctgcacagactccaacctcaatggagtgtactaccgcctgggtgagcacaataagcacctggatggcatcacctggtatggctggcatggatctacctactccctcaaacgggtggagatgaaaatccgcccagaagacttcaagccttaaaaggaggctgccgtggagcacggatacagaaactgagacacgtggagactggatgagggcagatgaggacaggaagagagtgttagaaagggtaggactgagaaacagcctataatctccaaagaaagaataagtctccaaggagcacaaaaaaatcatatgtaccaaggatgttacagtaaacaggatgaactatttaaacccactgggtcctgccacatccttctcaaggtggtagactgagtggggtctctctgcccaagatccctgacatagcagtagcttgtcttttccacatgatttgtctgtgaaagaaaataattttgagatcgttttatctattttctctacggcttaggctatgtgagggcaaaacacaaatccctttgctaaaaagaaccatattattttgattctcaaaggataggcctttgagtgttagagaaaggagtgaaggaggcaggtgggaaatggtatttctatttttaaatccagtgaaattatcttgagtctacacattatttttaaaacacaaaaattgttcggctggaactgacccaggctggacttgcggggaggaaactccagggcactgcatctggcgatcagactctgagcactgcccctgctcgccttggtcatgtacagcactgaaaggaatgaagcaccagcaggaggtggacagagtctctcatggatgccggcacaaaactgccttaaaatattcatagttaatacaggtatatctatttttatttactttgtaagaaacaagctcaaggagcttccttttaaattttgtctgtaggaaatggttgaaaactgaaggtagatggtgttatagttaataataaatgctgtaaataagcatctcactttgtaaaaataaaatattgtggttttgttttaaacattcaacgtttcttttccttctacaataaacactttcaaaatgtga

SEQ ID NO: 11086 - DNA, 6693 bp, Homo sapiens
  source 1..6693: mol_type = other DNA
cagccatggtaggggtggaggtacaggcagcaaacaatatttaagatgctgacttgtggagcattcgggcttggaaggaaagctataggctacccattcagctcccctgtcagagactcaagctttgagaaaggctagcaaagagcaaggaaagagagaaaacaacaaagtggcgaggccctcagagtgaaagcgtaaggttcagtcagcctgctgcagctttgcagacctcagctgggcatctccagactcccctgaaggaagagccttcctcacccaaacccacaaaagatgctgaaaaagcctctctcagctgtgacctggctctgcattttcatcgtggcctttgtcagccacccagcgtggctgcagaagctctctaagcacaagacaccagcacagccacagctcaaagcggccaactgctgtgaggaggtgaaggagctcaaggcccaagttgccaaccttagcagcctgctgagtgaactgaacaagaagcaggagagggactgggtcagcgtggtcatgcaggtgatggagctggagagcaacagcaagcgcatggagtcgcggctcacagatgctgagagcaagtactccgagatgaacaaccaaattgacatcatgcagctgcaggcagcacagacggtcactcagacctccgcaggtaaggagaccagtcccctgagggagcgtggagtgcctccccatctacagcactgcttctacatatcctggtcatcagaaccactactggggcctcttttgtgggtacactttccctttagtaaaggcttatgcagtatttcctttgacttctaatgctatgtaagtttacctaacaccttcacgggtctcttttatccacacagtgtttcagcctaccatcttggagtgctgagatactacatggtttgcccaaagtcacccagcaagtcttagaagcagggttcaagtcttcctgattggtgtagctctgctacttcctcaccaagagctgacaggctatatctcaagaaattccaaggaagcaccaaactgtaacagctgttcctctggaagcaaagttttgccagaaacagttctctggtgttcctaagatttaccaggaatgagcattaatggaattttgtgtcctctctctgtaaacgtaactcttctcattggctcagagttaagtgtagagacacataaccatgtgaagagtccctttgtgttcaggaaggatgcggctccttaaggttcctcaattgtgatacgtctatttttttccatggtcttaaatgaatttctccgaatacaggattttttaaatgcaatgctgaaatatagacttaataggccaaaaataagataaatttaatctttcttttgcaaaataacttttatttctggttagctcagctcaggtgggccaacatgaatttacggtttagagataaaaatttggttttctgaaattatcaggaaaatattagttgtaaggagcatatcctatagacatgtcatttcttgctgatataaaaaccattggtcccattataaactacatgaagaacaaagacatgatcagcttctactgactaagtcaatggttaacctcagctcaaattaagaaaaagttttaacatgaaaccaagcttgaaaattctgttacctgaaccaacatgtatcaatcactttctaagcatggacttccgggccctcagtttgggattagaaaggtattctcaggccattttccagacaagtgagtcctgatttggtctgtgagatgaaaccagacatgcggaagaccaggccagacagaggaatctgaccgtgccacttcctgctcatccaaacaggaggctttctcaccatcctgcaaggaggttcttggggtcaagtgcagctctcccaccaggtctcttgctcttcttgcccaggacatcattccttatttttcttctctatgaccaagtgctcagttacccttatattctataagtaggtagtcccttagaggaagcagtaagttggtgctttcaccactaagacgaaatgaagaatagtgatggcgaaggcacacgtactctacctccctttcccaaggtgctctgcaagagaacctatgtgcctcagacaactcccatctgccatcttggtgctcctctctaaggtcccagtgcagtggtcaccaagaaaagcaccccgagacatagcaggcaggaagcttctcttggatagtaagggccgcagtctctgaatcctatcagaaaaggctgtctcttccactatgctctttgatatttagaatacagagcttaaatcctgcataaagtagcagctccatggccctagagtaaaaaaactggccagtctgatgctctcatttcattgttttaacaaaacttctgggaggaaggcctcaaaggttcttctgagtgttttgaggtgctagctggatggaaggggaaaatatgtgataataaaatctatctcccttaattatggtctcaggtggcagtagccaccatctctgaacaacaacaaaaacaaccaaccaggaaacatcaacaaaaccagactctatgagatattcacgactgatttgttatagtggcggctgtctaagaagtctgaatctatctgacaggagtatctgttacgtggccctcatacactgtaacatttctagaattcatggcccagctatagcagaataatttatttcagagttaacctgaaaccacctgttggaacgtcccactaatgctatccaggtgaagggcttccctacccctctgctccaccgctagtaaagccaaaatacaccccctctggatctccccatatccacctctcccaaatgcagacactgatgggtaattaacaccactgagaatcccagggtagaaataaaggctcagtctctaaacactcaactcagatggagccactgggtctaaatgctcaccctgtggtttgttctcttgtagatgccatctacgactgctcttccctctaccagaagaactaccgcatctctggagtgtataagcttcctcctgatgacttcctgggcagccctgaactggaggtgaggtcattacagtcactggccatgccctaatacctgtccttcaccccctcaaggggactacaacaacagggccattcacagtttaaagaaaggaaaattcggctgggcgcagtggctcacacctgtaatcccagcactatgggaggccgaggcaggtggatcacttcaggtcaggagtttaagaccagcctggccaacatggtgaaaccctgtctctactaaaaatacaaaaaaattagccaggcatggtggtgggcacctgtaatccctgctacacaggaggattgcttgaactcaggaggcagaggttgcagtgagccgagatcacgccactgcactataatctgggagacaaagtgagactccatttcaattaaaaaaaaaaaaaaaaaaaaggaaaactcaaacacaagcaaacacaccaaacaccacagagctatgcaaacactcagtttatgccctgcactccaaacccaggcatctgtttggccccttcaaatcattatcagtcaaacaacaagccttctaacatagatcagatcattcttataaccaccacataacttagtttaaatctcttgccatgtcctagaacagctattccttgggggaggagaaaagaaaacacgaaggcagcatcaaattatctggattttcacccaggcatggtggctcacacctgtaatcccaagttttttgggaggtgaggtgggcggaacaatcacctgaggtcaggactttgagaccagcctggccaacatgctgaaacccagtctctactaaaaatacaaaaattagcccagtgtggtgacaggcactctggtcccagctactaggaaggcaggagaatcactggaactcaggaggtggaggttgcagtgagccgagattgcaccactgtactctagcctgggcaacaagagtgaaattctgcttcaaaaaaaaaaaaagtatctggatttttccctccaagcttcatgtgcactcacccccgggcccaatttgcatcgttcttccagagcaatgcaccacccaccccagctcaccagcagtggggcagcatcactgcccgagtgagccagtgtgactgcgggagtgcacacatctactggctctgcagggacaggaacaggttgggaagcctgccctcttgctcctgccttctgcccctgcaagtccctcaccagagtatcccctctgcttcaggtgttctgtgacatggagacttcaggcggaggctggaccatcatccagagacgaaaaagtggccttgtctccttctaccgggactggaagcagtacaagcagggctttggcagcatccgtggggacttctggctggggaacgaacacatccaccggctctccagacagccaacccggctgcgtgtagagatggaggtaagcacaaggccaggggccccatgactggaccagtgccaccacacatgaccgcgtacaactccgggggtgccattcctattctgattcaagacaaatctgtatattcattgtgatggttttcctgcaagttgtaatggagttgaggaaaaataggtatttttcctttctgcaacccccccaaccccccgacaaaagtggggctgcaggtgggacaggaagaggccagacccaggccagagtagagcaaattcaacagtcagctgtgccgaacactagtctctgctctggccgagcatgaggtcctttaggtgcaaatcttactgatactgtttggggacccttgctgaaggtctgaaagcactcactatatcctcatgtttctcttacagcagctctgtgtgggattcagcaaaaacatagctgcaccttataagcaggaaagtgaggaatatagaaagagagactaatcaaggccatatggtgaatcaggaaagaagttcgagccttgttttctgattcccaggttaacacagtaaactggaggtaaacaagtaataaagtcttattagattcacacctataaaaagatgtttggctatgggactgtcaggagagaaggggtatagagacagcatgaaatggagcctgctgcactttctttaaggctctgctcctcctgacaggactgggagggcaacctgcgctacgctgagtatagccactttgttttgggcaatgaactcaacagctatcgcctcttcctggggaactacactggcaatgtggggaacgacgccctccagtatcataacaacacagccttcagcaccaaggacaaggacaatgacaactgcttggacaagtgtgcacagctccgcaaaggtgagatttggggggaccggaaaggagaagttcaggtacaagctcataatcccacttgaggagaaagagtgaattataactgtacagttgatattccggttttggtattctttctgaccctggctctaactccttacctgatgtctggtctatcacagtcaacttactagcactgggtctgtttctcatgccaggtggctactggtacaactgctgcacagactccaacctcaatggagtgtactaccgcctgggtgagcacaataagcacctggatggcatcacctggtatggctggcatggatctacctactccctcaaacgggtggagatgaaaatccgcccagaagacttcaagccttaaaaggaggctgccgtggagcacggatacagaaactgagacacgtggagactggatgagggcagatgaggacaggaagagagtgttagaaagggtaggactgagaaacagcctataatctccaaagaaagaataagtctccaaggagcacaaaaaaatcatatgtaccaaggatgttacagtaaacaggatgaactatttaaacccactgggtcctgccacatccttctcaaggtggtagactgagtggggtctctctgcccaagatccctgacatagcagtagcttgtcttttccacatgatttgtctgtgaaagaaaataattttgagatcgttttatctattttctctacggcttaggctatgtgagggcaaaacacaaatccctttgctaaaaagaaccatattattttgattctcaaaggataggcctttgagtgttagagaaaggagtgaaggaggcaggtgggaaatggtatttctatttttaaatccagtgaaattatcttgagtctacacattatttttaaaacacaaaaattgttcggctggaactgacccaggctggacttgcggggaggaaactccagggcactgcatctggcgatcagactctgagcactgcccctgctcgccttggtcatgtacagcactgaaaggaatgaagcaccagcaggaggtggacagagtctctcatggatgccggcacaaaactgccttaaaatattcatagttaatacaggtatatctatttttatttactttgtaagaaacaagctcaaggagcttccttttaaattttgtctgtaggaaatggttgaaaactgaaggtagatggtgttatagttaataataaatgctgtaaataagcatctcactttgtaaaaataaaatattgtggttttgttttaaacattcaacgtttcttttccttctacaataaacactttcaaaatgtga

SEQ ID NO: 11087 - DNA, 20 bp, synthetic construct
  misc_feature 1..20: note = Description of Artificial Sequence: Synthetic oligonucleotide
  modified_base 1: mod_base = OTHER; note = 2' O-methyl modified nucleoside
  modified_base 1..2: mod_base = OTHER; note = Phosphorothioate linkage
  modified_base 2: mod_base = OTHER; note = 2' O-methyl modified nucleoside
  modified_base 2..3: mod_base = OTHER; note = Phosphorothioate linkage
  modified_base 3: mod_base = OTHER; note = 2' O-methyl modified nucleoside
  modified_base 3..4: mod_base = OTHER; note = Phosphorothioate linkage
  modified_base 4: mod_base = OTHER; note = 2' O-methyl modified nucleoside
  modified_base 4..5: mod_base = OTHER; note = Phosphorothioate linkage
  modified_base 5: mod_base = OTHER; note = 2' O-methyl modified nucleoside
  modified_base 5..6: mod_base = OTHER; note = Phosphorothioate linkage
  misc_difference 6: note = Any deoxynucleotide
  modified_base 6..7: mod_base = OTHER; note = Phosphorothioate linkage
  misc_difference 7: note = Any deoxynucleotide
  modified_base 7..8: mod_base = OTHER; note = Phosphorothioate linkage
  misc_difference 8: note = Any deoxynucleotide
  modified_base 8..9: mod_base = OTHER; note = Phosphorothioate linkage
  misc_difference 9: note = Any deoxynucleotide
  modified_base 9..10: mod_base = OTHER; note = Phosphorothioate linkage
  misc_difference 10: note = Any deoxynucleotide
  modified_base 10..11: mod_base = OTHER; note = Phosphorothioate linkage
  misc_difference 11: note = Any deoxynucleotide
  modified_base 11..12: mod_base = OTHER; note = Phosphorothioate linkage
  misc_difference 12: note = Any deoxynucleotide
  modified_base 12..13: mod_base = OTHER; note = Phosphorothioate linkage
  misc_difference 13: note = Any deoxynucleotide
  modified_base 13..14: mod_base = OTHER; note = Phosphorothioate linkage
  misc_difference 14: note = Any deoxynucleotide
  modified_base 14..15: mod_base = OTHER; note = Phosphorothioate linkage
  misc_difference 15: note = Any deoxynucleotide
  modified_base 15..16: mod_base = OTHER; note = Phosphorothioate linkage
  modified_base 16: mod_base = OTHER; note = 2' O-methyl modified nucleoside
  modified_base 16..17: mod_base = OTHER; note = Phosphorothioate linkage
  modified_base 17: mod_base = OTHER; note = 2' O-methyl modified nucleoside
  modified_base 17..18: mod_base = OTHER; note = Phosphorothioate linkage
  modified_base 18: mod_base = OTHER; note = 2' O-methyl modified nucleoside
  modified_base 18..19: mod_base = OTHER; note = Phosphorothioate linkage
  modified_base 19: mod_base = OTHER; note = 2' O-methyl modified nucleoside
  modified_base 19..20: mod_base = OTHER; note = Phosphorothioate linkage
  modified_base 20: mod_base = OTHER; note = 2' O-methyl modified nucleoside
  source 1..20: mol_type = other DNA
ttgtaccagtagccaccttt

SEQ ID NO: 11088 - DNA, 20 bp, synthetic construct
  misc_feature 1..20: note = Description of Artificial Sequence: Synthetic oligonucleotide
  modified_base 1: mod_base = OTHER; note = 2' O-methyl modified nucleoside
  modified_base 1..2: mod_base = OTHER; note = Phosphorothioate linkage
  modified_base 2: mod_base = OTHER; note = 2' O-methyl modified nucleoside
  modified_base 2..3: mod_base = OTHER; note = Phosphorothioate linkage
  modified_base 3: mod_base = OTHER; note = 2' O-methyl modified nucleoside
  modified_base 3..4: mod_base = OTHER; note = Phosphorothioate linkage
  modified_base 4: mod_base = OTHER; note = 2' O-methyl modified nucleoside
  modified_base 4..5: mod_base = OTHER; note = Phosphorothioate linkage
  modified_base 5: mod_base = OTHER; note = 2' O-methyl modified nucleoside
  modified_base 5..6: mod_base = OTHER; note = Phosphorothioate linkage
  misc_difference 6: note = Any deoxynucleotide
  modified_base 6..7: mod_base = OTHER; note = Phosphorothioate linkage
  misc_difference 7: note = Any deoxynucleotide
  modified_base 7..8: mod_base = OTHER; note = Phosphorothioate linkage
  misc_difference 8: note = Any deoxynucleotide
  modified_base 8..9: mod_base = OTHER; note = Phosphorothioate linkage
  misc_difference 9: note = Any deoxynucleotide
  modified_base 9..10: mod_base = OTHER; note = Phosphorothioate linkage
  misc_difference 10: note = Any deoxynucleotide
  modified_base 10..11: mod_base = OTHER; note = Phosphorothioate linkage
  misc_difference 11: note = Any deoxynucleotide
  modified_base 11..12: mod_base = OTHER; note = Phosphorothioate linkage
  misc_difference 12: note = Any deoxynucleotide
  modified_base 12..13: mod_base = OTHER; note = Phosphorothioate linkage
  misc_difference 13: note = Any deoxynucleotide
  modified_base 13..14: mod_base = OTHER; note = Phosphorothioate linkage
  misc_difference 14: note = Any deoxynucleotide
  modified_base 14..15: mod_base = OTHER; note = Phosphorothioate linkage
  misc_difference 15: note = Any deoxynucleotide
  modified_base 15..16: mod_base = OTHER; note = Phosphorothioate linkage
  modified_base 16: mod_base = OTHER; note = 2' O-methyl modified nucleoside
  modified_base 16..17: mod_base = OTHER; note = Phosphorothioate linkage
  modified_base 17: mod_base = OTHER; note = 2' O-methyl modified nucleoside
  modified_base 17..18: mod_base = OTHER; note = Phosphorothioate linkage
  modified_base 18: mod_base = OTHER; note = 2' O-methyl modified nucleoside
  modified_base 18..19: mod_base = OTHER; note = Phosphorothioate linkage
  modified_base 19: mod_base = OTHER; note = 2' O-methyl modified nucleoside
  modified_base 19..20: mod_base = OTHER; note = Phosphorothioate linkage
  modified_base 20: mod_base = OTHER; note = 2' O-methyl modified nucleoside
  source 1..20: mol_type = other DNA
tctaaccgagctgatggact

SEQ ID NO: 11089 - RNA, 21 nt, synthetic construct
  misc_feature 1..21: note = Description of Artificial Sequence: Synthetic oligonucleotide
  source 1..21: mol_type = other RNA
gtacaactgctgcacagactt

SEQ ID NO: 11090 - RNA, 21 nt, synthetic construct
  misc_feature 1..21: note = Description of Artificial Sequence: Synthetic oligonucleotide
  source 1..21: mol_type = other RNA
gtctgtgcagcagttgtactt

SEQ ID NO: 11091 - RNA, 21 nt, synthetic construct
  misc_feature 1..21: note = Description of Artificial Sequence: Synthetic oligonucleotide
  source 1..21: mol_type = other RNA
gttgtacagcatgcggagatt

SEQ ID NO: 11092 - RNA, 21 nt, synthetic construct
  misc_feature 1..21: note = Description of Artificial Sequence: Synthetic oligonucleotide
  source 1..21: mol_type = other RNA
tctccgcatgctgtacaactt

SEQ ID NO: 11093 - RNA, 21 nt, synthetic construct
  misc_feature 1..21: note = Description of Artificial Sequence: Synthetic oligonucleotide
  modified_base 1: mod_base = OTHER; note = 2' fluoro-modified nucleoside
  modified_base 1..2: mod_base = OTHER; note = Phosphorothioate linkage
  modified_base 2: mod_base = OTHER; note = 2' O-methyl modified nucleoside
  modified_base 2..3: mod_base = OTHER; note = Phosphorothioate linkage
  modified_base 3: mod_base = OTHER; note = 2' fluoro-modified nucleoside
  modified_base 4: mod_base = OTHER; note = 2' O-methyl modified nucleoside
  modified_base 5: mod_base = OTHER; note = 2' fluoro-modified nucleoside
  modified_base 6: mod_base = OTHER; note = 2' O-methyl modified nucleoside
  modified_base 7: mod_base = OTHER; note = 2' fluoro-modified nucleoside
  modified_base 8: mod_base = OTHER; note = 2' fluoro-modified nucleoside
  modified_base 9: mod_base = OTHER; note = 2' fluoro-modified nucleoside
  modified_base 10: mod_base = OTHER; note = 2' O-methyl modified nucleoside
  modified_base 11: mod_base = OTHER; note = 2' fluoro-modified nucleoside
  modified_base 12: mod_base = OTHER; note = 2' O-methyl modified nucleoside
  modified_base 13: mod_base = OTHER; note = 2' fluoro-modified nucleoside
  modified_base 14: mod_base = OTHER; note = 2' O-methyl modified nucleoside
  modified_base 15: mod_base = OTHER; note = 2' fluoro-modified nucleoside
  modified_base 16: mod_base = OTHER; note = 2' O-methyl modified nucleoside
  modified_base 17: mod_base = OTHER; note = 2' fluoro-modified nucleoside
  modified_base 18: mod_base = OTHER; note = 2' O-methyl modified nucleoside
  modified_base 19: mod_base = OTHER; note = 2' fluoro-modified nucleoside
  modified_base 19..20: mod_base = OTHER; note = Phosphorothioate linkage
  modified_base 20: mod_base = OTHER; note = 2' O-methyl modified nucleoside
  modified_base 20..21: mod_base = OTHER; note = Phosphorothioate linkage
  modified_base 21: mod_base = OTHER; note = 2' O-methyl modified nucleoside
  source 1..21: mol_type = other RNA
ggaaggaaagctataggcatt

SEQ ID NO: 11094 - RNA, 21 nt, synthetic construct
  misc_feature 1..21: note = Description of Artificial Sequence: Synthetic oligonucleotide
  modified_base 1: mod_base = OTHER; note = 2' fluoro-modified nucleoside
  modified_base 1..2: mod_base = OTHER; note = Phosphorothioate linkage
  modified_base 2: mod_base = OTHER; note = 2' O-methyl modified nucleoside
  modified_base 2..3: mod_base = OTHER; note = Phosphorothioate linkage
  modified_base 3: mod_base = OTHER; note = 2' fluoro-modified nucleoside
  modified_base 4: mod_base = OTHER; note = 2' O-methyl modified nucleoside
  modified_base 5: mod_base = OTHER; note = 2' fluoro-modified nucleoside
  modified_base 6: mod_base = OTHER; note = 2' O-methyl modified nucleoside
  modified_base 7: mod_base = OTHER; note = 2' fluoro-modified nucleoside
  modified_base 8: mod_base = OTHER; note = 2' fluoro-modified nucleoside
  modified_base 9: mod_base = OTHER; note = 2' fluoro-modified nucleoside
  modified_base 10: mod_base = OTHER; note = 2' O-methyl modified nucleoside
  modified_base 11: mod_base = OTHER; note = 2' fluoro-modified nucleoside
  modified_base 12: mod_base = OTHER; note = 2' O-methyl modified nucleoside
  modified_base 13: mod_base = OTHER; note = 2' fluoro-modified nucleoside
  modified_base 14: mod_base = OTHER; note = 2' O-methyl modified nucleoside
  modified_base 15: mod_base = OTHER; note = 2' fluoro-modified nucleoside
  modified_base 16: mod_base = OTHER; note = 2' O-methyl modified nucleoside
  modified_base 17: mod_base = OTHER; note = 2' fluoro-modified nucleoside
  modified_base 18: mod_base = OTHER; note = 2' O-methyl modified nucleoside
  modified_base 19: mod_base = OTHER; note = 2' fluoro-modified nucleoside
  modified_base 19..20: mod_base = OTHER; note = Phosphorothioate linkage
  modified_base 20: mod_base = OTHER; note = 2' O-methyl modified nucleoside
  modified_base 20..21: mod_base = OTHER; note = Phosphorothioate linkage
  modified_base 21: mod_base = OTHER; note = 2' O-methyl modified nucleoside
  source 1..21: mol_type = other RNA
ccctgtcagagactcaagatt

SEQ ID NO: 11095 - RNA, 21 nt, synthetic construct
  misc_feature 1..21: note = Description of Artificial Sequence: Synthetic oligonucleotide
  modified_base 1: mod_base = OTHER; note = 2' fluoro-modified nucleoside
  modified_base 1..2: mod_base = OTHER; note = Phosphorothioate linkage
  modified_base 2: mod_base = OTHER; note = 2' O-methyl modified nucleoside
  modified_base 2..3: mod_base = OTHER; note = Phosphorothioate linkage
  modified_base 3: mod_base = OTHER; note = 2' fluoro-modified nucleoside
  modified_base 4: mod_base = OTHER; note = 2' O-methyl modified nucleoside
  modified_base 5: mod_base = OTHER; note = 2' fluoro-modified nucleoside
  modified_base 6: mod_base = OTHER; note = 2' O-methyl modified nucleoside
  modified_base 7: mod_base = OTHER; note = 2' fluoro-modified nucleoside
  modified_base 8: mod_base = OTHER; note = 2' fluoro-modified nucleoside
  modified_base 9: mod_base = OTHER; note = 2' fluoro-modified nucleoside
  modified_base 10: mod_base = OTHER; note = 2' O-methyl modified nucleoside
  modified_base 11: mod_base = OTHER; note = 2' fluoro-modified nucleoside
  modified_base 12: mod_base = OTHER; note = 2' O-methyl modified nucleoside
  modified_base 13: mod_base = OTHER; note = 2' fluoro-modified nucleoside
  modified_base 14: mod_base = OTHER; note = 2' O-methyl modified nucleoside
  modified_base 15: mod_base = OTHER; note = 2' fluoro-modified nucleoside
  modified_base 16: mod_base = OTHER; note = 2' O-methyl modified nucleoside
  modified_base 17: mod_base = OTHER; note = 2' fluoro-modified nucleoside
  modified_base 18: mod_base = OTHER; note = 2' O-methyl modified nucleoside
  modified_base 19: mod_base = OTHER; note = 2' fluoro-modified nucleoside
  modified_base 19..20: mod_base = OTHER; note = Phosphorothioate linkage
  modified_base 20: mod_base = OTHER; note = 2' O-methyl modified nucleoside
  modified_base 20..21: mod_base = OTHER; note = Phosphorothioate linkage
  modified_base 21: mod_base = OTHER; note = 2' O-methyl modified nucleoside
  source 1..21: mol_type = other RNA
gaaaacaacaaagtggcgatt

SEQ ID NO: 11096 - RNA, 21 nt, synthetic construct
  misc_feature 1..21: note = Description of Artificial Sequence: Synthetic oligonucleotide
  modified_base 1: mod_base = OTHER; note = 2' fluoro-modified nucleoside
  modified_base 1..2: mod_base = OTHER; note = Phosphorothioate linkage
  modified_base 2: mod_base = OTHER; note = 2' O-methyl modified nucleoside
  modified_base 2..3: mod_base = OTHER; note = Phosphorothioate linkage
  modified_base 3: mod_base = OTHER; note = 2' fluoro-modified nucleoside
  modified_base 4: mod_base = OTHER; note = 2' O-methyl modified nucleoside
  modified_base 5: mod_base = OTHER; note = 2' fluoro-modified nucleoside
  modified_base 6: mod_base = OTHER; note = 2' O-methyl modified nucleoside
  modified_base 7: mod_base = OTHER; note = 2' fluoro-modified nucleoside
  modified_base 8: mod_base = OTHER; note = 2' fluoro-modified nucleoside
  modified_base 9: mod_base = OTHER; note = 2' fluoro-modified nucleoside
  modified_base 10: mod_base = OTHER; note = 2' O-methyl modified nucleoside
  modified_base 11: mod_base = OTHER; note = 2' fluoro-modified nucleoside
  modified_base 12: mod_base = OTHER; note = 2' O-methyl modified nucleoside
  modified_base 13: mod_base = OTHER; note = 2' fluoro-modified nucleoside
  modified_base 14: mod_base = OTHER; note = 2' O-methyl modified nucleoside
  modified_base 15: mod_base = OTHER; note = 2' fluoro-modified nucleoside
  modified_base 16: mod_base = OTHER; note = 2' O-methyl modified nucleoside
  modified_base 17: mod_base = OTHER; note = 2' fluoro-modified nucleoside
  modified_base 18: mod_base = OTHER; note = 2' O-methyl modified nucleoside
  modified_base 19: mod_base = OTHER; note = 2' fluoro-modified nucleoside
  modified_base 19..20: mod_base = OTHER; note = Phosphorothioate linkage
  modified_base 20: mod_base = OTHER; note = 2' O-methyl modified nucleoside
  modified_base 20..21: mod_base = OTHER; note = Phosphorothioate linkage
  modified_base 21: mod_base = OTHER; note = 2' O-methyl modified nucleoside
  source 1..21: mol_type = other RNA
aaacaacaaagtggcgagatt

SEQ ID NO: 11097 - RNA, 21 nt, synthetic construct
  misc_feature 1..21: note = Description of Artificial Sequence: Synthetic oligonucleotide
  modified_base 1: mod_base = OTHER; note = 2' fluoro-modified nucleoside
  modified_base 1..2: mod_base = OTHER; note = Phosphorothioate linkage
  modified_base 2: mod_base = OTHER; note = 2' O-methyl modified nucleoside
  modified_base 2..3: mod_base = OTHER; note = Phosphorothioate linkage
  modified_base 3: mod_base = OTHER; note = 2' fluoro-modified nucleoside
  modified_base 4: mod_base = OTHER; note = 2' O-methyl modified nucleoside
  modified_base 5: mod_base = OTHER; note = 2' fluoro-modified nucleoside
  modified_base 6: mod_base = OTHER; note = 2' O-methyl modified nucleoside
  modified_base 7: mod_base = OTHER; note = 2' fluoro-modified nucleoside
  modified_base 8: mod_base = OTHER; note = 2' fluoro-modified nucleoside
  modified_base 9: mod_base = OTHER; note = 2' fluoro-modified nucleoside
  modified_base 10: mod_base = OTHER; note = 2' O-methyl modified nucleoside
  modified_base 11: mod_base = OTHER; note = 2' fluoro-modified nucleoside
  modified_base 12: mod_base = OTHER; note = 2' O-methyl modified nucleoside
  modified_base 13: mod_base = OTHER; note = 2' fluoro-modified nucleoside
  modified_base 14: mod_base = OTHER; note = 2' O-methyl modified nucleoside
  modified_base 15: mod_base = OTHER; note = 2' fluoro-modified nucleoside
  modified_base 16: mod_base = OTHER; note = 2' O-methyl modified nucleoside
  modified_base 17: mod_base = OTHER; note = 2' fluoro-modified nucleoside
  modified_base 18: mod_base = OTHER; note = 2' O-methyl modified nucleoside
  modified_base 19: mod_base = OTHER; note = 2' fluoro-modified nucleoside
  modified_base 19..20: mod_base = OTHER; note = Phosphorothioate linkage
  modified_base 20: mod_base = OTHER; note = 2' O-methyl modified nucleoside
  modified_base 20..21: mod_base = OTHER; note = Phosphorothioate linkage
  modified_base 21: mod_base = OTHER; note = 2' O-methyl modified nucleoside
  source 1..21: mol_type = other RNA
ccctcagagtgaaagcgtatt

SEQ ID NO: 11098 - RNA, 21 nt, synthetic construct
  misc_feature 1..21: note = Description of Artificial Sequence: Synthetic oligonucleotide
  modified_base 1: mod_base = OTHER; note = 2' fluoro-modified nucleoside
  modified_base 1..2: mod_base = OTHER; note = Phosphorothioate linkage
  modified_base 2: mod_base = OTHER; note = 2' O-methyl modified nucleoside
  modified_base 2..3: mod_base = OTHER; note = Phosphorothioate linkage
  modified_base 3: mod_base = OTHER; note = 2' fluoro-modified nucleoside
  modified_base 4: mod_base = OTHER; note = 2' O-methyl modified nucleoside
  modified_base 5: mod_base = OTHER; note = 2' fluoro-modified nucleoside
  modified_base 6: mod_base = OTHER; note = 2' O-methyl modified nucleoside
  modified_base 7: mod_base = OTHER; note = 2' fluoro-modified nucleoside
  modified_base 8: mod_base = OTHER; note = 2' fluoro-modified nucleoside
  modified_base 9: mod_base = OTHER; note = 2' fluoro-modified nucleoside
  modified_base 10: mod_base = OTHER; note = 2' O-methyl modified nucleoside
  modified_base 11: mod_base = OTHER; note = 2' fluoro-modified nucleoside
  modified_base 12: mod_base = OTHER; note = 2' O-methyl modified nucleoside
  modified_base 13: mod_base = OTHER; note = 2' fluoro-modified nucleoside
  modified_base 14: mod_base = OTHER; note = 2' O-methyl modified nucleoside
  modified_base 15: mod_base = OTHER; note = 2' fluoro-modified nucleoside
  modified_base 16: mod_base = OTHER; note = 2' O-methyl modified nucleoside
  modified_base 17: mod_base = OTHER; note = 2' fluoro-modified nucleoside
  modified_base 18: mod_base = OTHER; note = 2' O-methyl modified nucleoside
  modified_base 19: mod_base = OTHER; note = 2' fluoro-modified nucleoside
  modified_base 19..20: mod_base = OTHER; note = Phosphorothioate linkage
  modified_base 20: mod_base = OTHER; note = 2' O-methyl modified nucleoside
  modified_base 20..21: mod_base = OTHER; note = Phosphorothioate linkage
  modified_base 21: mod_base = OTHER; note = 2' O-methyl modified nucleoside
  source 1..21: mol_type = other RNA
cctcagagtgaaagcgtaatt

SEQ ID NO: 11099 - RNA, 21 nt, synthetic construct
  misc_feature 1..21: note = Description of Artificial Sequence: Synthetic oligonucleotide
  modified_base 1: mod_base = OTHER; note = 2' fluoro-modified nucleoside
  modified_base 1..2: mod_base = OTHER; note = Phosphorothioate linkage
  modified_base 2: mod_base = OTHER; note = 2' O-methyl modified nucleoside
  modified_base 2..3: mod_base = OTHER; note = Phosphorothioate linkage
  modified_base 3: mod_base = OTHER; note = 2' fluoro-modified nucleoside
  modified_base 4: mod_base = OTHER; note = 2' O-methyl modified nucleoside
  modified_base 5: mod_base = OTHER; note = 2' fluoro-modified nucleoside
  modified_base 6: mod_base = OTHER; note = 2' O-methyl modified nucleoside
  modified_base 7: mod_base = OTHER; note = 2' fluoro-modified nucleoside
  modified_base 8: mod_base = OTHER; note = 2' fluoro-modified nucleoside
  modified_base 9: mod_base = OTHER; note = 2' fluoro-modified nucleoside
  modified_base 10: mod_base = OTHER; note = 2' O-methyl modified nucleoside
  modified_base 11: mod_base = OTHER; note = 2' fluoro-modified nucleoside
  modified_base 12: mod_base = OTHER; note = 2' O-methyl modified nucleoside
  modified_base 13: mod_base = OTHER; note = 2' fluoro-modified nucleoside
  modified_base 14: mod_base = OTHER; note = 2' O-methyl modified nucleoside
  modified_base 15: mod_base = OTHER; note = 2' fluoro-modified nucleoside
  modified_base 16: mod_base = OTHER; note = 2' O-methyl modified nucleoside
  modified_base 17: mod_base = OTHER; note = 2' fluoro-modified nucleoside
  modified_base 18: mod_base = OTHER; note = 2' O-methyl modified nucleoside
  modified_base 19: mod_base = OTHER; note = 2' fluoro-modified nucleoside
  modified_base 19..20: mod_base = OTHER; note = Phosphorothioate linkage
  modified_base 20: mod_base = OTHER; note = 2' O-methyl modified nucleoside
  modified_base 20..21: mod_base = OTHER; note = Phosphorothioate linkage
  modified_base 21: mod_base = OTHER; note = 2' O-methyl modified nucleoside
  source 1..21: mol_type = other RNA
ctcagagtgaaagcgtaaatt

SEQ ID NO: 11100 - RNA, 21 nt, synthetic construct
  misc_feature 1..21: note = Description of Artificial Sequence: Synthetic oligonucleotide
  modified_base 1: mod_base = OTHER; note = 2' fluoro-modified nucleoside
  modified_base 1..2: mod_base = OTHER; note = Phosphorothioate linkage
  modified_base 2: mod_base = OTHER; note = 2' O-methyl modified nucleoside
  modified_base 2..3: mod_base = OTHER; note = Phosphorothioate linkage
  modified_base 3: mod_base = OTHER; note = 2' fluoro-modified nucleoside
  modified_base 4: mod_base = OTHER; note = 2' O-methyl modified nucleoside
  modified_base 5: mod_base = OTHER; note = 2' fluoro-modified nucleoside
  modified_base 6: mod_base = OTHER; note = 2' O-methyl modified nucleoside
  modified_base 7: mod_base = OTHER; note = 2' fluoro-modified nucleoside
  modified_base 8: mod_base = OTHER; note = 2' fluoro-modified nucleoside
  modified_base 9: mod_base = OTHER; note = 2' fluoro-modified nucleoside
  modified_base 10: mod_base = OTHER; note = 2' O-methyl modified nucleoside
  modified_base 11: mod_base = OTHER; note = 2' fluoro-modified nucleoside
  modified_base 12: mod_base = OTHER; note = 2' O-methyl modified nucleoside
  modified_base 13: mod_base = OTHER; note = 2' fluoro-modified nucleoside
  modified_base 14: mod_base = OTHER; note = 2' O-methyl modified nucleoside
  modified_base 15: mod_base = OTHER; note = 2' fluoro-modified nucleoside
  modified_base 16: mod_base = OTHER; note = 2' O-methyl modified nucleoside
  modified_base 17: mod_base = OTHER; note = 2' fluoro-modified nucleoside
  modified_base 18: mod_base = OTHER; note = 2' O-methyl modified nucleoside
  modified_base 19: mod_base = OTHER; note = 2' fluoro-modified nucleoside
  modified_base 19..20: mod_base = OTHER; note = Phosphorothioate linkage
  modified_base 20: mod_base = OTHER; note = 2' O-methyl modified nucleoside
  modified_base 20..21: mod_base = OTHER; note = Phosphorothioate linkage
  modified_base 21: mod_base = OTHER; note = 2' O-methyl modified nucleoside
  source 1..21: mol_type = other RNA
cagagtgaaagcgtaaggatt

SEQ ID NO: 11101 - RNA, 21 nt, synthetic construct
  misc_feature 1..21: note = Description of Artificial Sequence: Synthetic oligonucleotide
  modified_base 1: mod_base = OTHER; note = 2' fluoro-modified nucleoside
  modified_base 1..2: mod_base = OTHER; note = Phosphorothioate linkage
  modified_base 2: mod_base = OTHER; note = 2' O-methyl modified nucleoside
  modified_base 2..3: mod_base = OTHER; note = Phosphorothioate linkage
  modified_base 3: mod_base = OTHER; note = 2' fluoro-modified nucleoside
  modified_base 4: mod_base = OTHER; note = 2' O-methyl modified nucleoside
  modified_base 5: mod_base = OTHER; note = 2' fluoro-modified nucleoside
  modified_base 6: mod_base = OTHER; note = 2' O-methyl modified nucleoside
  modified_base 7: mod_base = OTHER; note = 2' fluoro-modified nucleoside
  modified_base 8: mod_base = OTHER; note = 2' fluoro-modified nucleoside
  modified_base 9: mod_base = OTHER; note = 2' fluoro-modified nucleoside
  modified_base 10: mod_base = OTHER; note = 2' O-methyl modified nucleoside
  modified_base 11: mod_base = OTHER; note = 2' fluoro-modified nucleoside
  modified_base 12: mod_base = OTHER; note = 2' O-methyl modified nucleoside
  modified_base 13: mod_base = OTHER; note = 2' fluoro-modified nucleoside
  modified_base 14: mod_base = OTHER; note = 2' O-methyl modified nucleoside
  modified_base 15: mod_base = OTHER; note = 2' fluoro-modified nucleoside
  modified_base 16: mod_base = OTHER; note = 2' O-methyl modified nucleoside
  modified_base 17: mod_base = OTHER; note = 2' fluoro-modified nucleoside
  modified_base 18: mod_base = OTHER; note = 2' O-methyl modified nucleoside
  modified_base 19: mod_base = OTHER; note = 2' fluoro-modified nucleoside
  modified_base 19..20: mod_base = OTHER; note = Phosphorothioate linkage
  modified_base 20: mod_base = OTHER; note = 2' O-methyl modified nucleoside
  modified_base 20..21: mod_base = OTHER; note = Phosphorothioate linkage
  modified_base 21: mod_base = OTHER; note = 2' O-methyl modified nucleoside
  source 1..21: mol_type = other RNA
agagtgaaagcgtaaggtatt

SEQ ID NO: 11102 - RNA, 21 nt, synthetic construct
  misc_feature 1..21: note = Description of Artificial Sequence: Synthetic oligonucleotide
  modified_base 1: mod_base = OTHER; note = 2' fluoro-modified nucleoside
  modified_base 1..2: mod_base = OTHER; note = Phosphorothioate linkage
  modified_base 2: mod_base = OTHER; note = 2' O-methyl modified nucleoside
  modified_base 2..3: mod_base = OTHER; note = Phosphorothioate linkage
  modified_base 3: mod_base = OTHER; note = 2' fluoro-modified nucleoside
  modified_base 4: mod_base = OTHER; note = 2' O-methyl modified nucleoside
  modified_base 5: mod_base = OTHER; note = 2' fluoro-modified nucleoside
  modified_base 6: mod_base = OTHER; note = 2' O-methyl modified nucleoside
  modified_base 7: mod_base = OTHER; note = 2' fluoro-modified nucleoside
  modified_base 8: mod_base = OTHER; note = 2' fluoro-modified nucleoside
  modified_base 9: mod_base = OTHER; note = 2' fluoro-modified nucleoside
  modified_base 10: mod_base = OTHER; note = 2' O-methyl modified nucleoside
  modified_base 11: mod_base = OTHER; note = 2' fluoro-modified nucleoside
  modified_base 12: mod_base = OTHER; note = 2' O-methyl modified nucleoside
  modified_base 13: mod_base = OTHER; note = 2' fluoro-modified nucleoside
  modified_base 14: mod_base = OTHER; note = 2' O-methyl modified nucleoside
  modified_base 15: mod_base = OTHER; note = 2' fluoro-modified nucleoside
  modified_base 16: mod_base = OTHER; note = 2' O-methyl modified nucleoside
  modified_base 17: mod_base = OTHER; note = 2' fluoro-modified nucleoside
  modified_base 18: mod_base = OTHER; note = 2' O-methyl modified nucleoside
  modified_base 19: mod_base = OTHER; note = 2' fluoro-modified nucleoside
  modified_base 19..20: mod_base = OTHER; note = Phosphorothioate linkage
  modified_base 20: mod_base = OTHER; note = 2' O-methyl modified nucleoside
  modified_base 20..21: mod_base = OTHER; note = Phosphorothioate linkage
  modified_base 21: mod_base = OTHER; note = 2' O-methyl modified nucleoside
  source 1..21: mol_type = other RNA
gagtgaaagcgtaaggttatt

SEQ ID NO: 11103 - RNA, 21 nt, synthetic construct
  misc_feature 1..21: note = Description of Artificial Sequence: Synthetic oligonucleotide
  modified_base 1: mod_base = OTHER; note = 2' fluoro-modified nucleoside
  modified_base 1..2: mod_base = OTHER; note = Phosphorothioate linkage
  modified_base 2: mod_base = OTHER; note = 2' O-methyl modified nucleoside
  modified_base 2..3: mod_base = OTHER; note = Phosphorothioate linkage
  modified_base 3: mod_base = OTHER; note = 2' fluoro-modified nucleoside
  modified_base 4: mod_base = OTHER; note = 2' O-methyl modified nucleoside
  modified_base 5: mod_base = OTHER; note = 2' fluoro-modified nucleoside
  modified_base 6: mod_base = OTHER; note = 2' O-methyl modified nucleoside
  modified_base 7: mod_base = OTHER; note = 2' fluoro-modified nucleoside
  modified_base 8: mod_base = OTHER; note = 2' fluoro-modified nucleoside
  modified_base 9: mod_base = OTHER; note = 2' fluoro-modified nucleoside
  modified_base 10: mod_base = OTHER; note = 2' O-methyl modified nucleoside
  modified_base 11: mod_base = OTHER; note = 2' fluoro-modified nucleoside
  modified_base 12: mod_base = OTHER; note = 2' O-methyl modified nucleoside
  modified_base 13: mod_base = OTHER; note = 2' fluoro-modified nucleoside
  modified_base 14: mod_base = OTHER; note = 2' O-methyl modified nucleoside
  modified_base 15: mod_base = OTHER; note = 2' fluoro-modified nucleoside
  modified_base 16: mod_base = OTHER; note = 2' O-methyl modified nucleoside
  modified_base 17: mod_base = OTHER; note = 2' fluoro-modified nucleoside
  modified_base 18: mod_base = OTHER; note = 2' O-methyl modified nucleoside
  modified_base 19: mod_base = OTHER; note = 2' fluoro-modified nucleoside
  modified_base 19..20: mod_base = OTHER; note = Phosphorothioate linkage
  modified_base 20: mod_base = OTHER; note = 2' O-methyl modified nucleoside
  modified_base 20..21: mod_base = OTHER; note = Phosphorothioate linkage
  modified_base 21: mod_base = OTHER; note = 2' O-methyl modified nucleoside
  source 1..21: mol_type = other RNA
agtgaaagcgtaaggttcatt

SEQ ID NO: 11104 - RNA, 21 nt, synthetic construct
  misc_feature 1..21: note = Description of Artificial Sequence: Synthetic oligonucleotide
  modified_base 1: mod_base = OTHER; note = 2' fluoro-modified nucleoside
  modified_base 1..2: mod_base = OTHER; note = Phosphorothioate linkage
  modified_base 2: mod_base = OTHER; note = 2' O-methyl modified nucleoside
  modified_base 2..3: mod_base = OTHER; note = Phosphorothioate linkage
  modified_base 3: mod_base = OTHER; note = 2' fluoro-modified nucleoside
  modified_base 4: mod_base = OTHER; note = 2' O-methyl modified nucleoside
  modified_base 5: mod_base = OTHER; note = 2' fluoro-modified nucleoside
  modified_base 6: mod_base = OTHER; note = 2' O-methyl modified nucleoside
  modified_base 7: mod_base = OTHER; note = 2' fluoro-modified nucleoside
  modified_base 8: mod_base = OTHER; note = 2' fluoro-modified nucleoside
  modified_base 9: mod_base = OTHER; note = 2' fluoro-modified nucleoside
  modified_base 10: mod_base = OTHER; note = 2' O-methyl modified nucleoside
  modified_base 11: mod_base = OTHER; note = 2' fluoro-modified nucleoside
  modified_base 12: mod_base = OTHER; note = 2' O-methyl modified nucleoside
  modified_base 13: mod_base = OTHER; note = 2' fluoro-modified nucleoside
  modified_base 14: mod_base = OTHER; note = 2' O-methyl modified nucleoside
  modified_base 15: mod_base = OTHER; note = 2' fluoro-modified nucleoside
  modified_base 16: mod_base = OTHER; note = 2' O-methyl modified nucleoside
  modified_base 17: mod_base = OTHER; note = 2' fluoro-modified nucleoside
  modified_base 18: mod_base = OTHER; note = 2' O-methyl modified nucleoside
  modified_base 19: mod_base = OTHER; note = 2' fluoro-modified nucleoside
  modified_base 19..20: mod_base = OTHER; note = Phosphorothioate linkage
  modified_base 20: mod_base = OTHER; note = 2' O-methyl modified nucleoside
  modified_base 20..21: mod_base = OTHER; note = Phosphorothioate linkage
  modified_base 21: mod_base = OTHER; note = 2' O-methyl modified nucleoside
  source 1..21: mol_type = other RNA
gcgtaaggttcagtcagcatt

SEQ ID NO: 11105 - RNA, 21 nt, synthetic construct
  misc_feature 1..21: note = Description of Artificial Sequence: Synthetic oligonucleotide
  modified_base 1: mod_base = OTHER; note = 2' fluoro-modified nucleoside
  modified_base 1..2: mod_base = OTHER; note = Phosphorothioate linkage
  modified_base 2: mod_base = OTHER; note = 2' O-methyl modified nucleoside
  modified_base 2..3: mod_base = OTHER; note = Phosphorothioate linkage
  modified_base 3: mod_base = OTHER; note = 2' fluoro-modified nucleoside
  modified_base 4: mod_base = OTHER; note = 2' O-methyl modified nucleoside
  modified_base 5: mod_base = OTHER; note = 2' fluoro-modified nucleoside
  modified_base 6: mod_base = OTHER; note = 2' O-methyl modified nucleoside
  modified_base 7: mod_base = OTHER; note = 2' fluoro-modified nucleoside
  modified_base 8: mod_base = OTHER; note = 2' fluoro-modified nucleoside
  modified_base 9: mod_base = OTHER; note = 2' fluoro-modified nucleoside
  modified_base 10: mod_base = OTHER; note = 2' O-methyl modified nucleoside
  modified_base 11: mod_base = OTHER; note = 2' fluoro-modified nucleoside
  modified_base 12: mod_base = OTHER; note = 2' O-methyl modified nucleoside
  modified_base 13: mod_base = OTHER; note = 2' fluoro-modified nucleoside
  modified_base 14: mod_base = OTHER; note = 2' O-methyl modified nucleoside
  modified_base 15: mod_base = OTHER; note = 2' fluoro-modified nucleoside
  modified_base 16: mod_base = OTHER; note = 2' O-methyl modified nucleoside
  modified_base 17: mod_base = OTHER; note = 2' fluoro-modified nucleoside
  modified_base 18: mod_base = OTHER; note = 2' O-methyl modified nucleoside
  modified_base 19: mod_base = OTHER; note = 2' fluoro-modified nucleoside
  modified_base 19..20: mod_base = OTHER; note = Phosphorothioate linkage
  modified_base 20: mod_base = OTHER; note = 2' O-methyl modified nucleoside
  modified_base 20..21: mod_base = OTHER; note = Phosphorothioate linkage
  modified_base 21: mod_base = OTHER; note = 2' O-methyl modified nucleoside
  source 1..21: mol_type = other RNA
tcacccaaacccacaaaaatt

SEQ ID NO: 11106 - RNA, 21 nt, synthetic construct
  misc_feature 1..21: note = Description of Artificial Sequence: Synthetic oligonucleotide
  modified_base 1: mod_base = OTHER; note = 2' fluoro-modified nucleoside
  modified_base 1..2: mod_base = OTHER; note = Phosphorothioate linkage
  modified_base 2: mod_base = OTHER; note = 2' O-methyl modified nucleoside
  modified_base 2..3: mod_base = OTHER; note = Phosphorothioate linkage
  modified_base 3: mod_base = OTHER; note = 2' fluoro-modified nucleoside
  modified_base 4: mod_base = OTHER; note = 2' O-methyl modified nucleoside
  modified_base 5: mod_base = OTHER; note = 2' fluoro-modified nucleoside
  modified_base 6: mod_base = OTHER; note = 2' O-methyl modified nucleoside
  modified_base 7: mod_base = OTHER; note = 2' fluoro-modified nucleoside
  modified_base 8: mod_base = OTHER; note = 2' fluoro-modified nucleoside
  modified_base 9: mod_base = OTHER; note = 2' fluoro-modified nucleoside
  modified_base 10: mod_base = OTHER; note = 2' O-methyl modified nucleoside
  modified_base 11: mod_base = OTHER; note = 2' fluoro-modified nucleoside
  modified_base 12: mod_base = OTHER; note = 2' O-methyl modified nucleoside
  modified_base 13: mod_base = OTHER; note = 2' fluoro-modified nucleoside
  modified_base 14: mod_base = OTHER; note = 2' O-methyl modified nucleoside
  modified_base 15: mod_base = OTHER; note = 2' fluoro-modified nucleoside
  modified_base 16: mod_base = OTHER; note = 2' O-methyl modified nucleoside
  modified_base 17: mod_base = OTHER; note = 2' fluoro-modified nucleoside
  modified_base 18: mod_base = OTHER; note = 2' O-methyl modified nucleoside
  modified_base 19: mod_base = OTHER; note = 2' fluoro-modified nucleoside
  modified_base 19..20: mod_base = OTHER; note = Phosphorothioate linkage
  modified_base 20: mod_base = OTHER; note = 2' O-methyl modified nucleoside
  modified_base 20..21: mod_base = OTHER; note = Phosphorothioate linkage
  modified_base 21: mod_base = OTHER; note = 2' O-methyl modified nucleoside
  source 1..21: mol_type = other RNA
ggctctgcattttcatcgatt

SEQ ID NO: 11107 - RNA, 21 nt, synthetic construct
  misc_feature 1..21: note = Description of Artificial Sequence: Synthetic oligonucleotide
  modified_base 1: mod_base = OTHER; note = 2' fluoro-modified nucleoside
  modified_base 1..2: mod_base = OTHER; note = Phosphorothioate linkage
  modified_base 2: mod_base = OTHER; note = 2' O-methyl modified nucleoside
  modified_base 2..3: mod_base = OTHER; note = Phosphorothioate linkage
  modified_base 3: mod_base = OTHER; note = 2' fluoro-modified nucleoside
  modified_base 4: mod_base = OTHER; note = 2' O-methyl modified nucleoside
  modified_base 5: mod_base = OTHER; note = 2' fluoro-modified nucleoside
  modified_base 6: mod_base = OTHER; note = 2' O-methyl modified nucleoside
  modified_base 7: mod_base = OTHER; note = 2' fluoro-modified nucleoside
  modified_base 8: mod_base = OTHER; note = 2' fluoro-modified nucleoside
  modified_base 9: mod_base = OTHER; note = 2' fluoro-modified nucleoside
  modified_base 10: mod_base = OTHER; note = 2' O-methyl modified nucleoside
  modified_base 11: mod_base = OTHER; note = 2' fluoro-modified nucleoside
  modified_base 12: mod_base = OTHER; note = 2' O-methyl modified nucleoside
  modified_base 13: mod_base = OTHER; note = 2' fluoro-modified nucleoside
  modified_base 14: mod_base = OTHER; note = 2' O-methyl modified nucleoside
  modified_base 15: mod_base = OTHER; note = 2' fluoro-modified nucleoside
  modified_base 16: mod_base = OTHER; note = 2' O-methyl modified nucleoside
  modified_base 17: mod_base = OTHER; note = 2' fluoro-modified nucleoside
  modified_base 18: mod_base = OTHER; note = 2' O-methyl modified nucleoside
  modified_base 19: mod_base = OTHER; note = 2' fluoro-modified nucleoside
  modified_base 19..20: mod_base = OTHER; note = Phosphorothioate linkage
  modified_base 20: mod_base = OTHER; note = 2' O-methyl modified nucleoside
  modified_base 20..21: mod_base = OTHER; note = Phosphorothioate linkage
  modified_base 21: mod_base = OTHER; note = 2' O-methyl modified nucleoside
  source 1..21: mol_type = other RNA
atcgtggcctttgtcagcatt

SEQ ID NO: 11108 - RNA, 21 nt, synthetic construct
  misc_feature 1..21: note = Description of Artificial Sequence: Synthetic oligonucleotide
  modified_base 1: mod_base = OTHER; note = 2' fluoro-modified nucleoside
  modified_base 1..2: mod_base = OTHER; note = Phosphorothioate linkage
  modified_base 2: mod_base = OTHER; note = 2' O-methyl modified nucleoside
  modified_base 2..3: mod_base = OTHER; note = Phosphorothioate linkage
  modified_base 3: mod_base = OTHER; note = 2' fluoro-modified nucleoside
  modified_base 4: mod_base = OTHER; note = 2' O-methyl modified nucleoside
  modified_base 5: mod_base = OTHER; note = 2' fluoro-modified nucleoside
  modified_base 6: mod_base = OTHER; note = 2' O-methyl modified nucleoside
  modified_base 7: mod_base = OTHER; note = 2' fluoro-modified nucleoside
  modified_base 8: mod_base = OTHER; note = 2' fluoro-modified nucleoside
  modified_base 9: mod_base = OTHER; note = 2' fluoro-modified nucleoside
  modified_base 10: mod_base = OTHER; note = 2' O-methyl modified nucleoside
  modified_base 11: mod_base = OTHER; note = 2' fluoro-modified nucleoside
  modified_base 12: mod_base = OTHER; note = 2' O-methyl modified nucleoside
  modified_base 13: mod_base = OTHER; note = 2' fluoro-modified nucleoside
  modified_base 14: mod_base = OTHER; note = 2' O-methyl modified nucleoside
  modified_base 15: mod_base = OTHER; note = 2' fluoro-modified nucleoside
  modified_base 16: mod_base = OTHER; note = 2' O-methyl modified nucleoside
  modified_base 17: mod_base = OTHER; note = 2' fluoro-modified nucleoside
  modified_base 18: mod_base = OTHER; note = 2' O-methyl modified nucleoside
  modified_base 19: mod_base = OTHER; note = 2' fluoro-modified nucleoside
  modified_base 19..20: mod_base = OTHER; note = Phosphorothioate linkage
  modified_base 20: mod_base = OTHER; note = 2' O-methyl modified nucleoside
  modified_base 20..21: mod_base = OTHER; note = Phosphorothioate linkage
  modified_base 21: mod_base = OTHER; note = 2' O-methyl modified nucleoside
  source 1..21: mol_type = other RNA
tcgtggcctttgtcagccatt

SEQ ID NO: 11109 - RNA, 21 nt, synthetic construct
  misc_feature 1..21: note = Description of Artificial Sequence: Synthetic oligonucleotide
  modified_base 1: mod_base = OTHER; note = 2' fluoro-modified nucleoside
  modified_base 1..2: mod_base = OTHER; note = Phosphorothioate linkage
  modified_base 2: mod_base = OTHER; note = 2' O-methyl modified nucleoside
  modified_base 2..3: mod_base = OTHER; note = Phosphorothioate linkage
  modified_base 3: mod_base = OTHER; note = 2' fluoro-modified nucleoside
  modified_base 4: mod_base = OTHER; note = 2' O-methyl modified nucleoside
  modified_base 5: mod_base = OTHER; note = 2' fluoro-modified nucleoside
  modified_base 6: mod_base = OTHER; note = 2' O-methyl modified nucleoside
  modified_base 7: mod_base = OTHER; note = 2' fluoro-modified nucleoside
  modified_base 8: mod_base = OTHER; note = 2' fluoro-modified nucleoside
  modified_base 9: mod_base = OTHER; note = 2' fluoro-modified nucleoside
  modified_base 10: mod_base = OTHER; note = 2' O-methyl modified nucleoside
  modified_base 11: mod_base = OTHER; note = 2' fluoro-modified nucleoside
  modified_base 12: mod_base = OTHER; note = 2' O-methyl modified nucleoside
  modified_base 13: mod_base = OTHER; note = 2' fluoro-modified nucleoside
  modified_base 14: mod_base = OTHER; note = 2' O-methyl modified nucleoside
  modified_base 15: mod_base = OTHER; note = 2' fluoro-modified nucleoside
  modified_base 16: mod_base = OTHER; note = 2' O-methyl modified nucleoside
  modified_base 17: mod_base = OTHER; note = 2' fluoro-modified nucleoside
  modified_base 18: mod_base = OTHER; note = 2' O-methyl modified nucleoside
  modified_base 19: mod_base = OTHER; note = 2' fluoro-modified nucleoside
  modified_base 19..20: mod_base = OTHER; note = Phosphorothioate linkage
  modified_base 20: mod_base = OTHER; note = 2' O-methyl modified nucleoside
  modified_base 20..21: mod_base = OTHER; note = Phosphorothioate linkage
  modified_base 21: mod_base = OTHER; note = 2' O-methyl modified nucleoside
  source 1..21: mol_type = other RNA
gcaagcgcatggagtcgcatt

SEQ ID NO: 11110 - RNA, 21 nt, synthetic construct
  misc_feature 1..21: note = Description of Artificial Sequence: Synthetic oligonucleotide
  modified_base 1: mod_base = OTHER; note = 2' fluoro-modified nucleoside
  modified_base 1..2: mod_base = OTHER; note = Phosphorothioate linkage
  modified_base 2: mod_base = OTHER; note = 2' O-methyl modified nucleoside
  modified_base 2..3: mod_base = OTHER; note = Phosphorothioate linkage
  modified_base 3: mod_base = OTHER; note = 2' fluoro-modified nucleoside
  modified_base 4: mod_base = OTHER; note = 2' O-methyl modified nucleoside
  modified_base 5: mod_base = OTHER; note = 2' fluoro-modified nucleoside
  modified_base 6: mod_base = OTHER; note = 2' O-methyl modified nucleoside
  modified_base 7: mod_base = OTHER; note = 2' fluoro-modified nucleoside
  modified_base 8: mod_base = OTHER; note = 2' fluoro-modified nucleoside
  modified_base 9: mod_base = OTHER; note = 2' fluoro-modified nucleoside
  modified_base 10: mod_base = OTHER; note = 2' O-methyl modified nucleoside
  modified_base 11: mod_base = OTHER; note = 2' fluoro-modified nucleoside
  modified_base 12: mod_base = OTHER; note = 2' O-methyl modified nucleoside
  modified_base 13: mod_base = OTHER; note = 2' fluoro-modified nucleoside
  modified_base 14: mod_base = OTHER; note = 2' O-methyl modified nucleoside
  modified_base 15: mod_base = OTHER; note = 2' fluoro-modified nucleoside
  modified_base 16: mod_base = OTHER; note = 2' O-methyl modified nucleoside
  modified_base 17: mod_base = OTHER; note = 2' fluoro-modified nucleoside
  modified_base 18: mod_base = OTHER; note = 2' O-methyl modified nucleoside
  modified_base 19: mod_base = OTHER; note = 2' fluoro-modified nucleoside
  modified_base 19..20: mod_base = OTHER; note = Phosphorothioate linkage
  modified_base 20: mod_base = OTHER; note = 2' O-methyl modified nucleoside
  modified_base 20..21: mod_base = OTHER; note = Phosphorothioate linkage
  modified_base 21: mod_base = OTHER; note = 2' O-methyl modified nucleoside
  source 1..21: mol_type = other RNA
caagcgcatggagtcgcgatt

SEQ ID NO: 11111 - RNA, 21 nt, synthetic construct
  misc_feature 1..21: note = Description of Artificial Sequence: Synthetic oligonucleotide
  modified_base 1: mod_base = OTHER; note = 2' fluoro-modified nucleoside
  modified_base 1..2: mod_base = OTHER; note = Phosphorothioate linkage
  modified_base 2: mod_base = OTHER; note = 2' O-methyl modified nucleoside
  modified_base 2..3: mod_base = OTHER; note = Phosphorothioate linkage
  modified_base 3: mod_base = OTHER; note = 2' fluoro-modified nucleoside
  modified_base 4: mod_base = OTHER; note = 2' O-methyl modified nucleoside
  modified_base 5: mod_base = OTHER; note = 2' fluoro-modified nucleoside
  modified_base 6: mod_base = OTHER; note = 2' O-methyl modified nucleoside
  modified_base 7: mod_base = OTHER; note = 2' fluoro-modified nucleoside
  modified_base 8: mod_base = OTHER; note = 2' fluoro-modified nucleoside
  modified_base 9: mod_base = OTHER; note = 2' fluoro-modified nucleoside
  modified_base 10: mod_base = OTHER; note = 2' O-methyl modified nucleoside
  modified_base 11: mod_base = OTHER; note = 2' fluoro-modified nucleoside
  modified_base 12: mod_base = OTHER; note = 2' O-methyl modified nucleoside
  modified_base 13: mod_base = OTHER; note = 2' fluoro-modified nucleoside
  modified_base 14: mod_base = OTHER; note = 2' O-methyl modified nucleoside
  modified_base 15: mod_base = OTHER; note = 2' fluoro-modified nucleoside
  modified_base 16: mod_base = OTHER; note = 2' O-methyl modified nucleoside
  modified_base 17: mod_base = OTHER; note = 2' fluoro-modified nucleoside
  modified_base 18: mod_base = OTHER; note = 2' O-methyl modified nucleoside
  modified_base 19: mod_base = OTHER; note = 2' fluoro-modified nucleoside
  modified_base 19..20: mod_base = OTHER; note = Phosphorothioate linkage
  modified_base 20: mod_base = OTHER; note = 2' O-methyl modified nucleoside
  modified_base 20..21: mod_base = OTHER; note = Phosphorothioate linkage
  modified_base 21: mod_base = OTHER; note = 2' O-methyl modified nucleoside
  source 1..21: mol_type = other RNA
aagcgcatggagtcgcggatt

SEQ ID NO: 11112 - RNA, 21 nt, synthetic construct
  misc_feature 1..21: note = Description of Artificial Sequence: Synthetic oligonucleotide
  modified_base 1: mod_base = OTHER; note = 2' fluoro-modified nucleoside
  modified_base 1..2: mod_base = OTHER; note = Phosphorothioate linkage
  modified_base 2: mod_base = OTHER; note = 2' O-methyl modified nucleoside
  modified_base 2..3: mod_base = OTHER; note = Phosphorothioate linkage
  modified_base 3: mod_base = OTHER; note = 2' fluoro-modified nucleoside
  modified_base 4: mod_base = OTHER; note = 2' O-methyl modified nucleoside
  modified_base 5: mod_base = OTHER; note = 2' fluoro-modified nucleoside
  modified_base 6: mod_base = OTHER; note = 2' O-methyl modified nucleoside
  modified_base 7: mod_base = OTHER; note = 2' fluoro-modified nucleoside
  modified_base 8: mod_base = OTHER; note = 2' fluoro-modified nucleoside
  modified_base 9: mod_base = OTHER; note = 2' fluoro-modified nucleoside
  modified_base 10: mod_base = OTHER; note = 2' O-methyl modified nucleoside
  modified_base 11: mod_base = OTHER; note = 2' fluoro-modified nucleoside
  modified_base 12: mod_base = OTHER; note = 2' O-methyl modified nucleoside
  modified_base 13: mod_base = OTHER; note = 2' fluoro-modified nucleoside
  modified_base 14: mod_base = OTHER; note = 2' O-methyl modified nucleoside
  modified_base 15: mod_base = OTHER; note = 2' fluoro-modified nucleoside
  modified_base 16: mod_base = OTHER; note = 2' O-methyl modified nucleoside
  modified_base 17: mod_base = OTHER; note = 2' fluoro-modified nucleoside
  modified_base 18: mod_base = OTHER; note = 2' O-methyl modified nucleoside
  modified_base 19: mod_base = OTHER; note = 2' fluoro-modified nucleoside
  modified_base 19..20: mod_base = OTHER; note = Phosphorothioate linkage
  modified_base 20: mod_base = OTHER; note = 2' O-methyl modified nucleoside
  modified_base 20..21: mod_base = OTHER; note = Phosphorothioate linkage
  modified_base 21: mod_base = OTHER; note = 2' O-methyl modified nucleoside
  source 1..21: mol_type = other RNA
ggagtcgcggctcacagaatt

SEQ ID NO: 11113 - RNA, 21 nt, synthetic construct
  misc_feature 1..21: note = Description of Artificial Sequence: Synthetic oligonucleotide
  modified_base 1: mod_base = OTHER; note = 2' fluoro-modified nucleoside
  modified_base 1..2: mod_base = OTHER; note = Phosphorothioate linkage
  modified_base 2: mod_base = OTHER; note = 2' O-methyl modified nucleoside
  modified_base 2..3: mod_base = OTHER; note = Phosphorothioate linkage
  modified_base 3: mod_base = OTHER; note = 2' fluoro-modified nucleoside
  modified_base 4: mod_base = OTHER; note = 2' O-methyl modified nucleoside
  modified_base 5: mod_base = OTHER; note = 2' fluoro-modified nucleoside
  modified_base 6: mod_base = OTHER; note = 2' O-methyl modified nucleoside
  modified_base 7: mod_base = OTHER; note = 2' fluoro-modified nucleoside
  modified_base 8: mod_base = OTHER; note = 2' fluoro-modified nucleoside
  modified_base 9: mod_base = OTHER; note = 2' fluoro-modified nucleoside
  modified_base 10: mod_base = OTHER; note = 2' O-methyl modified nucleoside
  modified_base 11: mod_base = OTHER; note = 2' fluoro-modified nucleoside
  modified_base 12: mod_base = OTHER; note = 2' O-methyl modified nucleoside
  modified_base 13: mod_base = OTHER; note = 2' fluoro-modified nucleoside
  modified_base 14: mod_base = OTHER; note = 2' O-methyl modified nucleoside
  modified_base 15: mod_base = OTHER; note = 2' fluoro-modified nucleoside
  modified_base 16: mod_base = OTHER; note = 2' O-methyl modified nucleoside
  modified_base 17: mod_base = OTHER; note = 2' fluoro-modified nucleoside
  modified_base 18: mod_base = OTHER; note = 2' O-methyl modified nucleoside
  modified_base 19: mod_base = OTHER; note = 2' fluoro-modified nucleoside
  modified_base 19..20: mod_base = OTHER; note = Phosphorothioate linkage
  modified_base 20: mod_base = OTHER; note = 2' O-methyl modified nucleoside
  modified_base 20..21: mod_base = OTHER; note = Phosphorothioate linkage
  modified_base 21: mod_base = OTHER; note = 2' O-methyl modified nucleoside
  source 1..21: mol_type = other RNA
gagtcgcggctcacagatatt

SEQ ID NO: 11114 - RNA, 21 nt, synthetic construct
  misc_feature 1..21: note = Description of Artificial Sequence: Synthetic oligonucleotide
  modified_base 1: mod_base = OTHER; note = 2' fluoro-modified nucleoside
  modified_base 1..2: mod_base = OTHER; note = Phosphorothioate linkage
  modified_base 2: mod_base = OTHER; note = 2' O-methyl modified nucleoside
  modified_base 2..3: mod_base = OTHER; note = Phosphorothioate linkage
  modified_base 3: mod_base = OTHER; note = 2' fluoro-modified nucleoside
  modified_base 4: mod_base = OTHER; note = 2' O-methyl modified nucleoside
  modified_base 5: mod_base = OTHER; note = 2' fluoro-modified nucleoside
  modified_base 6: mod_base = OTHER; note = 2' O-methyl modified nucleoside
  modified_base 7: mod_base = OTHER; note = 2' fluoro-modified nucleoside
  modified_base 8: mod_base = OTHER; note = 2' fluoro-modified nucleoside
  modified_base 9: mod_base = OTHER; note = 2' fluoro-modified nucleoside
  modified_base 10: mod_base = OTHER; note = 2' O-methyl modified nucleoside
  modified_base 11: mod_base = OTHER; note = 2' fluoro-modified nucleoside
  modified_base 12: mod_base = OTHER; note = 2' O-methyl modified nucleoside
  modified_base 13: mod_base = OTHER; note = 2' fluoro-modified nucleoside
  modified_base 14: mod_base = OTHER; note = 2' O-methyl modified nucleoside
  modified_base 15: mod_base = OTHER; note = 2' fluoro-modified nucleoside
  modified_base 16: mod_base = OTHER; note = 2' O-methyl modified nucleoside
  modified_base 17: mod_base = OTHER; note = 2' fluoro-modified nucleoside
  modified_base 18: mod_base = OTHER; note = 2' O-methyl modified nucleoside
  modified_base 19: mod_base = OTHER; note = 2' fluoro-modified nucleoside
  modified_base 19..20: mod_base = OTHER; note = Phosphorothioate linkage
  modified_base 20: mod_base = OTHER; note = 2' O-methyl modified nucleoside
  modified_base 20..21: mod_base = OTHER; note = Phosphorothioate linkage
  modified_base 21: mod_base = OTHER; note = 2' O-methyl modified nucleoside
  source 1..21: mol_type = other RNA
gtcgcggctcacagatgcatt

SEQ ID NO: 11115 - RNA, 21 nt, synthetic construct
  misc_feature 1..21: note = Description of Artificial Sequence: Synthetic oligonucleotide
  modified_base 1: mod_base = OTHER; note = 2' fluoro-modified nucleoside
  modified_base 1..2: mod_base = OTHER; note = Phosphorothioate linkage
  modified_base 2: mod_base = OTHER; note = 2' O-methyl modified nucleoside
  modified_base 2..3: mod_base = OTHER; note = Phosphorothioate linkage
  modified_base 3: mod_base = OTHER; note = 2' fluoro-modified nucleoside
  modified_base 4: mod_base = OTHER; note = 2' O-methyl modified nucleoside
  modified_base 5: mod_base = OTHER; note = 2' fluoro-modified nucleoside
  modified_base 6: mod_base = OTHER; note = 2' O-methyl modified nucleoside
  modified_base 7: mod_base = OTHER; note = 2' fluoro-modified nucleoside
  modified_base 8: mod_base = OTHER; note = 2' fluoro-modified nucleoside
  modified_base 9: mod_base = OTHER; note = 2' fluoro-modified nucleoside
  modified_base 10: mod_base = OTHER; note = 2' O-methyl modified nucleoside
  modified_base 11: mod_base = OTHER; note = 2' fluoro-modified nucleoside
  modified_base 12: mod_base = OTHER; note = 2' O-methyl modified nucleoside
  modified_base 13: mod_base = OTHER; note = 2' fluoro-modified nucleoside
  modified_base 14: mod_base = OTHER; note = 2' O-methyl modified nucleoside
  modified_base 15: mod_base = OTHER; note = 2' fluoro-modified nucleoside
  modified_base 16: mod_base = OTHER; note = 2' O-methyl modified nucleoside
  modified_base 17: mod_base = OTHER; note = 2' fluoro-modified nucleoside
  modified_base 18: mod_base = OTHER; note = 2' O-methyl modified nucleoside
  modified_base 19: mod_base = OTHER; note = 2' fluoro-modified nucleoside
  modified_base 19..20: mod_base = OTHER; note = Phosphorothioate linkage
  modified_base 20: mod_base = OTHER; note = 2' O-methyl modified nucleoside
  modified_base 20..21: mod_base = OTHER; note = Phosphorothioate linkage
  modified_base 21: mod_base = OTHER; note = 2' O-methyl modified nucleoside
  source 1..21: mol_type = other RNA
gacggtcactcagacctcatt

SEQ ID NO: 11116 - RNA, 21 nt, synthetic construct
  misc_feature 1..21: note = Description of Artificial Sequence: Synthetic oligonucleotide
  modified_base 1: mod_base = OTHER; note = 2' fluoro-modified nucleoside
  modified_base 1..2: mod_base = OTHER; note = Phosphorothioate linkage
  modified_base 2: mod_base = OTHER; note = 2' O-methyl modified nucleoside
  modified_base 2..3: mod_base = OTHER; note = Phosphorothioate linkage
  modified_base 3: mod_base = OTHER; note = 2' fluoro-modified nucleoside
  modified_base 4: mod_base = OTHER; note = 2' O-methyl modified nucleoside
  modified_base 5: mod_base = OTHER; note = 2' fluoro-modified nucleoside
  modified_base 6: mod_base = OTHER; note = 2' O-methyl modified nucleoside
  modified_base 7: mod_base = OTHER; note = 2' fluoro-modified nucleoside
  modified_base 8: mod_base = OTHER; note = 2' fluoro-modified nucleoside
  modified_base 9: mod_base = OTHER; note = 2' fluoro-modified nucleoside
  modified_base 10: mod_base = OTHER; note = 2' O-methyl modified nucleoside
  modified_base 11: mod_base = OTHER; note = 2' fluoro-modified nucleoside
  modified_base 12: mod_base = OTHER; note = 2' O-methyl modified nucleoside
  modified_base 13: mod_base = OTHER; note = 2' fluoro-modified nucleoside
  modified_base 14: mod_base = OTHER; note = 2' O-methyl modified nucleoside
  modified_base 15: mod_base = OTHER; note = 2' fluoro-modified nucleoside
  modified_base 16: mod_base = OTHER; note = 2' O-methyl modified nucleoside
  modified_base 17: mod_base = OTHER; note = 2' fluoro-modified nucleoside
  modified_base 18: mod_base = OTHER; note = 2' O-methyl modified nucleoside
  modified_base 19: mod_base = OTHER; note = 2' fluoro-modified nucleoside
  modified_base 19..20: mod_base = OTHER; note = Phosphorothioate linkage
  modified_base 20: mod_base = OTHER; note = 2' O-methyl modified nucleoside
  modified_base 20..21: mod_base = OTHER; note = Phosphorothioate linkage
  modified_base 21: mod_base = OTHER; note = 2' O-methyl modified nucleoside
  source 1..21: mol_type = other RNA
ctcagacctccgcagatgatt

SEQ ID NO: 11117 - RNA, 21 nt, synthetic construct
  misc_feature 1..21: note = Description of Artificial Sequence: Synthetic oligonucleotide
  modified_base 1: mod_base = OTHER; note = 2' fluoro-modified nucleoside
  modified_base 1..2: mod_base = OTHER; note = Phosphorothioate linkage
  modified_base 2: mod_base = OTHER; note = 2' O-methyl modified nucleoside
  modified_base 2..3: mod_base = OTHER; note = Phosphorothioate linkage
  modified_base 3: mod_base = OTHER; note = 2' fluoro-modified nucleoside
  modified_base 4: mod_base = OTHER; note = 2' O-methyl modified nucleoside
  modified_base 5: mod_base = OTHER; note = 2' fluoro-modified nucleoside
  modified_base 6: mod_base = OTHER; note = 2' O-methyl modified nucleoside
  modified_base 7: mod_base = OTHER; note = 2' fluoro-modified nucleoside
  modified_base 8: mod_base = OTHER; note = 2' fluoro-modified nucleoside
  modified_base 9: mod_base = OTHER; note = 2' fluoro-modified nucleoside
  modified_base 10: mod_base = OTHER; note = 2' O-methyl modified nucleoside
  modified_base 11: mod_base = OTHER; note = 2' fluoro-modified nucleoside
  modified_base 12: mod_base = OTHER; note = 2' O-methyl modified nucleoside
  modified_base 13: mod_base = OTHER; note = 2' fluoro-modified nucleoside
  modified_base 14: mod_base = OTHER; note = 2' O-methyl modified nucleoside
  modified_base 15: mod_base = OTHER; note = 2' fluoro-modified nucleoside
  modified_base 16: mod_base = OTHER; note = 2' O-methyl modified nucleoside
  modified_base 17: mod_base = OTHER; note = 2' fluoro-modified nucleoside
  modified_base 18: mod_base = OTHER; note = 2' O-methyl modified nucleoside
  modified_base 19: mod_base = OTHER; note = 2' fluoro-modified nucleoside
  modified_base 19..20: mod_base = OTHER; note = Phosphorothioate linkage
  modified_base 20: mod_base = OTHER; note = 2' O-methyl modified nucleoside
  modified_base 20..21: mod_base = OTHER; note = Phosphorothioate linkage
  modified_base 21: mod_base = OTHER; note = 2' O-methyl modified nucleoside
  source 1..21: mol_type = other RNA
tcagacctccgcagatgcatt

SEQ ID NO: 11118 - RNA, 21 nt, synthetic construct
  misc_feature 1..21: note = Description of Artificial Sequence: Synthetic oligonucleotide
  modified_base 1: mod_base = OTHER; note = 2' fluoro-modified nucleoside
  modified_base 1..2: mod_base = OTHER; note = Phosphorothioate linkage
  modified_base 2: mod_base = OTHER; note = 2' O-methyl modified nucleoside
  modified_base 2..3: mod_base = OTHER; note = Phosphorothioate linkage
  modified_base 3: mod_base = OTHER; note = 2' fluoro-modified nucleoside
  modified_base 4: mod_base = OTHER; note = 2' O-methyl modified nucleoside
  modified_base 5: mod_base = OTHER; note = 2' fluoro-modified nucleoside
  modified_base 6: mod_base = OTHER; note = 2' O-methyl modified nucleoside
  modified_base 7: mod_base = OTHER; note = 2' fluoro-modified nucleoside
  modified_base 8: mod_base = OTHER; note = 2' fluoro-modified nucleoside
  modified_base 9: mod_base = OTHER; note = 2' fluoro-modified nucleoside
  modified_base 10: mod_base = OTHER; note = 2' O-methyl modified nucleoside
  modified_base 11: mod_base = OTHER; note = 2' fluoro-modified nucleoside
  modified_base 12: mod_base = OTHER; note = 2' O-methyl modified nucleoside
  modified_base 13: mod_base = OTHER; note = 2' fluoro-modified nucleoside
  modified_base 14: mod_base = OTHER; note = 2' O-methyl modified nucleoside
  modified_base 15: mod_base = OTHER; note = 2' fluoro-modified nucleoside
  modified_base 16: mod_base = OTHER; note = 2' O-methyl modified nucleoside
  modified_base 17: mod_base = OTHER; note = 2' fluoro-modified nucleoside
  modified_base 18: mod_base = OTHER; note = 2' O-methyl modified nucleoside
  modified_base 19: mod_base = OTHER; note = 2' fluoro-modified nucleoside
  modified_base 19..20: mod_base = OTHER; note = Phosphorothioate linkage
  modified_base 20: mod_base = OTHER; note = 2' O-methyl modified nucleoside
  modified_base 20..21: mod_base = OTHER; note = Phosphorothioate linkage
  modified_base 21: mod_base = OTHER; note = 2' O-methyl modified nucleoside
  source 1..21: mol_type = other RNA
cctccgcagatgccatctatt

SEQ ID NO: 11119 - RNA, 21 nt, synthetic construct
  misc_feature 1..21: note = Description of Artificial Sequence: Synthetic oligonucleotide
  modified_base 1: mod_base = OTHER; note = 2' fluoro-modified nucleoside
  modified_base 1..2: mod_base = OTHER; note = Phosphorothioate linkage
  modified_base 2: mod_base = OTHER; note = 2' O-methyl modified nucleoside
  modified_base 2..3: mod_base = OTHER; note = Phosphorothioate linkage
  modified_base 3: mod_base = OTHER; note = 2' fluoro-modified nucleoside
  modified_base 4: mod_base = OTHER; note = 2' O-methyl modified nucleoside
  modified_base 5: mod_base = OTHER; note = 2' fluoro-modified nucleoside
  modified_base 6: mod_base = OTHER; note = 2' O-methyl modified nucleoside
  modified_base 7: mod_base = OTHER; note = 2' fluoro-modified nucleoside
  modified_base 8: mod_base = OTHER; note = 2' fluoro-modified nucleoside
  modified_base 9: mod_base = OTHER; note = 2' fluoro-modified nucleoside
  modified_base 10: mod_base = OTHER; note = 2' O-methyl modified nucleoside
  modified_base 11: mod_base = OTHER; note = 2' fluoro-modified nucleoside
  modified_base 12: mod_base = OTHER; note = 2' O-methyl modified nucleoside
  modified_base 13: mod_base = OTHER; note = 2' fluoro-modified nucleoside
  modified_base 14: mod_base = OTHER; note = 2' O-methyl modified nucleoside
  modified_base 15: mod_base = OTHER; note = 2' fluoro-modified nucleoside
  modified_base 16: mod_base = OTHER; note = 2' O-methyl modified nucleoside
  modified_base 17: mod_base = OTHER; note = 2' fluoro-modified nucleoside
  modified_base 18: mod_base = OTHER; note = 2' O-methyl modified nucleoside
  modified_base 19: mod_base = OTHER; note = 2' fluoro-modified nucleoside
  modified_base 19..20: mod_base = OTHER; note = Phosphorothioate linkage
  modified_base 20: mod_base = OTHER; note = 2' O-methyl modified nucleoside
  modified_base 20..21: mod_base = OTHER; note = Phosphorothioate linkage
  modified_base 21: mod_base = OTHER; note = 2' O-methyl modified nucleoside
  source 1..21: mol_type = other RNA
ctccgcagatgccatctaatt

SEQ ID NO: 11120 - RNA, 21 nt, synthetic construct
  misc_feature 1..21: note = Description of Artificial Sequence: Synthetic oligonucleotide
  modified_base 1: mod_base = OTHER; note = 2' fluoro-modified nucleoside
  modified_base 1..2: mod_base = OTHER; note = Phosphorothioate linkage
  modified_base 2: mod_base = OTHER; note = 2' O-methyl modified nucleoside
  modified_base 2..3: mod_base = OTHER; note = Phosphorothioate linkage
  modified_base 3: mod_base = OTHER; note = 2' fluoro-modified nucleoside
  modified_base 4: mod_base = OTHER; note = 2' O-methyl modified nucleoside
  modified_base 5: mod_base = OTHER; note = 2' fluoro-modified nucleoside
  modified_base 6: mod_base = OTHER; note = 2' O-methyl modified nucleoside
  modified_base 7: mod_base = OTHER; note = 2' fluoro-modified nucleoside
  modified_base 8: mod_base = OTHER; note = 2' fluoro-modified nucleoside
  modified_base 9: mod_base = OTHER; note = 2' fluoro-modified nucleoside
  modified_base 10: mod_base = OTHER; note = 2' O-methyl modified nucleoside
  modified_base 11: mod_base = OTHER; note = 2' fluoro-modified nucleoside
  modified_base 12: mod_base = OTHER; note = 2' O-methyl modified nucleoside
  modified_base 13: mod_base = OTHER; note = 2' fluoro-modified nucleoside
  modified_base 14: mod_base = OTHER; note = 2' O-methyl modified nucleoside
  modified_base 15: mod_base = OTHER; note = 2' fluoro-modified nucleoside
  modified_base 16: mod_base = OTHER; note = 2' O-methyl modified nucleoside
  modified_base 17: mod_base = OTHER; note = 2' fluoro-modified nucleoside
  modified_base 18: mod_base = OTHER; note = 2' O-methyl modified nucleoside
  modified_base 19: mod_base = OTHER; note = 2' fluoro-modified nucleoside
  modified_base 19..20: mod_base = OTHER; note = Phosphorothioate linkage
  modified_base 20: mod_base = OTHER; note = 2' O-methyl modified nucleoside
  modified_base 20..21: mod_base = OTHER; note = Phosphorothioate linkage
  modified_base 21: mod_base = OTHER; note = 2' O-methyl modified nucleoside
  source 1..21: mol_type = other RNA
ccgcagatgccatctacgatt

SEQ ID NO: 11121 - RNA, 21 nt, synthetic construct
  misc_feature 1..21: note = Description of Artificial Sequence: Synthetic oligonucleotide
  modified_base 1: mod_base = OTHER; note = 2' fluoro-modified nucleoside
  modified_base 1..2: mod_base = OTHER; note = Phosphorothioate linkage
  modified_base 2: mod_base = OTHER; note = 2' O-methyl modified nucleoside
  modified_base 2..3: mod_base = OTHER; note = Phosphorothioate linkage
  modified_base 3: mod_base = OTHER; note = 2' fluoro-modified nucleoside
  modified_base 4: mod_base = OTHER; note = 2' O-methyl modified nucleoside
  modified_base 5: mod_base = OTHER; note = 2' fluoro-modified nucleoside
  modified_base 6: mod_base = OTHER; note = 2' O-methyl modified nucleoside
  modified_base 7: mod_base = OTHER; note = 2' fluoro-modified nucleoside
  modified_base 8: mod_base = OTHER; note = 2' fluoro-modified nucleoside
  modified_base 9: mod_base = OTHER; note = 2' fluoro-modified nucleoside
  modified_base 10: mod_base = OTHER; note = 2' O-methyl modified nucleoside
  modified_base 11: mod_base = OTHER; note = 2' fluoro-modified nucleoside
  modified_base 12: mod_base = OTHER; note = 2' O-methyl modified nucleoside
  modified_base 13: mod_base = OTHER; note = 2' fluoro-modified nucleoside
  modified_base 14: mod_base = OTHER; note = 2' O-methyl modified nucleoside
  modified_base 15: mod_base = OTHER; note = 2' fluoro-modified nucleoside
  modified_base 16: mod_base = OTHER; note = 2' O-methyl modified nucleoside
  modified_base 17: mod_base = OTHER; note = 2' fluoro-modified nucleoside
  modified_base 18: mod_base = OTHER; note = 2' O-methyl modified nucleoside
  modified_base 19: mod_base = OTHER; note = 2' fluoro-modified nucleoside
  modified_base 19..20: mod_base = OTHER; note = Phosphorothioate linkage
  modified_base 20: mod_base = OTHER; note = 2' O-methyl modified nucleoside
  modified_base 20..21: mod_base = OTHER; note = Phosphorothioate linkage
  modified_base 21: mod_base = OTHER; note = 2' O-methyl modified nucleoside
  source 1..21: mol_type = other RNA
agatgccatctacgactgatt

SEQ ID NO: 11122 - RNA, 21 nt, synthetic construct
  misc_feature 1..21: note = Description of Artificial Sequence: Synthetic oligonucleotide
  modified_base 1: mod_base = OTHER; note = 2' fluoro-modified nucleoside
  modified_base 1..2: mod_base = OTHER; note = Phosphorothioate linkage
  modified_base 2: mod_base = OTHER; note = 2' O-methyl modified nucleoside
  modified_base 2..3: mod_base = OTHER; note = Phosphorothioate linkage
  modified_base 3: mod_base = OTHER; note = 2' fluoro-modified nucleoside
  modified_base 4: mod_base = OTHER; note = 2' O-methyl modified nucleoside
  modified_base 5: mod_base = OTHER; note = 2' fluoro-modified nucleoside
  modified_base 6: mod_base = OTHER; note = 2' O-methyl modified nucleoside
  modified_base 7: mod_base = OTHER; note = 2' fluoro-modified nucleoside
  modified_base 8: mod_base = OTHER; note = 2' fluoro-modified nucleoside
  modified_base 9: mod_base = OTHER; note = 2' fluoro-modified nucleoside
  modified_base 10: mod_base = OTHER; note = 2' O-methyl modified nucleoside
  modified_base 11: mod_base = OTHER; note = 2' fluoro-modified nucleoside
  modified_base 12: mod_base = OTHER; note = 2' O-methyl modified nucleoside
  modified_base 13: mod_base = OTHER; note = 2' fluoro-modified nucleoside
  modified_base 14: mod_base = OTHER; note = 2' O-methyl modified nucleoside
  modified_base 15: mod_base = OTHER; note = 2' fluoro-modified nucleoside
  modified_base 16: mod_base = OTHER; note = 2' O-methyl modified nucleoside
  modified_base 17: mod_base = OTHER; note = 2' fluoro-modified nucleoside
  modified_base 18: mod_base = OTHER; note = 2' O-methyl modified nucleoside
  modified_base 19: mod_base = OTHER; note = 2' fluoro-modified nucleoside
  modified_base 19..20: mod_base = OTHER; note = Phosphorothioate linkage
  modified_base 20: mod_base = OTHER; note = 2' O-methyl modified nucleoside
  modified_base 20..21: mod_base = OTHER; note = Phosphorothioate linkage
  modified_base 21: mod_base = OTHER; note = 2' O-methyl modified nucleoside
  source 1..21: mol_type = other RNA
gatgccatctacgactgcatt

SEQ ID NO: 11123 - RNA, 21 nt, synthetic construct
  misc_feature 1..21: note = Description of Artificial Sequence: Synthetic oligonucleotide
  modified_base 1: mod_base = OTHER; note = 2' fluoro-modified nucleoside
  modified_base 1..2: mod_base = OTHER; note = Phosphorothioate linkage
  modified_base 2: mod_base = OTHER; note = 2' O-methyl modified nucleoside
  modified_base 2..3: mod_base = OTHER; note = Phosphorothioate linkage
  modified_base 3: mod_base = OTHER; note = 2' fluoro-modified nucleoside
  modified_base 4: mod_base = OTHER; note = 2' O-methyl modified nucleoside
  modified_base 5: mod_base = OTHER; note = 2' fluoro-modified nucleoside
  modified_base 6: mod_base = OTHER; note = 2' O-methyl modified nucleoside
  modified_base 7: mod_base = OTHER; note = 2' fluoro-modified nucleoside
  modified_base 8: mod_base = OTHER; note = 2' fluoro-modified nucleoside
  modified_base 9: mod_base = OTHER; note = 2' fluoro-modified nucleoside
  modified_base 10: mod_base = OTHER; note = 2' O-methyl modified nucleoside
  modified_base 11: mod_base = OTHER; note = 2' fluoro-modified nucleoside
  modified_base 12: mod_base = OTHER; note = 2' O-methyl modified nucleoside
  modified_base 13: mod_base = OTHER; note = 2' fluoro-modified nucleoside
  modified_base 14: mod_base = OTHER; note = 2' O-methyl modified nucleoside
  modified_base 15: mod_base = OTHER; note = 2' fluoro-modified nucleoside
  modified_base 16: mod_base = OTHER; note = 2' O-methyl modified nucleoside
  modified_base 17: mod_base = OTHER; note = 2' fluoro-modified nucleoside
  modified_base 18: mod_base = OTHER; note = 2' O-methyl modified nucleoside
  modified_base 19: mod_base = OTHER; note = 2' fluoro-modified nucleoside
  modified_base 19..20: mod_base = OTHER; note = Phosphorothioate linkage
  modified_base 20: mod_base = OTHER; note = 2' O-methyl modified nucleoside
  modified_base 20..21: mod_base = OTHER; note = Phosphorothioate linkage
  modified_base 21: mod_base = OTHER; note = 2' O-methyl modified nucleoside
  source 1..21: mol_type = other RNA
ccatctacgactgctcttatt

SEQ ID NO: 11124 - RNA, 21 nt, synthetic construct
  misc_feature 1..21: note = Description of Artificial Sequence: Synthetic oligonucleotide
  modified_base 1: mod_base = OTHER; note = 2' fluoro-modified nucleoside
  modified_base 1..2: mod_base = OTHER; note = Phosphorothioate linkage
  modified_base 2: mod_base = OTHER; note = 2' O-methyl modified nucleoside
  modified_base 2..3: mod_base = OTHER; note = Phosphorothioate linkage
  modified_base 3: mod_base = OTHER; note = 2' fluoro-modified nucleoside
  modified_base 4: mod_base = OTHER; note = 2' O-methyl modified nucleoside
  modified_base 5: mod_base = OTHER; note = 2' fluoro-modified nucleoside
  modified_base 6: mod_base = OTHER; note = 2' O-methyl modified nucleoside
  modified_base 7: mod_base = OTHER; note = 2' fluoro-modified nucleoside
  modified_base 8: mod_base = OTHER; note = 2' fluoro-modified nucleoside
  modified_base 9: mod_base = OTHER; note = 2' fluoro-modified nucleoside
  modified_base 10: mod_base = OTHER; note = 2' O-methyl modified nucleoside
  modified_base 11: mod_base = OTHER; note = 2' fluoro-modified nucleoside
  modified_base 12: mod_base = OTHER; note = 2' O-methyl modified nucleoside
  modified_base 13: mod_base = OTHER; note = 2' fluoro-modified nucleoside
  modified_base 14: mod_base = OTHER; note = 2' O-methyl modified nucleoside
  modified_base 15: mod_base = OTHER; note = 2' fluoro-modified nucleoside
  modified_base 16: mod_base = OTHER; note = 2' O-methyl modified nucleoside
  modified_base 17: mod_base = OTHER; note = 2' fluoro-modified nucleoside
  modified_base 18: mod_base = OTHER; note = 2' O-methyl modified nucleoside
  modified_base 19: mod_base = OTHER; note = 2' fluoro-modified nucleoside
  modified_base 19..20: mod_base = OTHER; note = Phosphorothioate linkage
  modified_base 20: mod_base = OTHER; note = 2' O-methyl modified nucleoside
  modified_base 20..21: mod_base = OTHER; note = Phosphorothioate linkage
  modified_base 21: mod_base = OTHER; note = 2' O-methyl modified nucleoside
  source 1..21: mol_type = other RNA
catctacgactgctcttcatt

SEQ ID NO: 11125 - RNA, 21 nt, synthetic construct
  misc_feature 1..21: note = Description of Artificial Sequence: Synthetic oligonucleotide
  modified_base 1: mod_base = OTHER; note = 2' fluoro-modified nucleoside
  modified_base 1..2: mod_base = OTHER; note = Phosphorothioate linkage
  modified_base 2: mod_base = OTHER; note = 2' O-methyl modified nucleoside
  modified_base 2..3: mod_base = OTHER; note = Phosphorothioate linkage
  modified_base 3: mod_base = OTHER; note = 2' fluoro-modified nucleoside
  modified_base 4: mod_base = OTHER; note = 2' O-methyl modified nucleoside
  modified_base 5: mod_base = OTHER; note = 2' fluoro-modified nucleoside
  modified_base 6: mod_base = OTHER; note = 2' O-methyl modified nucleoside
  modified_base 7: mod_base = OTHER; note = 2' fluoro-modified nucleoside
  modified_base 8: mod_base = OTHER; note = 2' fluoro-modified nucleoside
  modified_base 9: mod_base = OTHER; note = 2' fluoro-modified nucleoside
  modified_base 10: mod_base = OTHER; note = 2' O-methyl modified nucleoside
  modified_base 11: mod_base = OTHER; note = 2' fluoro-modified nucleoside
  modified_base 12: mod_base = OTHER; note = 2' O-methyl modified nucleoside
  modified_base 13: mod_base = OTHER; note = 2' fluoro-modified nucleoside
  modified_base 14: mod_base = OTHER; note = 2' O-methyl modified nucleoside
  modified_base 15: mod_base = OTHER; note = 2' fluoro-modified nucleoside
  modified_base 16: mod_base = OTHER; note = 2' O-methyl modified nucleoside
  modified_base 17: mod_base = OTHER; note = 2' fluoro-modified nucleoside
  modified_base 18: mod_base = OTHER; note = 2' O-methyl modified nucleoside
  modified_base 19: mod_base = OTHER; note = 2' fluoro-modified nucleoside
  modified_base 19..20: mod_base = OTHER; note = Phosphorothioate linkage
  modified_base 20: mod_base = OTHER; note = 2' O-methyl modified nucleoside
  modified_base 20..21: mod_base = OTHER; note = Phosphorothioate linkage
  modified_base 21: mod_base = OTHER; note = 2' O-methyl modified nucleoside
  source 1..21: mol_type = other RNA
accagaagaactaccgcaatt

SEQ ID NO: 11126 - RNA, 21 nt, synthetic construct
  misc_feature 1..21: note = Description of Artificial Sequence: Synthetic oligonucleotide
  modified_base 1: mod_base = OTHER; note = 2' fluoro-modified nucleoside
  modified_base 1..2: mod_base = OTHER; note = Phosphorothioate linkage
  modified_base 2: mod_base = OTHER; note = 2' O-methyl modified nucleoside
  modified_base 2..3: mod_base = OTHER; note = Phosphorothioate linkage
  modified_base 3: mod_base = OTHER; note = 2' fluoro-modified nucleoside
  modified_base 4: mod_base = OTHER; note = 2' O-methyl modified nucleoside
  modified_base 5: mod_base = OTHER; note = 2' fluoro-modified nucleoside
  modified_base 6: mod_base = OTHER; note = 2' O-methyl modified nucleoside
  modified_base 7: mod_base = OTHER; note = 2' fluoro-modified nucleoside
  modified_base 8: mod_base = OTHER; note = 2' fluoro-modified nucleoside
  modified_base 9: mod_base = OTHER; note = 2' fluoro-modified nucleoside
  modified_base 10: mod_base = OTHER; note = 2' O-methyl modified nucleoside
  modified_base 11: mod_base = OTHER; note = 2' fluoro-modified nucleoside
  modified_base 12: mod_base = OTHER; note = 2' O-methyl modified nucleoside
  modified_base 13: mod_base = OTHER; note = 2' fluoro-modified nucleoside
  modified_base 14: mod_base = OTHER; note = 2' O-methyl modified nucleoside
  modified_base 15: mod_base = OTHER; note = 2' fluoro-modified nucleoside
  modified_base 16: mod_base = OTHER; note = 2' O-methyl modified nucleoside
  modified_base 17: mod_base = OTHER; note = 2' fluoro-modified nucleoside
  modified_base 18: mod_base = OTHER; note = 2' O-methyl modified nucleoside
  modified_base 19: mod_base = OTHER; note = 2' fluoro-modified nucleoside
  modified_base 19..20: mod_base = OTHER; note = Phosphorothioate linkage
  modified_base 20: mod_base = OTHER; note = 2' O-methyl modified nucleoside
  modified_base 20..21: mod_base = OTHER; note = Phosphorothioate linkage
  modified_base 21: mod_base = OTHER; note = 2' O-methyl modified nucleoside
  source 1..21: mol_type = other RNA
ccagaagaactaccgcatatt

SEQ ID NO: 11127 - RNA, 21 nt, synthetic construct
  misc_feature 1..21: note = Description of Artificial Sequence: Synthetic oligonucleotide
  modified_base 1: mod_base = OTHER; note = 2' fluoro-modified nucleoside
  modified_base 1..2: mod_base = OTHER; note = Phosphorothioate linkage
  modified_base 2: mod_base = OTHER; note = 2' O-methyl modified nucleoside
  modified_base 2..3: mod_base = OTHER; note = Phosphorothioate linkage
  modified_base 3: mod_base = OTHER; note = 2' fluoro-modified nucleoside
  modified_base 4: mod_base = OTHER; note = 2' O-methyl modified nucleoside
  modified_base 5: mod_base = OTHER; note = 2' fluoro-modified nucleoside
  modified_base 6: mod_base = OTHER; note = 2' O-methyl modified nucleoside
  modified_base 7: mod_base = OTHER; note = 2' fluoro-modified nucleoside
  modified_base 8: mod_base = OTHER; note = 2' fluoro-modified nucleoside
  modified_base 9: mod_base = OTHER; note = 2' fluoro-modified nucleoside
  modified_base 10: mod_base = OTHER; note = 2' O-methyl modified nucleoside
  modified_base 11: mod_base = OTHER; note = 2' fluoro-modified nucleoside
  modified_base 12: mod_base = OTHER; note = 2' O-methyl modified nucleoside
  modified_base 13: mod_base = OTHER; note = 2' fluoro-modified nucleoside
  modified_base 14: mod_base = OTHER; note = 2' O-methyl modified nucleoside
  modified_base 15: mod_base = OTHER; note = 2' fluoro-modified nucleoside
  modified_base 16: mod_base = OTHER; note = 2' O-methyl modified nucleoside
  modified_base 17: mod_base = OTHER; note = 2' fluoro-modified nucleoside
  modified_base 18: mod_base = OTHER; note = 2' O-methyl modified nucleoside
  modified_base 19: mod_base = OTHER; note = 2' fluoro-modified nucleoside
  modified_base 19..20: mod_base = OTHER; note = Phosphorothioate linkage
  modified_base 20: mod_base = OTHER; note = 2' O-methyl modified nucleoside
  modified_base 20..21: mod_base = OTHER; note = Phosphorothioate linkage
  modified_base 21: mod_base = OTHER; note = 2' O-methyl modified nucleoside
  source 1..21: mol_type = other RNA
gaactaccgcatctctggatt

SEQ ID NO: 11128 - RNA, 21 nt, synthetic construct
  misc_feature 1..21: note = Description of Artificial Sequence: Synthetic oligonucleotide
  modified_base 1: mod_base = OTHER; note = 2' fluoro-modified nucleoside
  modified_base 1..2: mod_base = OTHER; note = Phosphorothioate linkage
  modified_base 2: mod_base = OTHER; note = 2' O-methyl modified nucleoside
  modified_base 2..3: mod_base = OTHER; note = Phosphorothioate linkage
  modified_base 3: mod_base = OTHER; note = 2' fluoro-modified nucleoside
  modified_base 4: mod_base = OTHER; note = 2' O-methyl modified nucleoside
  modified_base 5: mod_base = OTHER; note = 2' fluoro-modified nucleoside
  modified_base 6: mod_base = OTHER; note = 2' O-methyl modified nucleoside
  modified_base 7: mod_base = OTHER; note = 2' fluoro-modified nucleoside
  modified_base 8: mod_base = OTHER; note = 2' fluoro-modified nucleoside
  modified_base 9: mod_base = OTHER; note = 2' fluoro-modified nucleoside
  modified_base 10: mod_base = OTHER; note = 2' O-methyl modified nucleoside
  modified_base 11: mod_base = OTHER; note = 2' fluoro-modified nucleoside
  modified_base 12: mod_base = OTHER; note = 2' O-methyl modified nucleoside
  modified_base 13: mod_base = OTHER; note = 2' fluoro-modified nucleoside
  modified_base 14: mod_base = OTHER; note = 2' O-methyl modified nucleoside
  modified_base 15: mod_base = OTHER; note = 2' fluoro-modified nucleoside
  modified_base 16: mod_base = OTHER; note = 2' O-methyl modified nucleoside
  modified_base 17: mod_base = OTHER; note = 2' fluoro-modified nucleoside
  modified_base 18: mod_base = OTHER; note = 2' O-methyl modified nucleoside
  modified_base 19: mod_base = OTHER; note = 2' fluoro-modified nucleoside
  modified_base 19..20: mod_base = OTHER; note = Phosphorothioate linkage
  modified_base 20: mod_base = OTHER; note = 2' O-methyl modified nucleoside
  modified_base 20..21: mod_base = OTHER; note = Phosphorothioate linkage
  modified_base 21: mod_base = OTHER; note = 2' O-methyl modified nucleoside
  source 1..21: mol_type = other RNA
ccgcatctctggagtgtaatt

SEQ ID NO: 11129 - RNA, 21 nt, synthetic construct
  misc_feature 1..21: note = Description of Artificial Sequence: Synthetic oligonucleotide
  modified_base 1: mod_base = OTHER; note = 2' fluoro-modified nucleoside
  modified_base 1..2: mod_base = OTHER; note = Phosphorothioate linkage
  modified_base 2: mod_base = OTHER; note = 2' O-methyl modified nucleoside
  modified_base 2..3: mod_base = OTHER; note = Phosphorothioate linkage
  modified_base 3: mod_base = OTHER; note = 2' fluoro-modified nucleoside
  modified_base 4: mod_base = OTHER; note = 2' O-methyl modified nucleoside
  modified_base 5: mod_base = OTHER; note = 2' fluoro-modified nucleoside
  modified_base 6: mod_base = OTHER; note = 2' O-methyl modified nucleoside
  modified_base 7: mod_base = OTHER; note = 2' fluoro-modified nucleoside
  modified_base 8: mod_base = OTHER; note = 2' fluoro-modified nucleoside
  modified_base 9: mod_base = OTHER; note = 2' fluoro-modified nucleoside
  modified_base 10: mod_base = OTHER; note = 2' O-methyl modified nucleoside
  modified_base 11: mod_base = OTHER; note = 2' fluoro-modified nucleoside
  modified_base 12: mod_base = OTHER; note = 2' O-methyl modified nucleoside
  modified_base 13: mod_base = OTHER; note = 2' fluoro-modified nucleoside
  modified_base 14: mod_base = OTHER; note = 2' O-methyl modified nucleoside
  modified_base 15: mod_base = OTHER; note = 2' fluoro-modified nucleoside
  modified_base 16: mod_base = OTHER; note = 2' O-methyl modified nucleoside
  modified_base 17: mod_base = OTHER; note = 2' fluoro-modified nucleoside
  modified_base 18: mod_base = OTHER; note = 2' O-methyl modified nucleoside
  modified_base 19: mod_base = OTHER; note = 2' fluoro-modified nucleoside
  modified_base 19..20: mod_base = OTHER; note = Phosphorothioate linkage
  modified_base 20: mod_base = OTHER; note = 2' O-methyl modified nucleoside
  modified_base 20..21: mod_base = OTHER; note = Phosphorothioate linkage
  modified_base 21: mod_base = OTHER; note = 2' O-methyl modified nucleoside
  source 1..21: mol_type = other RNA
catctctggagtgtataaatt

SEQ ID NO: 11130 - RNA, 21 nt, synthetic construct
  misc_feature 1..21: note = Description of Artificial Sequence: Synthetic oligonucleotide
  modified_base 1: mod_base = OTHER; note = 2' fluoro-modified nucleoside
  modified_base 1..2: mod_base = OTHER; note = Phosphorothioate linkage
  modified_base 2: mod_base = OTHER; note = 2' O-methyl modified nucleoside
  modified_base 2..3: mod_base = OTHER; note = Phosphorothioate linkage
  modified_base 3: mod_base = OTHER; note = 2' fluoro-modified nucleoside
  modified_base 4: mod_base = OTHER; note = 2' O-methyl modified nucleoside
  modified_base 5: mod_base = OTHER; note = 2' fluoro-modified nucleoside
  modified_base 6: mod_base = OTHER; note = 2' O-methyl modified nucleoside
  modified_base 7: mod_base = OTHER; note = 2' fluoro-modified nucleoside
  modified_base 8: mod_base = OTHER; note = 2' fluoro-modified nucleoside
  modified_base 9: mod_base = OTHER; note = 2' fluoro-modified nucleoside
  modified_base 10: mod_base = OTHER; note = 2' O-methyl modified nucleoside
  modified_base 11: mod_base = OTHER; note = 2' fluoro-modified nucleoside
  modified_base 12: mod_base = OTHER; note = 2' O-methyl modified nucleoside
  modified_base 13: mod_base = OTHER; note = 2' fluoro-modified nucleoside
  modified_base 14: mod_base = OTHER; note = 2' O-methyl modified nucleoside
  modified_base 15: mod_base = OTHER; note = 2' fluoro-modified nucleoside
  modified_base 16: mod_base = OTHER; note = 2' O-methyl modified nucleoside
  modified_base 17: mod_base = OTHER; note = 2' fluoro-modified nucleoside
  modified_base 18: mod_base = OTHER; note = 2' O-methyl modified nucleoside
  modified_base 19: mod_base = OTHER; note = 2' fluoro-modified nucleoside
  modified_base 19..20: mod_base = OTHER; note = Phosphorothioate linkage
  modified_base 20: mod_base = OTHER; note = 2' O-methyl modified nucleoside
  modified_base 20..21: mod_base = OTHER; note = Phosphorothioate linkage
  modified_base 21: mod_base = OTHER; note = 2' O-methyl modified nucleoside
  source 1..21: mol_type = other RNA
atctctggagtgtataagatt

SEQ ID NO: 11131 - RNA, 21 nt, synthetic construct
  misc_feature 1..21: note = Description of Artificial Sequence: Synthetic oligonucleotide
  modified_base 1: mod_base = OTHER; note = 2' fluoro-modified nucleoside
  modified_base 1..2: mod_base = OTHER; note = Phosphorothioate linkage
  modified_base 2: mod_base = OTHER; note = 2' O-methyl modified nucleoside
  modified_base 2..3: mod_base = OTHER; note = Phosphorothioate linkage
  modified_base 3: mod_base = OTHER; note = 2' fluoro-modified nucleoside
  modified_base 4: mod_base = OTHER; note = 2' O-methyl modified nucleoside
  modified_base 5: mod_base = OTHER; note = 2' fluoro-modified nucleoside
  modified_base 6: mod_base = OTHER; note = 2' O-methyl modified nucleoside
  modified_base 7: mod_base = OTHER; note = 2' fluoro-modified nucleoside
  modified_base 8: mod_base = OTHER; note = 2' fluoro-modified nucleoside
  modified_base 9: mod_base = OTHER; note = 2' fluoro-modified nucleoside
  modified_base 10: mod_base = OTHER; note = 2' O-methyl modified nucleoside
  modified_base 11: mod_base = OTHER; note = 2' fluoro-modified nucleoside
  modified_base 12: mod_base = OTHER; note = 2' O-methyl modified nucleoside
  modified_base 13: mod_base = OTHER; note = 2' fluoro-modified nucleoside
  modified_base 14: mod_base = OTHER; note = 2' O-methyl modified nucleoside
  modified_base 15: mod_base = OTHER; note = 2' fluoro-modified nucleoside
  modified_base 16: mod_base = OTHER; note = 2' O-methyl modified nucleoside
  modified_base 17: mod_base = OTHER; note = 2' fluoro-modified nucleoside
  modified_base 18: mod_base = OTHER; note = 2' O-methyl modified nucleoside
  modified_base 19: mod_base = OTHER; note = 2' fluoro-modified nucleoside
  modified_base 19..20: mod_base = OTHER; note = Phosphorothioate linkage
  modified_base 20: mod_base = OTHER; note = 2' O-methyl modified nucleoside
  modified_base 20..21: mod_base = OTHER; note = Phosphorothioate linkage
  modified_base 21: mod_base = OTHER; note = 2' O-methyl modified nucleoside
  source 1..21: mol_type = other RNA
accatcatccagagacgaatt

SEQ ID NO: 11132 - RNA, 21 nt, synthetic construct
  misc_feature 1..21: note = Description of Artificial Sequence: Synthetic oligonucleotide
  modified_base 1: mod_base = OTHER; note = 2' fluoro-modified nucleoside
  modified_base 1..2: mod_base = OTHER; note = Phosphorothioate linkage
  modified_base 2: mod_base = OTHER; note = 2' O-methyl modified nucleoside
  modified_base 2..3: mod_base = OTHER; note = Phosphorothioate linkage
  modified_base 3: mod_base = OTHER; note = 2' fluoro-modified nucleoside
  modified_base 4: mod_base = OTHER; note = 2' O-methyl modified nucleoside
  modified_base 5: mod_base = OTHER; note = 2' fluoro-modified nucleoside
  modified_base 6: mod_base = OTHER; note = 2' O-methyl modified nucleoside
  modified_base 7: mod_base = OTHER; note = 2' fluoro-modified nucleoside
  modified_base 8: mod_base = OTHER; note = 2' fluoro-modified nucleoside
  modified_base 9: mod_base = OTHER; note = 2' fluoro-modified nucleoside
  modified_base 10: mod_base = OTHER; note = 2' O-methyl modified nucleoside
  modified_base 11: mod_base = OTHER; note = 2' fluoro-modified nucleoside
  modified_base 12: mod_base = OTHER; note = 2' O-methyl modified nucleoside
  modified_base 13: mod_base = OTHER; note = 2' fluoro-modified nucleoside
  modified_base 14: mod_base = OTHER; note = 2' O-methyl modified nucleoside
  modified_base 15: mod_base = OTHER; note = 2' fluoro-modified nucleoside
  modified_base 16: mod_base = OTHER; note = 2' O-methyl modified nucleoside
  modified_base 17: mod_base = OTHER; note = 2' fluoro-modified nucleoside
  modified_base 18: mod_base = OTHER; note = 2' O-methyl modified nucleoside
  modified_base 19: mod_base = OTHER; note = 2' fluoro-modified nucleoside
  modified_base 19..20: mod_base = OTHER; note = Phosphorothioate linkage
  modified_base 20: mod_base = OTHER; note = 2' O-methyl modified nucleoside
  modified_base 20..21: mod_base = OTHER; note = Phosphorothioate linkage
  modified_base 21: mod_base = OTHER; note = 2' O-methyl modified nucleoside
  source 1..21: mol_type = other RNA
ccatcatccagagacgaaatt

SEQ ID NO: 11133 - RNA, 21 nt, synthetic construct
  misc_feature 1..21: note = Description of Artificial Sequence: Synthetic oligonucleotide
  modified_base 1: mod_base = OTHER; note = 2' fluoro-modified nucleoside
  modified_base 1..2: mod_base = OTHER; note = Phosphorothioate linkage
  modified_base 2: mod_base = OTHER; note = 2' O-methyl modified nucleoside
  modified_base 2..3: mod_base = OTHER; note = Phosphorothioate linkage
  modified_base 3: mod_base = OTHER; note = 2' fluoro-modified nucleoside
  modified_base 4: mod_base = OTHER; note = 2' O-methyl modified nucleoside
  modified_base 5: mod_base = OTHER; note = 2' fluoro-modified nucleoside
  modified_base 6: mod_base = OTHER; note = 2' O-methyl modified nucleoside
  modified_base 7: mod_base = OTHER; note = 2' fluoro-modified nucleoside
  modified_base 8: mod_base = OTHER; note = 2' fluoro-modified nucleoside
  modified_base 9: mod_base = OTHER; note = 2' fluoro-modified nucleoside
  modified_base 10: mod_base = OTHER; note = 2' O-methyl modified nucleoside
  modified_base 11: mod_base = OTHER; note = 2' fluoro-modified nucleoside
  modified_base 12: mod_base = OTHER; note = 2' O-methyl modified nucleoside
  modified_base 13: mod_base = OTHER; note = 2' fluoro-modified nucleoside
  modified_base 14: mod_base = OTHER; note = 2' O-methyl modified nucleoside
  modified_base 15: mod_base = OTHER; note = 2' fluoro-modified nucleoside
  modified_base 16: mod_base = OTHER; note = 2' O-methyl modified nucleoside
  modified_base 17: mod_base = OTHER; note = 2' fluoro-modified nucleoside
  modified_base 18: mod_base = OTHER; note = 2' O-methyl modified nucleoside
  modified_base 19: mod_base = OTHER; note = 2' fluoro-modified nucleoside
  modified_base 19..20: mod_base = OTHER; note = Phosphorothioate linkage
  modified_base 20: mod_base = OTHER; note = 2' O-methyl modified nucleoside
  modified_base 20..21: mod_base = OTHER; note = Phosphorothioate linkage
  modified_base 21: mod_base = OTHER; note = 2' O-methyl modified nucleoside
  source 1..21: mol_type = other RNA
catcatccagagacgaaaatt

SEQ ID NO: 11134 - RNA, 21 nt, synthetic construct
  misc_feature 1..21: note = Description of Artificial Sequence: Synthetic oligonucleotide
  modified_base 1: mod_base = OTHER; note = 2' fluoro-modified nucleoside
  modified_base 1..2: mod_base = OTHER; note = Phosphorothioate linkage
  modified_base 2: mod_base = OTHER; note = 2' O-methyl modified nucleoside
  modified_base 2..3: mod_base = OTHER; note = Phosphorothioate linkage
  modified_base 3: mod_base = OTHER; note = 2' fluoro-modified nucleoside
  modified_base 4: mod_base = OTHER; note = 2' O-methyl modified nucleoside
  modified_base 5: mod_base = OTHER; note = 2' fluoro-modified nucleoside
  modified_base 6: mod_base = OTHER; note = 2' O-methyl modified nucleoside
  modified_base 7: mod_base = OTHER; note = 2' fluoro-modified nucleoside
  modified_base 8: mod_base = OTHER; note = 2' fluoro-modified nucleoside
  modified_base 9: mod_base = OTHER; note = 2' fluoro-modified nucleoside
  modified_base 10: mod_base = OTHER; note = 2' O-methyl modified nucleoside
  modified_base 11: mod_base = OTHER; note = 2' fluoro-modified nucleoside
  modified_base 12: mod_base = OTHER; note = 2' O-methyl modified nucleoside
  modified_base 13: mod_base = OTHER; note = 2' fluoro-modified nucleoside
  modified_base 14: mod_base = OTHER; note = 2' O-methyl modified nucleoside
  modified_base 15: mod_base = OTHER; note = 2' fluoro-modified nucleoside
  modified_base 16: mod_base = OTHER; note = 2' O-methyl modified nucleoside
  modified_base 17: mod_base = OTHER; note = 2' fluoro-modified nucleoside
  modified_base 18: mod_base = OTHER; note = 2' O-methyl modified nucleoside
  modified_base 19: mod_base = OTHER; note = 2' fluoro-modified nucleoside
  modified_base 19..20: mod_base = OTHER; note = Phosphorothioate linkage
  modified_base 20: mod_base = OTHER; note = 2' O-methyl modified nucleoside
  modified_base 20..21: mod_base = OTHER; note = Phosphorothioate linkage
  modified_base 21: mod_base = OTHER; note = 2' O-methyl modified nucleoside
  source 1..21: mol_type = other RNA
atcatccagagacgaaaaatt

SEQ ID NO: 11135 - RNA, 21 nt, synthetic construct
  misc_feature 1..21: note = Description of Artificial Sequence: Synthetic oligonucleotide
  modified_base 1: mod_base = OTHER; note = 2' fluoro-modified nucleoside
  modified_base 1..2: mod_base = OTHER; note = Phosphorothioate linkage
  modified_base 2: mod_base = OTHER; note = 2' O-methyl modified nucleoside
  modified_base 2..3: mod_base = OTHER; note = Phosphorothioate linkage
  modified_base 3: mod_base = OTHER; note = 2' fluoro-modified nucleoside
  modified_base 4: mod_base = OTHER; note = 2' O-methyl modified nucleoside
  modified_base 5: mod_base = OTHER; note = 2' fluoro-modified nucleoside
  modified_base 6: mod_base = OTHER; note = 2' O-methyl modified nucleoside
  modified_base 7: mod_base = OTHER; note = 2' fluoro-modified nucleoside
  modified_base 8: mod_base = OTHER; note = 2' fluoro-modified nucleoside
  modified_base 9: mod_base = OTHER; note = 2' fluoro-modified nucleoside
  modified_base 10: mod_base = OTHER; note = 2' O-methyl modified nucleoside
  modified_base 11: mod_base = OTHER; note = 2' fluoro-modified nucleoside
  modified_base 12: mod_base = OTHER; note = 2' O-methyl modified nucleoside
  modified_base 13: mod_base = OTHER; note = 2' fluoro-modified nucleoside
  modified_base 14: mod_base = OTHER; note = 2' O-methyl modified nucleoside
  modified_base 15: mod_base = OTHER; note = 2' fluoro-modified nucleoside
  modified_base 16: mod_base = OTHER; note = 2' O-methyl modified nucleoside
  modified_base 17: mod_base = OTHER; note = 2' fluoro-modified nucleoside
  modified_base 18: mod_base = OTHER; note = 2' O-methyl modified nucleoside
  modified_base 19: mod_base = OTHER; note = 2' fluoro-modified nucleoside
  modified_base 19..20: mod_base = OTHER; note = Phosphorothioate linkage
  modified_base 20: mod_base = OTHER; note = 2' O-methyl modified nucleoside
  modified_base 20..21: mod_base = OTHER; note = Phosphorothioate linkage
  modified_base 21: mod_base = OTHER; note = 2' O-methyl modified nucleoside
  source 1..21: mol_type = other RNA
tcatccagagacgaaaaaatt

SEQ ID NO: 11136 - RNA, 21 nt, synthetic construct
  misc_feature 1..21: note = Description of Artificial Sequence: Synthetic oligonucleotide
  modified_base 1: mod_base = OTHER; note = 2' fluoro-modified nucleoside
  modified_base 1..2: mod_base = OTHER; note = Phosphorothioate linkage
  modified_base 2: mod_base = OTHER; note = 2' O-methyl modified nucleoside
  modified_base 2..3: mod_base = OTHER; note = Phosphorothioate linkage
  modified_base 3: mod_base = OTHER; note = 2' fluoro-modified nucleoside
  modified_base 4: mod_base = OTHER; note = 2' O-methyl modified nucleoside
  modified_base 5: mod_base = OTHER; note = 2' fluoro-modified nucleoside
  modified_base 6: mod_base = OTHER; note = 2' O-methyl modified nucleoside
  modified_base 7: mod_base = OTHER; note = 2' fluoro-modified nucleoside
  modified_base 8: mod_base = OTHER; note = 2' fluoro-modified nucleoside
  modified_base 9: mod_base = OTHER; note = 2' fluoro-modified nucleoside
  modified_base 10: mod_base = OTHER; note = 2' O-methyl modified nucleoside
  modified_base 11: mod_base = OTHER; note = 2' fluoro-modified nucleoside
  modified_base 12: mod_base = OTHER; note = 2' O-methyl modified nucleoside
  modified_base 13: mod_base = OTHER; note = 2' fluoro-modified nucleoside
  modified_base 14: mod_base = OTHER; note = 2' O-methyl modified nucleoside
  modified_base 15: mod_base = OTHER; note = 2' fluoro-modified nucleoside
  modified_base 16: mod_base = OTHER; note = 2' O-methyl modified nucleoside
  modified_base 17: mod_base = OTHER; note = 2' fluoro-modified nucleoside
  modified_base 18: mod_base = OTHER; note = 2' O-methyl modified nucleoside
  modified_base 19: mod_base = OTHER; note = 2' fluoro-modified nucleoside
  modified_base 19..20: mod_base = OTHER; note = Phosphorothioate linkage
  modified_base 20: mod_base = OTHER; note = 2' O-methyl modified nucleoside
  modified_base 20..21: mod_base = OTHER; note = Phosphorothioate linkage
  modified_base 21: mod_base = OTHER; note = 2' O-methyl modified nucleoside
  source 1..21: mol_type = other RNA
cagcatccgtggggacttatt

SEQ ID NO: 11137 - RNA, 21 nt, synthetic construct
  misc_feature 1..21: note = Description of Artificial Sequence: Synthetic oligonucleotide
  modified_base 1: mod_base = OTHER; note = 2' fluoro-modified nucleoside
  modified_base 1..2: mod_base = OTHER; note = Phosphorothioate linkage
  modified_base 2: mod_base = OTHER; note = 2' O-methyl modified nucleoside
  modified_base 2..3: mod_base = OTHER; note = Phosphorothioate linkage
  modified_base 3: mod_base = OTHER; note = 2' fluoro-modified nucleoside
  modified_base 4: mod_base = OTHER; note = 2' O-methyl modified nucleoside
  modified_base 5: mod_base = OTHER; note = 2' fluoro-modified nucleoside
  modified_base 6: mod_base = OTHER; note = 2' O-methyl modified nucleoside
  modified_base 7: mod_base = OTHER; note = 2' fluoro-modified nucleoside
  modified_base 8: mod_base = OTHER; note = 2' fluoro-modified nucleoside
  modified_base 9: mod_base = OTHER; note = 2' fluoro-modified nucleoside
  modified_base 10: mod_base = OTHER; note = 2' O-methyl modified nucleoside
  modified_base 11: mod_base = OTHER; note = 2' fluoro-modified nucleoside
  modified_base 12: mod_base = OTHER; note = 2' O-methyl modified nucleoside
  modified_base 13: mod_base = OTHER; note = 2' fluoro-modified nucleoside
  modified_base 14: mod_base = OTHER; note = 2' O-methyl modified nucleoside
  modified_base 15: mod_base = OTHER; note = 2' fluoro-modified nucleoside
  modified_base 16: mod_base = OTHER; note = 2' O-methyl modified nucleoside
  modified_base 17: mod_base = OTHER; note = 2' fluoro-modified nucleoside
  modified_base 18: mod_base = OTHER; note = 2' O-methyl modified nucleoside
  modified_base 19: mod_base = OTHER; note = 2' fluoro-modified nucleoside
  modified_base 19..20: mod_base = OTHER; note = Phosphorothioate linkage
  modified_base 20: mod_base = OTHER; note = 2' O-methyl modified nucleoside
  modified_base 20..21: mod_base = OTHER; note = Phosphorothioate linkage
  modified_base 21: mod_base = OTHER; note = 2' O-methyl modified nucleoside
  source 1..21: mol_type = other RNA
aacacatccaccggctctatt

SEQ ID NO: 11138 - RNA, 21 nt, synthetic construct
  misc_feature 1..21: note = Description of Artificial Sequence: Synthetic oligonucleotide
  modified_base 1: mod_base = OTHER; note = 2' fluoro-modified nucleoside
  modified_base 1..2: mod_base = OTHER; note = Phosphorothioate linkage
  modified_base 2: mod_base = OTHER; note = 2' O-methyl modified nucleoside
  modified_base 2..3: mod_base = OTHER; note = Phosphorothioate linkage
  modified_base 3: mod_base = OTHER; note = 2' fluoro-modified nucleoside
  modified_base 4: mod_base = OTHER; note = 2' O-methyl modified nucleoside
  modified_base 5: mod_base = OTHER; note = 2' fluoro-modified nucleoside
  modified_base 6: mod_base = OTHER; note = 2' O-methyl modified nucleoside
  modified_base 7: mod_base = OTHER; note = 2' fluoro-modified nucleoside
  modified_base 8: mod_base = OTHER; note = 2' fluoro-modified nucleoside
  modified_base 9: mod_base = OTHER; note = 2' fluoro-modified nucleoside
  modified_base 10: mod_base = OTHER; note = 2' O-methyl modified nucleoside
  modified_base 11: mod_base = OTHER; note = 2' fluoro-modified nucleoside
  modified_base 12: mod_base = OTHER; note = 2' O-methyl modified nucleoside
  modified_base 13: mod_base = OTHER; note = 2' fluoro-modified nucleoside
  modified_base 14: mod_base = OTHER; note = 2' O-methyl modified nucleoside
  modified_base 15: mod_base = OTHER; note = 2' fluoro-modified nucleoside
  modified_base 16: mod_base = OTHER; note = 2' O-methyl modified nucleoside
  modified_base 17: mod_base = OTHER; note = 2' fluoro-modified nucleoside
  modified_base 18: mod_base = OTHER; note = 2' O-methyl modified nucleoside
  modified_base 19: mod_base = OTHER; note = 2' fluoro-modified nucleoside
  modified_base 19..20: mod_base = OTHER; note = Phosphorothioate linkage
  modified_base 20: mod_base = OTHER; note = 2' O-methyl modified nucleoside
  modified_base 20..21: mod_base = OTHER; note = Phosphorothioate linkage
  modified_base 21: mod_base = OTHER; note = 2' O-methyl modified nucleoside
  source 1..21: mol_type = other RNA
catccaccggctctccagatt

SEQ ID NO: 11139 - RNA, 21 nt, synthetic construct
  misc_feature 1..21: note = Description of Artificial Sequence: Synthetic oligonucleotide
  modified_base 1: mod_base = OTHER; note = 2' fluoro-modified nucleoside
  modified_base 1..2: mod_base = OTHER; note = Phosphorothioate linkage
  modified_base 2: mod_base = OTHER; note = 2' O-methyl modified nucleoside
  modified_base 2..3: mod_base = OTHER; note = Phosphorothioate linkage
  modified_base 3: mod_base = OTHER; note = 2' fluoro-modified nucleoside
  modified_base 4: mod_base = OTHER; note = 2' O-methyl modified nucleoside
  modified_base 5: mod_base = OTHER; note = 2' fluoro-modified nucleoside
  modified_base 6: mod_base = OTHER; note = 2' O-methyl modified nucleoside
  modified_base 7: mod_base = OTHER; note = 2' fluoro-modified nucleoside
  modified_base 8: mod_base = OTHER; note = 2' fluoro-modified nucleoside
  modified_base 9: mod_base = OTHER; note = 2' fluoro-modified nucleoside
  modified_base 10: mod_base = OTHER; note = 2' O-methyl modified nucleoside
  modified_base 11: mod_base = OTHER; note = 2' fluoro-modified nucleoside
  modified_base 12: mod_base = OTHER; note = 2' O-methyl modified nucleoside
  modified_base 13: mod_base = OTHER; note = 2' fluoro-modified nucleoside
  modified_base 14: mod_base = OTHER; note = 2' O-methyl modified nucleoside
  modified_base 15: mod_base = OTHER; note = 2' fluoro-modified nucleoside
  modified_base 16: mod_base = OTHER; note = 2' O-methyl modified nucleoside
  modified_base 17: mod_base = OTHER; note = 2' fluoro-modified nucleoside
  modified_base 18: mod_base = OTHER; note = 2' O-methyl modified nucleoside
  modified_base 19: mod_base = OTHER; note = 2' fluoro-modified nucleoside
  modified_base 19..20: mod_base = OTHER; note = Phosphorothioate linkage
  modified_base 20: mod_base = OTHER; note = 2' O-methyl modified nucleoside
  modified_base 20..21: mod_base = OTHER; note = Phosphorothioate linkage
  modified_base 21: mod_base = OTHER; note = 2' O-methyl modified nucleoside
  source 1..21: mol_type = other RNA
ccaacccggctgcgtgtaatt

SEQ ID NO: 11140 - RNA, 21 nt, synthetic construct
  misc_feature 1..21: note = Description of Artificial Sequence: Synthetic oligonucleotide
  modified_base 1: mod_base = OTHER; note = 2' fluoro-modified nucleoside
  modified_base 1..2: mod_base = OTHER; note = Phosphorothioate linkage
  modified_base 2: mod_base = OTHER; note = 2' O-methyl modified nucleoside
  modified_base 2..3: mod_base = OTHER; note = Phosphorothioate linkage
  modified_base 3: mod_base = OTHER; note = 2' fluoro-modified nucleoside
  modified_base 4: mod_base = OTHER; note = 2' O-methyl modified nucleoside
  modified_base 5: mod_base = OTHER; note = 2' fluoro-modified nucleoside
  modified_base 6: mod_base = OTHER; note = 2' O-methyl modified nucleoside
  modified_base 7: mod_base = OTHER; note = 2' fluoro-modified nucleoside
  modified_base 8: mod_base = OTHER; note = 2' fluoro-modified nucleoside
  modified_base 9: mod_base = OTHER; note = 2' fluoro-modified nucleoside
  modified_base 10: mod_base = OTHER; note = 2' O-methyl modified nucleoside
  modified_base 11: mod_base = OTHER; note = 2' fluoro-modified nucleoside
  modified_base 12: mod_base = OTHER; note = 2' O-methyl modified nucleoside
  modified_base 13: mod_base = OTHER; note = 2' fluoro-modified nucleoside
  modified_base 14: mod_base = OTHER; note = 2' O-methyl modified nucleoside
  modified_base 15: mod_base = OTHER; note = 2' fluoro-modified nucleoside
  modified_base 16: mod_base = OTHER; note = 2' O-methyl modified nucleoside
  modified_base 17: mod_base = OTHER; note = 2' fluoro-modified nucleoside
  modified_base 18: mod_base = OTHER; note = 2' O-methyl modified nucleoside
  modified_base 19: mod_base = OTHER; note = 2' fluoro-modified nucleoside
  modified_base 19..20: mod_base = OTHER; note = Phosphorothioate linkage
  modified_base 20: mod_base = OTHER; note = 2' O-methyl modified nucleoside
  modified_base 20..21: mod_base = OTHER; note = Phosphorothioate linkage
  modified_base 21: mod_base = OTHER; note = 2' O-methyl modified nucleoside
  source 1..21: mol_type = other RNA
caacccggctgcgtgtagatt

SEQ ID NO: 11141 - RNA, 21 nt, synthetic construct
  misc_feature 1..21: note = Description of Artificial Sequence: Synthetic oligonucleotide
  modified_base 1: mod_base = OTHER; note = 2' fluoro-modified nucleoside
  modified_base 1..2: mod_base = OTHER; note = Phosphorothioate linkage
  modified_base 2: mod_base = OTHER; note = 2' O-methyl modified nucleoside
  modified_base 2..3: mod_base = OTHER; note = Phosphorothioate linkage
  modified_base 3: mod_base = OTHER; note = 2' fluoro-modified nucleoside
  modified_base 4: mod_base = OTHER; note = 2' O-methyl modified nucleoside
  modified_base 5: mod_base = OTHER; note = 2' fluoro-modified nucleoside
  modified_base 6: mod_base = OTHER; note = 2' O-methyl modified nucleoside
  modified_base 7: mod_base = OTHER; note = 2' fluoro-modified nucleoside
  modified_base 8: mod_base = OTHER; note = 2' fluoro-modified nucleoside
  modified_base 9: mod_base = OTHER; note = 2' fluoro-modified nucleoside
  modified_base 10: mod_base = OTHER; note = 2' O-methyl modified nucleoside
  modified_base 11: mod_base = OTHER; note = 2' fluoro-modified nucleoside
  modified_base 12: mod_base = OTHER; note = 2' O-methyl modified nucleoside
  modified_base 13: mod_base = OTHER; note = 2' fluoro-modified nucleoside
  modified_base 14: mod_base = OTHER; note = 2' O-methyl modified nucleoside
  modified_base 15: mod_base = OTHER; note = 2' fluoro-modified nucleoside
  modified_base 16: mod_base = OTHER; note = 2' O-methyl modified nucleoside
  modified_base 17: mod_base = OTHER; note = 2' fluoro-modified nucleoside
  modified_base 18: mod_base = OTHER; note = 2' O-methyl modified nucleoside
  modified_base 19: mod_base = OTHER; note = 2' fluoro-modified nucleoside
  modified_base 19..20: mod_base = OTHER; note = Phosphorothioate linkage
  modified_base 20: mod_base = OTHER; note = 2' O-methyl modified nucleoside
  modified_base 20..21: mod_base = OTHER; note = Phosphorothioate linkage
  modified_base 21: mod_base = OTHER; note = 2' O-methyl modified nucleoside
  source 1..21: mol_type = other RNA
aacccggctgcgtgtagaatt

SEQ ID NO: 11142 - RNA, 21 nt, synthetic construct
  misc_feature 1..21: note = Description of Artificial Sequence: Synthetic oligonucleotide
  modified_base 1: mod_base = OTHER; note = 2' fluoro-modified nucleoside
  modified_base 1..2: mod_base = OTHER; note = Phosphorothioate linkage
  modified_base 2: mod_base = OTHER; note = 2' O-methyl modified nucleoside
  modified_base 2..3: mod_base = OTHER; note = Phosphorothioate linkage
  modified_base 3: mod_base = OTHER; note = 2' fluoro-modified nucleoside
  modified_base 4: mod_base = OTHER; note = 2' O-methyl modified nucleoside
  modified_base 5: mod_base = OTHER; note = 2' fluoro-modified nucleoside
  modified_base 6: mod_base = OTHER; note = 2' O-methyl modified nucleoside
  modified_base 7: mod_base = OTHER; note = 2' fluoro-modified nucleoside
  modified_base 8: mod_base = OTHER; note = 2' fluoro-modified nucleoside
  modified_base 9: mod_base = OTHER; note = 2' fluoro-modified nucleoside
  modified_base 10: mod_base = OTHER; note = 2' O-methyl modified nucleoside
  modified_base 11: mod_base = OTHER; note = 2' fluoro-modified nucleoside
  modified_base 12: mod_base = OTHER; note = 2' O-methyl modified nucleoside
  modified_base 13: mod_base = OTHER; note = 2' fluoro-modified nucleoside
  modified_base 14: mod_base = OTHER; note = 2' O-methyl modified nucleoside
  modified_base 15: mod_base = OTHER; note = 2' fluoro-modified nucleoside
  modified_base 16: mod_base = OTHER; note = 2' O-methyl modified nucleoside
  modified_base 17: mod_base = OTHER; note = 2' fluoro-modified nucleoside
  modified_base 18: mod_base = OTHER; note = 2' O-methyl modified nucleoside
  modified_base 19: mod_base = OTHER; note = 2' fluoro-modified nucleoside
  modified_base 19..20: mod_base = OTHER; note = Phosphorothioate linkage
  modified_base 20: mod_base = OTHER; note = 2' O-methyl modified nucleoside
  modified_base 20..21: mod_base = OTHER; note = Phosphorothioate linkage
  modified_base 21: mod_base = OTHER; note = 2' O-methyl modified nucleoside
  source 1..21: mol_type = other RNA
ggctgcgtgtagagatggatt

SEQ ID NO: 11143 - RNA, 21 nt, synthetic construct
  misc_feature 1..21: note = Description of Artificial Sequence: Synthetic oligonucleotide
  modified_base 1: mod_base = OTHER; note = 2' fluoro-modified nucleoside
  modified_base 1..2: mod_base = OTHER; note = Phosphorothioate linkage
  modified_base 2: mod_base = OTHER; note = 2' O-methyl modified nucleoside
  modified_base 2..3: mod_base = OTHER; note = Phosphorothioate linkage
  modified_base 3: mod_base = OTHER; note = 2' fluoro-modified nucleoside
  modified_base 4: mod_base = OTHER; note = 2' O-methyl modified nucleoside
  modified_base 5: mod_base = OTHER; note = 2' fluoro-modified nucleoside
  modified_base 6: mod_base = OTHER; note = 2' O-methyl modified nucleoside
  modified_base 7: mod_base = OTHER; note = 2' fluoro-modified nucleoside
  modified_base 8: mod_base = OTHER; note = 2' fluoro-modified nucleoside
  modified_base 9: mod_base = OTHER; note = 2' fluoro-modified nucleoside
  modified_base 10: mod_base = OTHER; note = 2' O-methyl modified nucleoside
  modified_base 11: mod_base = OTHER; note = 2' fluoro-modified nucleoside
  modified_base 12: mod_base = OTHER; note = 2' O-methyl modified nucleoside
  modified_base 13: mod_base = OTHER; note = 2' fluoro-modified nucleoside
  modified_base 14: mod_base = OTHER; note = 2' O-methyl modified nucleoside
  modified_base 15: mod_base = OTHER; note = 2' fluoro-modified nucleoside
  modified_base 16: mod_base = OTHER; note = 2' O-methyl modified nucleoside
  modified_base 17: mod_base = OTHER; note = 2' fluoro-modified nucleoside
  modified_base 18: mod_base = OTHER; note = 2' O-methyl modified nucleoside
  modified_base 19: mod_base = OTHER; note = 2' fluoro-modified nucleoside
  modified_base 19..20: mod_base = OTHER; note = Phosphorothioate linkage
  modified_base 20: mod_base = OTHER; note = 2' O-methyl modified nucleoside
  modified_base 20..21: mod_base = OTHER; note = Phosphorothioate linkage
  modified_base 21: mod_base = OTHER; note = 2' O-methyl modified nucleoside
  source 1..21: mol_type = other RNA
gctgcgtgtagagatggaatt

SEQ ID NO: 11144 - RNA, 21 nt, synthetic construct
  misc_feature 1..21: note = Description of Artificial Sequence: Synthetic oligonucleotide
  modified_base 1: mod_base = OTHER; note = 2' fluoro-modified nucleoside
  modified_base 1..2: mod_base = OTHER; note = Phosphorothioate linkage
  modified_base 2: mod_base = OTHER; note = 2' O-methyl modified nucleoside
  modified_base 2..3: mod_base = OTHER; note = Phosphorothioate linkage
  modified_base 3: mod_base = OTHER; note = 2' fluoro-modified nucleoside
  modified_base 4: mod_base = OTHER; note = 2' O-methyl modified nucleoside
  modified_base 5: mod_base = OTHER; note = 2' fluoro-modified nucleoside
  modified_base 6: mod_base = OTHER; note = 2' O-methyl modified nucleoside
  modified_base 7: mod_base = OTHER; note = 2' fluoro-modified nucleoside
  modified_base 8: mod_base = OTHER; note = 2' fluoro-modified nucleoside
  modified_base 9: mod_base = OTHER; note = 2' fluoro-modified nucleoside
  modified_base 10: mod_base = OTHER; note = 2' O-methyl modified nucleoside
  modified_base 11: mod_base = OTHER; note = 2' fluoro-modified nucleoside
  modified_base 12: mod_base = OTHER; note = 2' O-methyl modified nucleoside
  modified_base 13: mod_base = OTHER; note = 2' fluoro-modified nucleoside
  modified_base 14: mod_base = OTHER; note = 2' O-methyl modified nucleoside
  modified_base 15: mod_base = OTHER; note = 2' fluoro-modified nucleoside
  modified_base 16: mod_base = OTHER; note = 2' O-methyl modified nucleoside
  modified_base 17: mod_base = OTHER; note = 2' fluoro-modified nucleoside
  modified_base 18: mod_base = OTHER; note = 2' O-methyl modified nucleoside
  modified_base 19: mod_base = OTHER; note = 2' fluoro-modified nucleoside
  modified_base 19..20: mod_base = OTHER; note = Phosphorothioate linkage
  modified_base 20: mod_base = OTHER; note = 2' O-methyl modified nucleoside
  modified_base 20..21: mod_base = OTHER; note = Phosphorothioate linkage
  modified_base 21: mod_base = OTHER; note = 2' O-methyl modified nucleoside
  source 1..21: mol_type = other RNA
tgcgtgtagagatggaggatt

SEQ ID NO: 11145 - RNA, 21 nt, synthetic construct
  misc_feature 1..21: note = Description of Artificial Sequence: Synthetic oligonucleotide
  modified_base 1: mod_base = OTHER; note = 2' fluoro-modified nucleoside
  modified_base 1..2: mod_base = OTHER; note = Phosphorothioate linkage
  modified_base 2: mod_base = OTHER; note = 2' O-methyl modified nucleoside
  modified_base 2..3: mod_base = OTHER; note = Phosphorothioate linkage
  modified_base 3: mod_base = OTHER; note = 2' fluoro-modified nucleoside
  modified_base 4: mod_base = OTHER; note = 2' O-methyl modified nucleoside
  modified_base 5: mod_base = OTHER; note = 2' fluoro-modified nucleoside
  modified_base 6: mod_base = OTHER; note = 2' O-methyl modified nucleoside
  modified_base 7: mod_base = OTHER; note = 2' fluoro-modified nucleoside
  modified_base 8: mod_base = OTHER; note = 2' fluoro-modified nucleoside
  modified_base 9: mod_base = OTHER; note = 2' fluoro-modified nucleoside
  modified_base 10: mod_base = OTHER; note = 2' O-methyl modified nucleoside
  modified_base 11: mod_base = OTHER; note = 2' fluoro-modified nucleoside
  modified_base 12: mod_base = OTHER; note = 2' O-methyl modified nucleoside
  modified_base 13: mod_base = OTHER; note = 2' fluoro-modified nucleoside
  modified_base 14: mod_base = OTHER; note = 2' O-methyl modified nucleoside
  modified_base 15: mod_base = OTHER; note = 2' fluoro-modified nucleoside
  modified_base 16: mod_base = OTHER; note = 2' O-methyl modified nucleoside
  modified_base 17: mod_base = OTHER; note = 2' fluoro-modified nucleoside
  modified_base 18: mod_base = OTHER; note = 2' O-methyl modified nucleoside
  modified_base 19: mod_base = OTHER; note = 2' fluoro-modified nucleoside
  modified_base 19..20: mod_base = OTHER; note = Phosphorothioate linkage
  modified_base 20: mod_base = OTHER; note = 2' O-methyl modified nucleoside
  modified_base 20..21: mod_base = OTHER; note = Phosphorothioate linkage
  modified_base 21: mod_base = OTHER; note = 2' O-methyl modified nucleoside
  source 1..21: mol_type = other RNA
agggcaacctgcgctacgatt

SEQ ID NO: 11146 - RNA, 21 nt, synthetic construct
  misc_feature 1..21: note = Description of Artificial Sequence: Synthetic oligonucleotide
  modified_base 1: mod_base = OTHER; note = 2' fluoro-modified nucleoside
  modified_base 1..2: mod_base = OTHER; note = Phosphorothioate linkage
  modified_base 2: mod_base = OTHER; note = 2' O-methyl modified nucleoside
  modified_base 2..3: mod_base = OTHER; note = Phosphorothioate linkage
  modified_base 3: mod_base = OTHER; note = 2' fluoro-modified nucleoside
  modified_base 4: mod_base = OTHER; note = 2' O-methyl modified nucleoside
  modified_base 5: mod_base = OTHER; note = 2' fluoro-modified nucleoside
  modified_base 6: mod_base = OTHER; note = 2' O-methyl modified nucleoside
  modified_base 7: mod_base = OTHER; note = 2' fluoro-modified nucleoside
  modified_base 8: mod_base = OTHER; note = 2' fluoro-modified nucleoside
  modified_base 9: mod_base = OTHER; note = 2' fluoro-modified nucleoside
  modified_base 10: mod_base = OTHER; note = 2' O-methyl modified nucleoside
  modified_base 11: mod_base = OTHER; note = 2' fluoro-modified nucleoside
  modified_base 12: mod_base = OTHER; note = 2' O-methyl modified nucleoside
  modified_base 13: mod_base = OTHER; note = 2' fluoro-modified nucleoside
  modified_base 14: mod_base = OTHER; note = 2' O-methyl modified nucleoside
  modified_base 15: mod_base = OTHER; note = 2' fluoro-modified nucleoside
  modified_base 16: mod_base = OTHER; note = 2' O-methyl modified nucleoside
  modified_base 17: mod_base = OTHER; note = 2' fluoro-modified nucleoside
  modified_base 18: mod_base = OTHER; note = 2' O-methyl modified nucleoside
  modified_base 19: mod_base = OTHER; note = 2' fluoro-modified nucleoside
  modified_base 19..20: mod_base = OTHER; note = Phosphorothioate linkage
  modified_base 20: mod_base = OTHER; note = 2' O-methyl modified nucleoside
  modified_base 20..21: mod_base = OTHER; note = Phosphorothioate linkage
  modified_base 21: mod_base = OTHER; note = 2' O-methyl modified nucleoside
  source 1..21: mol_type = other RNA
gggcaacctgcgctacgcatt

SEQ ID NO: 11147 - RNA, 21 nt, synthetic construct
  misc_feature 1..21: note = Description of Artificial Sequence: Synthetic oligonucleotide
  modified_base 1: mod_base = OTHER; note = 2' fluoro-modified nucleoside
  modified_base 1..2: mod_base = OTHER; note = Phosphorothioate linkage
  modified_base 2: mod_base = OTHER; note = 2' O-methyl modified nucleoside
  modified_base 2..3: mod_base = OTHER; note = Phosphorothioate linkage
  modified_base 3: mod_base = OTHER; note = 2' fluoro-modified nucleoside
  modified_base 4: mod_base = OTHER; note = 2' O-methyl modified nucleoside
  modified_base 5: mod_base = OTHER; note = 2' fluoro-modified nucleoside
  modified_base 6: mod_base = OTHER; note = 2' O-methyl modified nucleoside
  modified_base 7: mod_base = OTHER; note = 2' fluoro-modified nucleoside
  modified_base 8: mod_base = OTHER; note = 2' fluoro-modified nucleoside
  modified_base 9: mod_base = OTHER; note = 2' fluoro-modified nucleoside
  modified_base 10: mod_base = OTHER; note = 2' O-methyl modified nucleoside
  modified_base 11: mod_base = OTHER; note = 2' fluoro-modified nucleoside
  modified_base 12: mod_base = OTHER; note = 2' O-methyl modified nucleoside
  modified_base 13: mod_base = OTHER; note = 2' fluoro-modified nucleoside
  modified_base 14: mod_base = OTHER; note = 2' O-methyl modified nucleoside
  modified_base 15: mod_base = OTHER; note = 2' fluoro-modified nucleoside
  modified_base 16: mod_base = OTHER; note = 2' O-methyl modified nucleoside
  modified_base 17: mod_base = OTHER; note = 2' fluoro-modified nucleoside
  modified_base 18: mod_base = OTHER; note = 2' O-methyl modified nucleoside
  modified_base 19: mod_base = OTHER; note = 2' fluoro-modified nucleoside
  modified_base 19..20: mod_base = OTHER; note = Phosphorothioate linkage
  modified_base 20: mod_base = OTHER; note = 2' O-methyl modified nucleoside
  modified_base 20..21: mod_base = OTHER; note = Phosphorothioate linkage
  modified_base 21: mod_base = OTHER; note = 2' O-methyl modified nucleoside
  source 1..21: mol_type = other RNA
ggcaacctgcgctacgctatt

SEQ ID NO: 11148 - RNA, 21 nt, synthetic construct
  misc_feature 1..21: note = Description of Artificial Sequence: Synthetic oligonucleotide
  modified_base 1: mod_base = OTHER; note = 2' fluoro-modified nucleoside
  modified_base 1..2: mod_base = OTHER; note = Phosphorothioate linkage
  modified_base 2: mod_base = OTHER; note = 2' O-methyl modified nucleoside
  modified_base 2..3: mod_base = OTHER; note = Phosphorothioate linkage
  modified_base 3: mod_base = OTHER; note = 2' fluoro-modified nucleoside
  modified_base 4: mod_base = OTHER; note = 2' O-methyl modified nucleoside
  modified_base 5: mod_base = OTHER; note = 2' fluoro-modified nucleoside
  modified_base 6: mod_base = OTHER; note = 2' O-methyl modified nucleoside
  modified_base 7: mod_base = OTHER; note = 2' fluoro-modified nucleoside
  modified_base 8: mod_base = OTHER; note = 2' fluoro-modified nucleoside
  modified_base 9: mod_base = OTHER; note = 2' fluoro-modified nucleoside
  modified_base 10: mod_base = OTHER; note = 2' O-methyl modified nucleoside
  modified_base 11: mod_base = OTHER; note = 2' fluoro-modified nucleoside
  modified_base 12: mod_base = OTHER; note = 2' O-methyl modified nucleoside
  modified_base 13: mod_base = OTHER; note = 2' fluoro-modified nucleoside
  modified_base 14: mod_base = OTHER; note = 2' O-methyl modified nucleoside
  modified_base 15: mod_base = OTHER; note = 2' fluoro-modified nucleoside
  modified_base 16: mod_base = OTHER; note = 2' O-methyl modified nucleoside
  modified_base 17: mod_base = OTHER; note = 2' fluoro-modified nucleoside
  modified_base 18: mod_base = OTHER; note = 2' O-methyl modified nucleoside
  modified_base 19: mod_base = OTHER; note = 2' fluoro-modified nucleoside
  modified_base 19..20: mod_base = OTHER; note = Phosphorothioate linkage
  modified_base 20: mod_base = OTHER; note = 2' O-methyl modified nucleoside
  modified_base 20..21: mod_base = OTHER; note = Phosphorothioate linkage
  modified_base 21: mod_base = OTHER; note = 2' O-methyl modified nucleoside
  source 1..21: mol_type = other RNA
gcaacctgcgctacgctgatt

SEQ ID NO: 11149 - RNA, 21 nt, synthetic construct
  misc_feature 1..21: note = Description of Artificial Sequence: Synthetic oligonucleotide
  modified_base 1: mod_base = OTHER; note = 2' fluoro-modified nucleoside
  modified_base 1..2: mod_base = OTHER; note = Phosphorothioate linkage
  modified_base 2: mod_base = OTHER; note = 2' O-methyl modified nucleoside
  modified_base 2..3: mod_base = OTHER; note = Phosphorothioate linkage
  modified_base 3: mod_base = OTHER; note = 2' fluoro-modified nucleoside
  modified_base 4: mod_base = OTHER; note = 2' O-methyl modified nucleoside
  modified_base 5: mod_base = OTHER; note = 2' fluoro-modified nucleoside
  modified_base 6: mod_base = OTHER; note = 2' O-methyl modified nucleoside
  modified_base 7: mod_base = OTHER; note = 2' fluoro-modified nucleoside
  modified_base 8: mod_base = OTHER; note = 2' fluoro-modified nucleoside
  modified_base 9: mod_base = OTHER; note = 2' fluoro-modified nucleoside
  modified_base 10: mod_base = OTHER; note = 2' O-methyl modified nucleoside
  modified_base 11: mod_base = OTHER; note = 2' fluoro-modified nucleoside
  modified_base 12: mod_base = OTHER; note = 2' O-methyl modified nucleoside
  modified_base 13: mod_base = OTHER; note = 2' fluoro-modified nucleoside
  modified_base 14: mod_base = OTHER; note = 2' O-methyl modified nucleoside
  modified_base 15: mod_base = OTHER; note = 2' fluoro-modified nucleoside
  modified_base 16: mod_base = OTHER; note = 2' O-methyl modified nucleoside
  modified_base 17: mod_base = OTHER; note = 2' fluoro-modified nucleoside
  modified_base 18: mod_base = OTHER; note = 2' O-methyl modified nucleoside
  modified_base 19: mod_base = OTHER; note = 2' fluoro-modified nucleoside
  modified_base 19..20: mod_base = OTHER; note = Phosphorothioate linkage
  modified_base 20: mod_base = OTHER; note = 2' O-methyl modified nucleoside
  modified_base 20..21: mod_base = OTHER; note = Phosphorothioate linkage
  modified_base 21: mod_base = OTHER; note = 2' O-methyl modified nucleoside
  source 1..21: mol_type = other RNA
cgctacgctgagtatagcatt

SEQ ID NO: 11150 - RNA, 21 nt, synthetic construct
  misc_feature 1..21: note = Description of Artificial Sequence: Synthetic oligonucleotide
  modified_base 1: mod_base = OTHER; note = 2' fluoro-modified nucleoside
  modified_base 1..2: mod_base = OTHER; note = Phosphorothioate linkage
  modified_base 2: mod_base = OTHER; note = 2' O-methyl modified nucleoside
  modified_base 2..3: mod_base = OTHER; note = Phosphorothioate linkage
  modified_base 3: mod_base = OTHER; note = 2' fluoro-modified nucleoside
  modified_base 4: mod_base = OTHER; note = 2' O-methyl modified nucleoside
  modified_base 5: mod_base = OTHER; note = 2' fluoro-modified nucleoside
  modified_base 6: mod_base = OTHER; note = 2' O-methyl modified nucleoside
  modified_base 7: mod_base = OTHER; note = 2' fluoro-modified nucleoside
  modified_base 8: mod_base = OTHER; note = 2' fluoro-modified nucleoside
  modified_base 9: mod_base = OTHER; note = 2' fluoro-modified nucleoside
  modified_base 10: mod_base = OTHER; note = 2' O-methyl modified nucleoside
  modified_base 11: mod_base = OTHER; note = 2' fluoro-modified nucleoside
  modified_base 12: mod_base = OTHER; note = 2' O-methyl modified nucleoside
  modified_base 13: mod_base = OTHER; note = 2' fluoro-modified nucleoside
  modified_base 14: mod_base = OTHER; note = 2' O-methyl modified nucleoside
  modified_base 15: mod_base = OTHER; note = 2' fluoro-modified nucleoside
  modified_base 16: mod_base = OTHER; note = 2' O-methyl modified nucleoside
  modified_base 17: mod_base = OTHER; note = 2' fluoro-modified nucleoside
  modified_base 18: mod_base = OTHER; note = 2' O-methyl modified nucleoside
  modified_base 19: mod_base = OTHER; note = 2' fluoro-modified nucleoside
  modified_base 19..20: mod_base = OTHER; note = Phosphorothioate linkage
  modified_base 20: mod_base = OTHER; note = 2' O-methyl modified nucleoside
  modified_base 20..21: mod_base = OTHER; note = Phosphorothioate linkage
  modified_base 21: mod_base = OTHER; note = 2' O-methyl modified nucleoside
  source 1..21: mol_type = other RNA
gctacgctgagtatagccatt

SEQ ID NO: 11151 - RNA, 21 nt, synthetic construct
  misc_feature 1..21: note = Description of Artificial Sequence: Synthetic oligonucleotide
  modified_base 1: mod_base = OTHER; note = 2' fluoro-modified nucleoside
  modified_base 1..2: mod_base = OTHER; note = Phosphorothioate linkage
  modified_base 2: mod_base = OTHER; note = 2' O-methyl modified nucleoside
  modified_base 2..3: mod_base = OTHER; note = Phosphorothioate linkage
  modified_base 3: mod_base = OTHER; note = 2' fluoro-modified nucleoside
  modified_base 4: mod_base = OTHER; note = 2' O-methyl modified nucleoside
  modified_base 5: mod_base = OTHER; note = 2' fluoro-modified nucleoside
  modified_base 6: mod_base = OTHER; note = 2' O-methyl modified nucleoside
  modified_base 7: mod_base = OTHER; note = 2' fluoro-modified nucleoside
  modified_base 8: mod_base = OTHER; note = 2' fluoro-modified nucleoside
  modified_base 9: mod_base = OTHER; note = 2' fluoro-modified nucleoside
  modified_base 10: mod_base = OTHER; note = 2' O-methyl modified nucleoside
  modified_base 11: mod_base = OTHER; note = 2' fluoro-modified nucleoside
  modified_base 12: mod_base = OTHER; note = 2' O-methyl modified nucleoside
  modified_base 13: mod_base = OTHER; note = 2' fluoro-modified nucleoside
  modified_base 14: mod_base = OTHER; note = 2' O-methyl modified nucleoside
  modified_base 15: mod_base = OTHER; note = 2' fluoro-modified nucleoside
  modified_base 16: mod_base = OTHER; note = 2' O-methyl modified nucleoside
  modified_base 17: mod_base = OTHER; note = 2' fluoro-modified nucleoside
  modified_base 18: mod_base = OTHER; note = 2' O-methyl modified nucleoside
  modified_base 19: mod_base = OTHER; note = 2' fluoro-modified nucleoside
  modified_base 19..20: mod_base = OTHER; note = Phosphorothioate linkage
  modified_base 20: mod_base = OTHER; note = 2' O-methyl modified nucleoside
  modified_base 20..21: mod_base = OTHER; note = Phosphorothioate linkage
  modified_base 21: mod_base = OTHER; note = 2' O-methyl modified nucleoside
  source 1..21: mol_type = other RNA
ctacgctgagtatagccaatt

SEQ ID NO: 11152 - RNA, 21 nt, synthetic construct
  misc_feature 1..21: note = Description of Artificial Sequence: Synthetic oligonucleotide
  modified_base 1: mod_base = OTHER; note = 2' fluoro-modified nucleoside
  modified_base 1..2: mod_base = OTHER; note = Phosphorothioate linkage
  modified_base 2: mod_base = OTHER; note = 2' O-methyl modified nucleoside
  modified_base 2..3: mod_base = OTHER; note = Phosphorothioate linkage
  modified_base 3: mod_base = OTHER; note = 2' fluoro-modified nucleoside
  modified_base 4: mod_base = OTHER; note = 2' O-methyl modified nucleoside
  modified_base 5: mod_base = OTHER; note = 2' fluoro-modified nucleoside
  modified_base 6: mod_base = OTHER; note = 2' O-methyl modified nucleoside
  modified_base 7: mod_base = OTHER; note = 2' fluoro-modified nucleoside
  modified_base 8: mod_base = OTHER; note = 2' fluoro-modified nucleoside
  modified_base 9: mod_base = OTHER; note = 2' fluoro-modified nucleoside
  modified_base 10: mod_base = OTHER; note = 2' O-methyl modified nucleoside
  modified_base 11: mod_base = OTHER; note = 2' fluoro-modified nucleoside
  modified_base 12: mod_base = OTHER; note = 2' O-methyl modified nucleoside
  modified_base 13: mod_base = OTHER; note = 2' fluoro-modified nucleoside
  modified_base 14: mod_base = OTHER; note = 2' O-methyl modified nucleoside
  modified_base 15: mod_base = OTHER; note = 2' fluoro-modified nucleoside
  modified_base 16: mod_base = OTHER; note = 2' O-methyl modified nucleoside
  modified_base 17: mod_base = OTHER; note = 2' fluoro-modified nucleoside
  modified_base 18: mod_base = OTHER; note = 2' O-methyl modified nucleoside
  modified_base 19: mod_base = OTHER; note = 2' fluoro-modified nucleoside
  modified_base 19..20: mod_base = OTHER; note = Phosphorothioate linkage
  modified_base 20: mod_base = OTHER; note = 2' O-methyl modified nucleoside
  modified_base 20..21: mod_base = OTHER; note = Phosphorothioate linkage
  modified_base 21: mod_base = OTHER; note = 2' O-methyl modified nucleoside
  source 1..21: mol_type = other RNA
tacgctgagtatagccacatt

SEQ ID NO: 11153 - RNA, 21 nt, synthetic construct
  misc_feature 1..21: note = Description of Artificial Sequence: Synthetic oligonucleotide
  modified_base 1: mod_base = OTHER; note = 2' fluoro-modified nucleoside
  modified_base 1..2: mod_base = OTHER; note = Phosphorothioate linkage
  modified_base 2: mod_base = OTHER; note = 2' O-methyl modified nucleoside
  modified_base 2..3: mod_base = OTHER; note = Phosphorothioate linkage
  modified_base 3: mod_base = OTHER; note = 2' fluoro-modified nucleoside
  modified_base 4: mod_base = OTHER; note = 2' O-methyl modified nucleoside
  modified_base 5: mod_base = OTHER; note = 2' fluoro-modified nucleoside
  modified_base 6: mod_base = OTHER; note = 2' O-methyl modified nucleoside
  modified_base 7: mod_base = OTHER; note = 2' fluoro-modified nucleoside
  modified_base 8: mod_base = OTHER; note = 2' fluoro-modified nucleoside
  modified_base 9: mod_base = OTHER; note = 2' fluoro-modified nucleoside
  modified_base 10: mod_base = OTHER; note = 2' O-methyl modified nucleoside
  modified_base 11: mod_base = OTHER; note = 2' fluoro-modified nucleoside
  modified_base 12: mod_base = OTHER; note = 2' O-methyl modified nucleoside
  modified_base 13: mod_base = OTHER; note = 2' fluoro-modified nucleoside
  modified_base 14: mod_base = OTHER; note = 2' O-methyl modified nucleoside
  modified_base 15: mod_base = OTHER; note = 2' fluoro-modified nucleoside
  modified_base 16: mod_base = OTHER; note = 2' O-methyl modified nucleoside
  modified_base 17: mod_base = OTHER; note = 2' fluoro-modified nucleoside
  modified_base 18: mod_base = OTHER; note = 2' O-methyl modified nucleoside
  modified_base 19: mod_base = OTHER; note = 2' fluoro-modified nucleoside
  modified_base 19..20: mod_base = OTHER; note = Phosphorothioate linkage
  modified_base 20: mod_base = OTHER; note = 2' O-methyl modified nucleoside
  modified_base 20..21: mod_base = OTHER; note = Phosphorothioate linkage
  modified_base 21: mod_base = OTHER; note = 2' O-methyl modified nucleoside
  source 1..21: mol_type = other RNA
gaactcaacagctatcgcatt

SEQ ID NO: 11154 - RNA, 21 nt, synthetic construct
  misc_feature 1..21: note = Description of Artificial Sequence: Synthetic oligonucleotide
  modified_base 1: mod_base = OTHER; note = 2' fluoro-modified nucleoside
  modified_base 1..2: mod_base = OTHER; note = Phosphorothioate linkage
  modified_base 2: mod_base = OTHER; note = 2' O-methyl modified nucleoside
  modified_base 2..3: mod_base = OTHER; note = Phosphorothioate linkage
  modified_base 3: mod_base = OTHER; note = 2' fluoro-modified nucleoside
  modified_base 4: mod_base = OTHER; note = 2' O-methyl modified nucleoside
  modified_base 5: mod_base = OTHER; note = 2' fluoro-modified nucleoside
  modified_base 6: mod_base = OTHER; note = 2' O-methyl modified nucleoside
  modified_base 7: mod_base = OTHER; note = 2' fluoro-modified nucleoside
  modified_base 8: mod_base = OTHER; note = 2' fluoro-modified nucleoside
  modified_base 9: mod_base = OTHER; note = 2' fluoro-modified nucleoside
  modified_base 10: mod_base = OTHER; note = 2' O-methyl modified nucleoside
  modified_base 11: mod_base = OTHER; note = 2' fluoro-modified nucleoside
  modified_base 12: mod_base = OTHER; note = 2' O-methyl modified nucleoside
  modified_base 13: mod_base = OTHER; note = 2' fluoro-modified nucleoside
  modified_base 14: mod_base = OTHER; note = 2' O-methyl modified nucleoside
  modified_base 15: mod_base = OTHER; note = 2' fluoro-modified nucleoside
  modified_base 16: mod_base = OTHER; note = 2' O-methyl modified nucleoside
  modified_base 17: mod_base = OTHER; note = 2' fluoro-modified nucleoside
  modified_base 18: mod_base = OTHER; note = 2' O-methyl modified nucleoside
  modified_base 19: mod_base = OTHER; note = 2' fluoro-modified nucleoside
  modified_base 19..20: mod_base = OTHER; note = Phosphorothioate linkage
  modified_base 20: mod_base = OTHER; note = 2' O-methyl modified nucleoside
  modified_base 20..21: mod_base = OTHER; note = Phosphorothioate linkage
  modified_base 21: mod_base = OTHER; note = 2' O-methyl modified nucleoside
  source 1..21: mol_type = other RNA
aacagctatcgcctcttcatt

SEQ ID NO: 11155 - RNA, 21 nt, synthetic construct
  misc_feature 1..21: note = Description of Artificial Sequence: Synthetic oligonucleotide
  modified_base 1: mod_base = OTHER; note = 2' fluoro-modified nucleoside
  modified_base 1..2: mod_base = OTHER; note = Phosphorothioate linkage
  modified_base 2: mod_base = OTHER; note = 2' O-methyl modified nucleoside
  modified_base 2..3: mod_base = OTHER; note = Phosphorothioate linkage
  modified_base 3: mod_base = OTHER; note = 2' fluoro-modified nucleoside
  modified_base 4: mod_base = OTHER; note = 2' O-methyl modified nucleoside
  modified_base 5: mod_base = OTHER; note = 2' fluoro-modified nucleoside
  modified_base 6: mod_base = OTHER; note = 2' O-methyl modified nucleoside
  modified_base 7: mod_base = OTHER; note = 2' fluoro-modified nucleoside
  modified_base 8: mod_base = OTHER; note = 2' fluoro-modified nucleoside
  modified_base 9: mod_base = OTHER; note = 2' fluoro-modified nucleoside
  modified_base 10: mod_base = OTHER; note = 2' O-methyl modified nucleoside
  modified_base 11: mod_base = OTHER; note = 2' fluoro-modified nucleoside
  modified_base 12: mod_base = OTHER; note = 2' O-methyl modified nucleoside
  modified_base 13: mod_base = OTHER; note = 2' fluoro-modified nucleoside
  modified_base 14: mod_base = OTHER; note = 2' O-methyl modified nucleoside
  modified_base 15: mod_base = OTHER; note = 2' fluoro-modified nucleoside
  modified_base 16: mod_base = OTHER; note = 2' O-methyl modified nucleoside
  modified_base 17: mod_base = OTHER; note = 2' fluoro-modified nucleoside
  modified_base 18: mod_base = OTHER; note = 2' O-methyl modified nucleoside
  modified_base 19: mod_base = OTHER; note = 2' fluoro-modified nucleoside
  modified_base 19..20: mod_base = OTHER; note = Phosphorothioate linkage
  modified_base 20: mod_base = OTHER; note = 2' O-methyl modified nucleoside
  modified_base 20..21: mod_base = OTHER; note = Phosphorothioate linkage
  modified_base 21: mod_base = OTHER; note = 2' O-methyl modified nucleoside
  source 1..21: mol_type = other RNA
ctggggaactacactggcatt

SEQ ID NO: 11156 - RNA, 21 nt, synthetic construct
  misc_feature 1..21: note = Description of Artificial Sequence: Synthetic oligonucleotide
  modified_base 1: mod_base = OTHER; note = 2' fluoro-modified nucleoside
  modified_base 1..2: mod_base = OTHER; note = Phosphorothioate linkage
  modified_base 2: mod_base = OTHER; note = 2' O-methyl modified nucleoside
  modified_base 2..3: mod_base = OTHER; note = Phosphorothioate linkage
  modified_base 3: mod_base = OTHER; note = 2' fluoro-modified nucleoside
  modified_base 4: mod_base = OTHER; note = 2' O-methyl modified nucleoside
  modified_base 5: mod_base = OTHER; note = 2' fluoro-modified nucleoside
  modified_base 6: mod_base = OTHER; note = 2' O-methyl modified nucleoside
  modified_base 7: mod_base = OTHER; note = 2' fluoro-modified nucleoside
  modified_base 8: mod_base = OTHER; note = 2' fluoro-modified nucleoside
  modified_base 9: mod_base = OTHER; note = 2' fluoro-modified nucleoside
  modified_base 10: mod_base = OTHER; note = 2' O-methyl modified nucleoside
  modified_base 11: mod_base = OTHER; note = 2' fluoro-modified nucleoside
  modified_base 12: mod_base = OTHER; note = 2' O-methyl modified nucleoside
  modified_base 13: mod_base = OTHER; note = 2' fluoro-modified nucleoside
  modified_base 14: mod_base = OTHER; note = 2' O-methyl modified nucleoside
  modified_base 15: mod_base = OTHER; note = 2' fluoro-modified nucleoside
  modified_base 16: mod_base = OTHER; note = 2' O-methyl modified nucleoside
  modified_base 17: mod_base = OTHER; note = 2' fluoro-modified nucleoside
  modified_base 18: mod_base = OTHER; note = 2' O-methyl modified nucleoside
  modified_base 19: mod_base = OTHER; note = 2' fluoro-modified nucleoside
  modified_base 19..20: mod_base = OTHER; note = Phosphorothioate linkage
  modified_base 20: mod_base = OTHER; note = 2' O-methyl modified nucleoside
  modified_base 20..21: mod_base = OTHER; note = Phosphorothioate linkage
  modified_base 21: mod_base = OTHER; note = 2' O-methyl modified nucleoside
  source 1..21: mol_type = other RNA
gggaactacactggcaatatt

SEQ ID NO: 11157 - RNA, 21 nt, synthetic construct
  misc_feature 1..21: note = Description of Artificial Sequence: Synthetic oligonucleotide
  modified_base 1: mod_base = OTHER; note = 2' fluoro-modified nucleoside
  modified_base 1..2: mod_base = OTHER; note = Phosphorothioate linkage
  modified_base 2: mod_base = OTHER; note = 2' O-methyl modified nucleoside
  modified_base 2..3: mod_base = OTHER; note = Phosphorothioate linkage
  modified_base 3: mod_base = OTHER; note = 2' fluoro-modified nucleoside
  modified_base 4: mod_base = OTHER; note = 2' O-methyl modified nucleoside
  modified_base 5: mod_base = OTHER; note = 2' fluoro-modified nucleoside
  modified_base 6: mod_base = OTHER; note = 2' O-methyl modified nucleoside
  modified_base 7: mod_base = OTHER; note = 2' fluoro-modified nucleoside
  modified_base 8: mod_base = OTHER; note = 2' fluoro-modified nucleoside
  modified_base 9: mod_base = OTHER; note = 2' fluoro-modified nucleoside
  modified_base 10: mod_base = OTHER; note = 2' O-methyl modified nucleoside
  modified_base 11: mod_base = OTHER; note = 2' fluoro-modified nucleoside
  modified_base 12: mod_base = OTHER; note = 2' O-methyl modified nucleoside
  modified_base 13: mod_base = OTHER; note = 2' fluoro-modified nucleoside
  modified_base 14: mod_base = OTHER; note = 2' O-methyl modified nucleoside
  modified_base 15: mod_base = OTHER; note = 2' fluoro-modified nucleoside
  modified_base 16: mod_base = OTHER; note = 2' O-methyl modified nucleoside
  modified_base 17: mod_base = OTHER; note = 2' fluoro-modified nucleoside
  modified_base 18: mod_base = OTHER; note = 2' O-methyl modified nucleoside
  modified_base 19: mod_base = OTHER; note = 2' fluoro-modified nucleoside
  modified_base 19..20: mod_base = OTHER; note = Phosphorothioate linkage
  modified_base 20: mod_base = OTHER; note = 2' O-methyl modified nucleoside
  modified_base 20..21: mod_base = OTHER; note = Phosphorothioate linkage
  modified_base 21: mod_base = OTHER; note = 2' O-methyl modified nucleoside
  source 1..21: mol_type = other RNA
aactacactggcaatgtgatt

SEQ ID NO: 11158 - RNA, 21 nt, synthetic construct
  misc_feature 1..21: note = Description of Artificial Sequence: Synthetic oligonucleotide
  modified_base 1: mod_base = OTHER; note = 2' fluoro-modified nucleoside
  modified_base 1..2: mod_base = OTHER; note = Phosphorothioate linkage
  modified_base 2: mod_base = OTHER; note = 2' O-methyl modified nucleoside
  modified_base 2..3: mod_base = OTHER; note = Phosphorothioate linkage
  modified_base 3: mod_base = OTHER; note = 2' fluoro-modified nucleoside
  modified_base 4: mod_base = OTHER; note = 2' O-methyl modified nucleoside
  modified_base 5: mod_base = OTHER; note = 2' fluoro-modified nucleoside
  modified_base 6: mod_base = OTHER; note = 2' O-methyl modified nucleoside
  modified_base 7: mod_base = OTHER; note = 2' fluoro-modified nucleoside
  modified_base 8: mod_base = OTHER; note = 2' fluoro-modified nucleoside
  modified_base 9: mod_base = OTHER; note = 2' fluoro-modified nucleoside
  modified_base 10: mod_base = OTHER; note = 2' O-methyl modified nucleoside
  modified_base 11: mod_base = OTHER; note = 2' fluoro-modified nucleoside
  modified_base 12: mod_base = OTHER; note = 2' O-methyl modified nucleoside
  modified_base 13: mod_base = OTHER; note = 2' fluoro-modified nucleoside
  modified_base 14: mod_base = OTHER; note = 2' O-methyl modified nucleoside
  modified_base 15: mod_base = OTHER; note = 2' fluoro-modified nucleoside
  modified_base 16: mod_base = OTHER; note = 2' O-methyl modified nucleoside
  modified_base 17: mod_base = OTHER; note = 2' fluoro-modified nucleoside
  modified_base 18: mod_base = OTHER; note = 2' O-methyl modified nucleoside
  modified_base 19: mod_base = OTHER; note = 2' fluoro-modified nucleoside
  modified_base 19..20: mod_base = OTHER; note = Phosphorothioate linkage
  modified_base 20: mod_base = OTHER; note = 2' O-methyl modified nucleoside
  modified_base 20..21: mod_base = OTHER; note = Phosphorothioate linkage
  modified_base 21: mod_base = OTHER; note = 2' O-methyl modified nucleoside
  source 1..21: mol_type = other RNA
ctacactggcaatgtgggatt

SEQ ID NO: 11159 - RNA, 21 nt, synthetic construct
  misc_feature 1..21: note = Description of Artificial Sequence: Synthetic oligonucleotide
  modified_base 1: mod_base = OTHER; note = 2' fluoro-modified nucleoside
  modified_base 1..2: mod_base = OTHER; note = Phosphorothioate linkage
  modified_base 2: mod_base = OTHER; note = 2' O-methyl modified nucleoside
  modified_base 2..3: mod_base = OTHER; note = Phosphorothioate linkage
  modified_base 3: mod_base = OTHER; note = 2' fluoro-modified nucleoside
  modified_base 4: mod_base = OTHER; note = 2' O-methyl modified nucleoside
  modified_base 5: mod_base = OTHER; note = 2' fluoro-modified nucleoside
  modified_base 6: mod_base = OTHER; note = 2' O-methyl modified nucleoside
  modified_base 7: mod_base = OTHER; note = 2' fluoro-modified nucleoside
  modified_base 8: mod_base = OTHER; note = 2' fluoro-modified nucleoside
  modified_base 9: mod_base = OTHER; note = 2' fluoro-modified nucleoside
  modified_base 10: mod_base = OTHER; note = 2' O-methyl modified nucleoside
  modified_base 11: mod_base = OTHER; note = 2' fluoro-modified nucleoside
  modified_base 12: mod_base = OTHER; note = 2' O-methyl modified nucleoside
  modified_base 13: mod_base = OTHER; note = 2' fluoro-modified nucleoside
  modified_base 14: mod_base = OTHER; note = 2' O-methyl modified nucleoside
  modified_base 15: mod_base = OTHER; note = 2' fluoro-modified nucleoside
  modified_base 16: mod_base = OTHER; note = 2' O-methyl modified nucleoside
  modified_base 17: mod_base = OTHER; note = 2' fluoro-modified nucleoside
  modified_base 18: mod_base = OTHER; note = 2' O-methyl modified nucleoside
  modified_base 19: mod_base = OTHER; note = 2' fluoro-modified nucleoside
  modified_base 19..20: mod_base = OTHER; note = Phosphorothioate linkage
  modified_base 20: mod_base = OTHER; note = 2' O-methyl modified nucleoside
  modified_base 20..21: mod_base = OTHER; note = Phosphorothioate linkage
  modified_base 21: mod_base = OTHER; note = 2' O-methyl modified nucleoside
  source 1..21: mol_type = other RNA
ctggcaatgtggggaacgatt

SEQ ID NO: 11160 - RNA, 21 nt, synthetic construct
  misc_feature 1..21: note = Description of Artificial Sequence: Synthetic oligonucleotide
  modified_base 1: mod_base = OTHER; note = 2' fluoro-modified nucleoside
  modified_base 1..2: mod_base = OTHER; note = Phosphorothioate linkage
  modified_base 2: mod_base = OTHER; note = 2' O-methyl modified nucleoside
  modified_base 2..3: mod_base = OTHER; note = Phosphorothioate linkage
  modified_base 3: mod_base = OTHER; note = 2' fluoro-modified nucleoside
  modified_base 4: mod_base = OTHER; note = 2' O-methyl modified nucleoside
  modified_base 5: mod_base = OTHER; note = 2' fluoro-modified nucleoside
  modified_base 6: mod_base = OTHER; note = 2' O-methyl modified nucleoside
  modified_base 7: mod_base = OTHER; note = 2' fluoro-modified nucleoside
  modified_base 8: mod_base = OTHER; note = 2' fluoro-modified nucleoside
  modified_base 9: mod_base = OTHER; note = 2' fluoro-modified nucleoside
  modified_base 10: mod_base = OTHER; note = 2' O-methyl modified nucleoside
  modified_base 11: mod_base = OTHER; note = 2' fluoro-modified nucleoside
  modified_base 12: mod_base = OTHER; note = 2' O-methyl modified nucleoside
  modified_base 13: mod_base = OTHER; note = 2' fluoro-modified nucleoside
  modified_base 14: mod_base = OTHER; note = 2' O-methyl modified nucleoside
  modified_base 15: mod_base = OTHER; note = 2' fluoro-modified nucleoside
  modified_base 16: mod_base = OTHER; note = 2' O-methyl modified nucleoside
  modified_base 17: mod_base = OTHER; note = 2' fluoro-modified nucleoside
  modified_base 18: mod_base = OTHER; note = 2' O-methyl modified nucleoside
  modified_base 19: mod_base = OTHER; note = 2' fluoro-modified nucleoside
  modified_base 19..20: mod_base = OTHER; note = Phosphorothioate linkage
  modified_base 20: mod_base = OTHER; note = 2' O-methyl modified nucleoside
  modified_base 20..21: mod_base = OTHER; note = Phosphorothioate linkage
  modified_base 21: mod_base = OTHER; note = 2' O-methyl modified nucleoside
  source 1..21: mol_type = other RNA
tggcaatgtggggaacgaatt

SEQ ID NO: 11161 - RNA, 21 nt, synthetic construct
  misc_feature 1..21: note = Description of Artificial Sequence: Synthetic oligonucleotide
  modified_base 1: mod_base = OTHER; note = 2' fluoro-modified nucleoside
  modified_base 1..2: mod_base = OTHER; note = Phosphorothioate linkage
  modified_base 2: mod_base = OTHER; note = 2' O-methyl modified nucleoside
  modified_base 2..3: mod_base = OTHER; note = Phosphorothioate linkage
  modified_base 3: mod_base = OTHER; note = 2' fluoro-modified nucleoside
  modified_base 4: mod_base = OTHER; note = 2' O-methyl modified nucleoside
  modified_base 5: mod_base = OTHER; note = 2' fluoro-modified nucleoside
  modified_base 6: mod_base = OTHER; note = 2' O-methyl modified nucleoside
  modified_base 7: mod_base = OTHER; note = 2' fluoro-modified nucleoside
  modified_base 8: mod_base = OTHER; note = 2' fluoro-modified nucleoside
  modified_base 9: mod_base = OTHER; note = 2' fluoro-modified nucleoside
  modified_base 10: mod_base = OTHER; note = 2' O-methyl modified nucleoside
  modified_base 11: mod_base = OTHER; note = 2' fluoro-modified nucleoside
  modified_base 12: mod_base = OTHER; note = 2' O-methyl modified nucleoside
  modified_base 13: mod_base = OTHER; note = 2' fluoro-modified nucleoside
  modified_base 14: mod_base = OTHER; note = 2' O-methyl modified nucleoside
  modified_base 15: mod_base = OTHER; note = 2' fluoro-modified nucleoside
  modified_base 16: mod_base = OTHER; note = 2' O-methyl modified nucleoside
  modified_base 17: mod_base = OTHER; note = 2' fluoro-modified nucleoside
  modified_base 18: mod_base = OTHER; note = 2' O-methyl modified nucleoside
  modified_base 19: mod_base = OTHER; note = 2' fluoro-modified nucleoside
  modified_base 19..20: mod_base = OTHER; note = Phosphorothioate linkage
  modified_base 20: mod_base = OTHER; note = 2' O-methyl modified nucleoside
  modified_base 20..21: mod_base = OTHER; note = Phosphorothioate linkage
  modified_base 21: mod_base = OTHER; note = 2' O-methyl modified nucleoside
  source 1..21: mol_type = other RNA
ggcaatgtggggaacgacatt

SEQ ID NO: 11162 - RNA, 21 nt, synthetic construct
  misc_feature 1..21: note = Description of Artificial Sequence: Synthetic oligonucleotide
  modified_base 1: mod_base = OTHER; note = 2' fluoro-modified nucleoside
  modified_base 1..2: mod_base = OTHER; note = Phosphorothioate linkage
  modified_base 2: mod_base = OTHER; note = 2' O-methyl modified nucleoside
  modified_base 2..3: mod_base = OTHER; note = Phosphorothioate linkage
  modified_base 3: mod_base = OTHER; note = 2' fluoro-modified nucleoside
  modified_base 4: mod_base = OTHER; note = 2' O-methyl modified nucleoside
  modified_base 5: mod_base = OTHER; note = 2' fluoro-modified nucleoside
  modified_base 6: mod_base = OTHER; note = 2' O-methyl modified nucleoside
  modified_base 7: mod_base = OTHER; note = 2' fluoro-modified nucleoside
  modified_base 8: mod_base = OTHER; note = 2' fluoro-modified nucleoside
  modified_base 9: mod_base = OTHER; note = 2' fluoro-modified nucleoside
  modified_base 10: mod_base = OTHER; note = 2' O-methyl modified nucleoside
  modified_base 11: mod_base = OTHER; note = 2' fluoro-modified nucleoside
  modified_base 12: mod_base = OTHER; note = 2' O-methyl modified nucleoside
  modified_base 13: mod_base = OTHER; note = 2' fluoro-modified nucleoside
  modified_base 14: mod_base = OTHER; note = 2' O-methyl modified nucleoside
  modified_base 15: mod_base = OTHER; note = 2' fluoro-modified nucleoside
  modified_base 16: mod_base = OTHER; note = 2' O-methyl modified nucleoside
  modified_base 17: mod_base = OTHER; note = 2' fluoro-modified nucleoside
  modified_base 18: mod_base = OTHER; note = 2' O-methyl modified nucleoside
  modified_base 19: mod_base = OTHER; note = 2' fluoro-modified nucleoside
  modified_base 19..20: mod_base = OTHER; note = Phosphorothioate linkage
  modified_base 20: mod_base = OTHER; note = 2' O-methyl modified nucleoside
  modified_base 20..21: mod_base = OTHER; note = Phosphorothioate linkage
  modified_base 21: mod_base = OTHER; note = 2' O-methyl modified nucleoside
  source 1..21: mol_type = other RNA
gcaatgtggggaacgacgatt

SEQ ID NO: 11163 - RNA, 21 nt, synthetic construct
  misc_feature 1..21: note = Description of Artificial Sequence: Synthetic oligonucleotide
  modified_base 1: mod_base = OTHER; note = 2' fluoro-modified nucleoside
  modified_base 1..2: mod_base = OTHER; note = Phosphorothioate linkage
  modified_base 2: mod_base = OTHER; note = 2' O-methyl modified nucleoside
  modified_base 2..3: mod_base = OTHER; note = Phosphorothioate linkage
  modified_base 3: mod_base = OTHER; note = 2' fluoro-modified nucleoside
  modified_base 4: mod_base = OTHER; note = 2' O-methyl modified nucleoside
  modified_base 5: mod_base = OTHER; note = 2' fluoro-modified nucleoside
  modified_base 6: mod_base = OTHER; note = 2' O-methyl modified nucleoside
  modified_base 7: mod_base = OTHER; note = 2' fluoro-modified nucleoside
  modified_base 8: mod_base = OTHER; note = 2' fluoro-modified nucleoside
  modified_base 9: mod_base = OTHER; note = 2' fluoro-modified nucleoside
  modified_base 10: mod_base = OTHER; note = 2' O-methyl modified nucleoside
  modified_base 11: mod_base = OTHER; note = 2' fluoro-modified nucleoside
  modified_base 12: mod_base = OTHER; note = 2' O-methyl modified nucleoside
  modified_base 13: mod_base = OTHER; note = 2' fluoro-modified nucleoside
  modified_base 14: mod_base = OTHER; note = 2' O-methyl modified nucleoside
  modified_base 15: mod_base = OTHER; note = 2' fluoro-modified nucleoside
  modified_base 16: mod_base = OTHER; note = 2' O-methyl modified nucleoside
  modified_base 17: mod_base = OTHER; note = 2' fluoro-modified nucleoside
  modified_base 18: mod_base = OTHER; note = 2' O-methyl modified nucleoside
  modified_base 19: mod_base = OTHER; note = 2' fluoro-modified nucleoside
  modified_base 19..20: mod_base = OTHER; note = Phosphorothioate linkage
  modified_base 20: mod_base = OTHER; note = 2' O-methyl modified nucleoside
  modified_base 20..21: mod_base = OTHER; note = Phosphorothioate linkage
  modified_base 21: mod_base = OTHER; note = 2' O-methyl modified nucleoside
  source 1..21: mol_type = other RNA
caatgtggggaacgacgcatt

SEQ ID NO: 11164 - RNA, 21 nt, synthetic construct
  misc_feature 1..21: note = Description of Artificial Sequence: Synthetic oligonucleotide
  modified_base 1: mod_base = OTHER; note = 2' fluoro-modified nucleoside
  modified_base 1..2: mod_base = OTHER; note = Phosphorothioate linkage
  modified_base 2: mod_base = OTHER; note = 2' O-methyl modified nucleoside
  modified_base 2..3: mod_base = OTHER; note = Phosphorothioate linkage
  modified_base 3: mod_base = OTHER; note = 2' fluoro-modified nucleoside
  modified_base 4: mod_base = OTHER; note = 2' O-methyl modified nucleoside
  modified_base 5: mod_base = OTHER; note = 2' fluoro-modified nucleoside
  modified_base 6: mod_base = OTHER; note = 2' O-methyl modified nucleoside
  modified_base 7: mod_base = OTHER; note = 2' fluoro-modified nucleoside
  modified_base 8: mod_base = OTHER; note = 2' fluoro-modified nucleoside
  modified_base 9: mod_base = OTHER; note = 2' fluoro-modified nucleoside
  modified_base 10: mod_base = OTHER; note = 2' O-methyl modified nucleoside
  modified_base 11: mod_base = OTHER; note = 2' fluoro-modified nucleoside
  modified_base 12: mod_base = OTHER; note = 2' O-methyl modified nucleoside
  modified_base 13: mod_base = OTHER; note = 2' fluoro-modified nucleoside
  modified_base 14: mod_base = OTHER; note = 2' O-methyl modified nucleoside
  modified_base 15: mod_base = OTHER; note = 2' fluoro-modified nucleoside
  modified_base 16: mod_base = OTHER; note = 2' O-methyl modified nucleoside
  modified_base 17: mod_base = OTHER; note = 2' fluoro-modified nucleoside
  modified_base 18: mod_base = OTHER; note = 2' O-methyl modified nucleoside
  modified_base 19: mod_base = OTHER; note = 2' fluoro-modified nucleoside
  modified_base 19..20: mod_base = OTHER; note = Phosphorothioate linkage
  modified_base 20: mod_base = OTHER; note = 2' O-methyl modified nucleoside
  modified_base 20..21: mod_base = OTHER; note = Phosphorothioate linkage
  modified_base 21: mod_base = OTHER; note = 2' O-methyl modified nucleoside
  source 1..21: mol_type = other RNA
gggaacgacgccctccagatt

SEQ ID NO: 11165 - RNA, 21 nt, synthetic construct
  misc_feature 1..21: note = Description of Artificial Sequence: Synthetic oligonucleotide
  modified_base 1: mod_base = OTHER; note = 2' fluoro-modified nucleoside
  modified_base 1..2: mod_base = OTHER; note = Phosphorothioate linkage
  modified_base 2: mod_base = OTHER; note = 2' O-methyl modified nucleoside
  modified_base 2..3: mod_base = OTHER; note = Phosphorothioate linkage
  modified_base 3: mod_base = OTHER; note = 2' fluoro-modified nucleoside
  modified_base 4: mod_base = OTHER; note = 2' O-methyl modified nucleoside
  modified_base 5: mod_base = OTHER; note = 2' fluoro-modified nucleoside
  modified_base 6: mod_base = OTHER; note = 2' O-methyl modified nucleoside
  modified_base 7: mod_base = OTHER; note = 2' fluoro-modified nucleoside
  modified_base 8: mod_base = OTHER; note = 2' fluoro-modified nucleoside
  modified_base 9: mod_base = OTHER; note = 2' fluoro-modified nucleoside
  modified_base 10: mod_base = OTHER; note = 2' O-methyl modified nucleoside
  modified_base 11: mod_base = OTHER; note = 2' fluoro-modified nucleoside
  modified_base 12: mod_base = OTHER; note = 2' O-methyl modified nucleoside
  modified_base 13: mod_base = OTHER; note = 2' fluoro-modified nucleoside
  modified_base 14: mod_base = OTHER; note = 2' O-methyl modified nucleoside
  modified_base 15: mod_base = OTHER; note = 2' fluoro-modified nucleoside
  modified_base 16: mod_base = OTHER; note = 2' O-methyl modified nucleoside
  modified_base 17: mod_base = OTHER; note = 2' fluoro-modified nucleoside
  modified_base 18: mod_base = OTHER; note = 2' O-methyl modified nucleoside
  modified_base 19: mod_base = OTHER; note = 2' fluoro-modified nucleoside
  modified_base 19..20: mod_base = OTHER; note = Phosphorothioate linkage
  modified_base 20: mod_base = OTHER; note = 2' O-methyl modified nucleoside
  modified_base 20..21: mod_base = OTHER; note = Phosphorothioate linkage
  modified_base 21: mod_base = OTHER; note = 2' O-methyl modified nucleoside
  source 1..21: mol_type = other RNA
gaacgacgccctccagtaatt

SEQ ID NO: 11166 - RNA, 21 nt, synthetic construct
  misc_feature 1..21: note = Description of Artificial Sequence: Synthetic oligonucleotide
  modified_base 1: mod_base = OTHER; note = 2' fluoro-modified nucleoside
  modified_base 1..2: mod_base = OTHER; note = Phosphorothioate linkage
  modified_base 2: mod_base = OTHER; note = 2' O-methyl modified nucleoside
  modified_base 2..3: mod_base = OTHER; note = Phosphorothioate linkage
  modified_base 3: mod_base = OTHER; note = 2' fluoro-modified nucleoside
  modified_base 4: mod_base = OTHER; note = 2' O-methyl modified nucleoside
  modified_base 5: mod_base = OTHER; note = 2' fluoro-modified nucleoside
  modified_base 6: mod_base = OTHER; note = 2' O-methyl modified nucleoside
  modified_base 7: mod_base = OTHER; note = 2' fluoro-modified nucleoside
  modified_base 8: mod_base = OTHER; note = 2' fluoro-modified nucleoside
  modified_base 9: mod_base = OTHER; note = 2' fluoro-modified nucleoside
  modified_base 10: mod_base = OTHER; note = 2' O-methyl modified nucleoside
  modified_base 11: mod_base = OTHER; note = 2' fluoro-modified nucleoside
  modified_base 12: mod_base = OTHER; note = 2' O-methyl modified nucleoside
  modified_base 13: mod_base = OTHER; note = 2' fluoro-modified nucleoside
  modified_base 14: mod_base = OTHER; note = 2' O-methyl modified nucleoside
  modified_base 15: mod_base = OTHER; note = 2' fluoro-modified nucleoside
  modified_base 16: mod_base = OTHER; note = 2' O-methyl modified nucleoside
  modified_base 17: mod_base = OTHER; note = 2' fluoro-modified nucleoside
  modified_base 18: mod_base = OTHER; note = 2' O-methyl modified nucleoside
  modified_base 19: mod_base = OTHER; note = 2' fluoro-modified nucleoside
  modified_base 19..20: mod_base = OTHER; note = Phosphorothioate linkage
  modified_base 20: mod_base = OTHER; note = 2' O-methyl modified nucleoside
  modified_base 20..21: mod_base = OTHER; note = Phosphorothioate linkage
  modified_base 21: mod_base = OTHER; note = 2' O-methyl modified nucleoside
  source 1..21: mol_type = other RNA
aacgacgccctccagtatatt

SEQ ID NO: 11167 - RNA, 21 nt, synthetic construct
  misc_feature 1..21: note = Description of Artificial Sequence: Synthetic oligonucleotide
  modified_base 1: mod_base = OTHER; note = 2' fluoro-modified nucleoside
  modified_base 1..2: mod_base = OTHER; note = Phosphorothioate linkage
  modified_base 2: mod_base = OTHER; note = 2' O-methyl modified nucleoside
  modified_base 2..3: mod_base = OTHER; note = Phosphorothioate linkage
  modified_base 3: mod_base = OTHER; note = 2' fluoro-modified nucleoside
  modified_base 4: mod_base = OTHER; note = 2' O-methyl modified nucleoside
  modified_base 5: mod_base = OTHER; note = 2' fluoro-modified nucleoside
  modified_base 6: mod_base = OTHER; note = 2' O-methyl modified nucleoside
  modified_base 7: mod_base = OTHER; note = 2' fluoro-modified nucleoside
  modified_base 8: mod_base = OTHER; note = 2' fluoro-modified nucleoside
  modified_base 9: mod_base = OTHER; note = 2' fluoro-modified nucleoside
  modified_base 10: mod_base = OTHER; note = 2' O-methyl modified nucleoside
  modified_base 11: mod_base = OTHER; note = 2' fluoro-modified nucleoside
  modified_base 12: mod_base = OTHER; note = 2' O-methyl modified nucleoside
  modified_base 13: mod_base = OTHER; note = 2' fluoro-modified nucleoside
  modified_base 14: mod_base = OTHER; note = 2' O-methyl modified nucleoside
  modified_base 15: mod_base = OTHER; note = 2' fluoro-modified nucleoside
  modified_base 16: mod_base = OTHER; note = 2' O-methyl modified nucleoside
  modified_base 17: mod_base = OTHER; note = 2' fluoro-modified nucleoside
  modified_base 18: mod_base = OTHER; note = 2' O-methyl modified nucleoside
  modified_base 19: mod_base = OTHER; note = 2' fluoro-modified nucleoside
  modified_base 19..20: mod_base = OTHER; note = Phosphorothioate linkage
  modified_base 20: mod_base = OTHER; note = 2' O-methyl modified nucleoside
  modified_base 20..21: mod_base = OTHER; note = Phosphorothioate linkage
  modified_base 21: mod_base = OTHER; note = 2' O-methyl modified nucleoside
  source 1..21: mol_type = other RNA
acgacgccctccagtatcatt

SEQ ID NO: 11168 - RNA, 21 nt, synthetic construct
  misc_feature 1..21: note = Description of Artificial Sequence: Synthetic oligonucleotide
  modified_base 1: mod_base = OTHER; note = 2' fluoro-modified nucleoside
  modified_base 1..2: mod_base = OTHER; note = Phosphorothioate linkage
  modified_base 2: mod_base = OTHER; note = 2' O-methyl modified nucleoside
  modified_base 2..3: mod_base = OTHER; note = Phosphorothioate linkage
  modified_base 3: mod_base = OTHER; note = 2' fluoro-modified nucleoside
  modified_base 4: mod_base = OTHER; note = 2' O-methyl modified nucleoside
  modified_base 5: mod_base = OTHER; note = 2' fluoro-modified nucleoside
  modified_base 6: mod_base = OTHER; note = 2' O-methyl modified nucleoside
  modified_base 7: mod_base = OTHER; note = 2' fluoro-modified nucleoside
  modified_base 8: mod_base = OTHER; note = 2' fluoro-modified nucleoside
  modified_base 9: mod_base = OTHER; note = 2' fluoro-modified nucleoside
  modified_base 10: mod_base = OTHER; note = 2' O-methyl modified nucleoside
  modified_base 11: mod_base = OTHER; note = 2' fluoro-modified nucleoside
  modified_base 12: mod_base = OTHER; note = 2' O-methyl modified nucleoside
  modified_base 13: mod_base = OTHER; note = 2' fluoro-modified nucleoside
  modified_base 14: mod_base = OTHER; note = 2' O-methyl modified nucleoside
  modified_base 15: mod_base = OTHER; note = 2' fluoro-modified nucleoside
  modified_base 16: mod_base = OTHER; note = 2' O-methyl modified nucleoside
  modified_base 17: mod_base = OTHER; note = 2' fluoro-modified nucleoside
  modified_base 18: mod_base = OTHER; note = 2' O-methyl modified nucleoside
  modified_base 19: mod_base = OTHER; note = 2' fluoro-modified nucleoside
  modified_base 19..20: mod_base = OTHER; note = Phosphorothioate linkage
  modified_base 20: mod_base = OTHER; note = 2' O-methyl modified nucleoside
  modified_base 20..21: mod_base = OTHER; note = Phosphorothioate linkage
  modified_base 21: mod_base = OTHER; note = 2' O-methyl modified nucleoside
  source 1..21: mol_type = other RNA
gccctccagtatcataacatt

SEQ ID NO: 11169 - RNA, 21 nt, synthetic construct
  misc_feature 1..21: note = Description of Artificial Sequence: Synthetic oligonucleotide
  modified_base 1: mod_base = OTHER; note = 2' fluoro-modified nucleoside
  modified_base 1..2: mod_base = OTHER; note = Phosphorothioate linkage
  modified_base 2: mod_base = OTHER; note = 2' O-methyl modified nucleoside
  modified_base 2..3: mod_base = OTHER; note = Phosphorothioate linkage
  modified_base 3: mod_base = OTHER; note = 2' fluoro-modified nucleoside
  modified_base 4: mod_base = OTHER; note = 2' O-methyl modified nucleoside
  modified_base 5: mod_base = OTHER; note = 2' fluoro-modified nucleoside
  modified_base 6: mod_base = OTHER; note = 2' O-methyl modified nucleoside
  modified_base 7: mod_base = OTHER; note = 2' fluoro-modified nucleoside
  modified_base 8: mod_base = OTHER; note = 2' fluoro-modified nucleoside
  modified_base 9: mod_base = OTHER; note = 2' fluoro-modified nucleoside
  modified_base 10: mod_base = OTHER; note = 2' O-methyl modified nucleoside
  modified_base 11: mod_base = OTHER; note = 2' fluoro-modified nucleoside
  modified_base 12: mod_base = OTHER; note = 2' O-methyl modified nucleoside
  modified_base 13: mod_base = OTHER; note = 2' fluoro-modified nucleoside
  modified_base 14: mod_base = OTHER; note = 2' O-methyl modified nucleoside
  modified_base 15: mod_base = OTHER; note = 2' fluoro-modified nucleoside
  modified_base 16: mod_base = OTHER; note = 2' O-methyl modified nucleoside
  modified_base 17: mod_base = OTHER; note = 2' fluoro-modified nucleoside
  modified_base 18: mod_base = OTHER; note = 2' O-methyl modified nucleoside
  modified_base 19: mod_base = OTHER; note = 2' fluoro-modified nucleoside
  modified_base 19..20: mod_base = OTHER; note = Phosphorothioate linkage
  modified_base 20: mod_base = OTHER; note = 2' O-methyl modified nucleoside
  modified_base 20..21: mod_base = OTHER; note = Phosphorothioate linkage
  modified_base 21: mod_base = OTHER; note = 2' O-methyl modified nucleoside
  source 1..21: mol_type = other RNA
agtatcataacaacacagatt

SEQ ID NO: 11170 - RNA, 21 nt, synthetic construct
  misc_feature 1..21: note = Description of Artificial Sequence: Synthetic oligonucleotide
  modified_base 1: mod_base = OTHER; note = 2' fluoro-modified nucleoside
  modified_base 1..2: mod_base = OTHER; note = Phosphorothioate linkage
  modified_base 2: mod_base = OTHER; note = 2' O-methyl modified nucleoside
  modified_base 2..3: mod_base = OTHER; note = Phosphorothioate linkage
  modified_base 3: mod_base = OTHER; note = 2' fluoro-modified nucleoside
  modified_base 4: mod_base = OTHER; note = 2' O-methyl modified nucleoside
  modified_base 5: mod_base = OTHER; note = 2' fluoro-modified nucleoside
  modified_base 6: mod_base = OTHER; note = 2' O-methyl modified nucleoside
  modified_base 7: mod_base = OTHER; note = 2' fluoro-modified nucleoside
  modified_base 8: mod_base = OTHER; note = 2' fluoro-modified nucleoside
  modified_base 9: mod_base = OTHER; note = 2' fluoro-modified nucleoside
  modified_base 10: mod_base = OTHER; note = 2' O-methyl modified nucleoside
  modified_base 11: mod_base = OTHER; note = 2' fluoro-modified nucleoside
  modified_base 12: mod_base = OTHER; note = 2' O-methyl modified nucleoside
  modified_base 13: mod_base = OTHER; note = 2' fluoro-modified nucleoside
  modified_base 14: mod_base = OTHER; note = 2' O-methyl modified nucleoside
  modified_base 15: mod_base = OTHER; note = 2' fluoro-modified nucleoside
  modified_base 16: mod_base = OTHER; note = 2' O-methyl modified nucleoside
  modified_base 17: mod_base = OTHER; note = 2' fluoro-modified nucleoside
  modified_base 18: mod_base = OTHER; note = 2' O-methyl modified nucleoside
  modified_base 19: mod_base = OTHER; note = 2' fluoro-modified nucleoside
  modified_base 19..20: mod_base = OTHER; note = Phosphorothioate linkage
  modified_base 20: mod_base = OTHER; note = 2' O-methyl modified nucleoside
  modified_base 20..21: mod_base = OTHER; note = Phosphorothioate linkage
  modified_base 21: mod_base = OTHER; note = 2' O-methyl modified nucleoside
  source 1..21: mol_type = other RNA
ctccgcaaaggtggctacatt

SEQ ID NO: 11171 - RNA, 21 nt, synthetic construct
  misc_feature 1..21: note = Description of Artificial Sequence: Synthetic oligonucleotide
  modified_base 1: mod_base = OTHER; note = 2' fluoro-modified nucleoside
  modified_base 1..2: mod_base = OTHER; note = Phosphorothioate linkage
  modified_base 2: mod_base = OTHER; note = 2' O-methyl modified nucleoside
  modified_base 2..3: mod_base = OTHER; note = Phosphorothioate linkage
  modified_base 3: mod_base = OTHER; note = 2' fluoro-modified nucleoside
  modified_base 4: mod_base = OTHER; note = 2' O-methyl modified nucleoside
  modified_base 5: mod_base = OTHER; note = 2' fluoro-modified nucleoside
  modified_base 6: mod_base = OTHER; note = 2' O-methyl modified nucleoside
  modified_base 7: mod_base = OTHER; note = 2' fluoro-modified nucleoside
  modified_base 8: mod_base = OTHER; note = 2' fluoro-modified nucleoside
  modified_base 9: mod_base = OTHER; note = 2' fluoro-modified nucleoside
  modified_base 10: mod_base = OTHER; note = 2' O-methyl modified nucleoside
  modified_base 11: mod_base = OTHER; note = 2' fluoro-modified nucleoside
  modified_base 12: mod_base = OTHER; note = 2' O-methyl modified nucleoside
  modified_base 13: mod_base = OTHER; note = 2' fluoro-modified nucleoside
  modified_base 14: mod_base = OTHER; note = 2' O-methyl modified nucleoside
  modified_base 15: mod_base = OTHER; note = 2' fluoro-modified nucleoside
  modified_base 16: mod_base = OTHER; note = 2' O-methyl modified nucleoside
  modified_base 17: mod_base = OTHER; note = 2' fluoro-modified nucleoside
  modified_base 18: mod_base = OTHER; note = 2' O-methyl modified nucleoside
  modified_base 19: mod_base = OTHER; note = 2' fluoro-modified nucleoside
  modified_base 19..20: mod_base = OTHER; note = Phosphorothioate linkage
  modified_base 20: mod_base = OTHER; note = 2' O-methyl modified nucleoside
  modified_base 20..21: mod_base = OTHER; note = Phosphorothioate linkage
  modified_base 21: mod_base = OTHER; note = 2' O-methyl modified nucleoside
  source 1..21: mol_type = other RNA
tccgcaaaggtggctactatt

SEQ ID NO: 11172 - RNA, 21 nt, synthetic construct
  misc_feature 1..21: note = Description of Artificial Sequence: Synthetic oligonucleotide
  modified_base 1: mod_base = OTHER; note = 2' fluoro-modified nucleoside
  modified_base 1..2: mod_base = OTHER; note = Phosphorothioate linkage
  modified_base 2: mod_base = OTHER; note = 2' O-methyl modified nucleoside
  modified_base 2..3: mod_base = OTHER; note = Phosphorothioate linkage
  modified_base 3: mod_base = OTHER; note = 2' fluoro-modified nucleoside
  modified_base 4: mod_base = OTHER; note = 2' O-methyl modified nucleoside
  modified_base 5: mod_base = OTHER; note = 2' fluoro-modified nucleoside
  modified_base 6: mod_base = OTHER; note = 2' O-methyl modified nucleoside
  modified_base 7: mod_base = OTHER; note = 2' fluoro-modified nucleoside
  modified_base 8: mod_base = OTHER; note = 2' fluoro-modified nucleoside
  modified_base 9: mod_base = OTHER; note = 2' fluoro-modified nucleoside
  modified_base 10: mod_base = OTHER; note = 2' O-methyl modified nucleoside
  modified_base 11: mod_base = OTHER; note = 2' fluoro-modified nucleoside
  modified_base 12: mod_base = OTHER; note = 2' O-methyl modified nucleoside
  modified_base 13: mod_base = OTHER; note = 2' fluoro-modified nucleoside
  modified_base 14: mod_base = OTHER; note = 2' O-methyl modified nucleoside
  modified_base 15: mod_base = OTHER; note = 2' fluoro-modified nucleoside
  modified_base 16: mod_base = OTHER; note = 2' O-methyl modified nucleoside
  modified_base 17: mod_base = OTHER; note = 2' fluoro-modified nucleoside
  modified_base 18: mod_base = OTHER; note = 2' O-methyl modified nucleoside
  modified_base 19: mod_base = OTHER; note = 2' fluoro-modified nucleoside
  modified_base 19..20: mod_base = OTHER; note = Phosphorothioate linkage
  modified_base 20: mod_base = OTHER; note = 2' O-methyl modified nucleoside
  modified_base 20..21: mod_base = OTHER; note = Phosphorothioate linkage
  modified_base 21: mod_base = OTHER; note = 2' O-methyl modified nucleoside
  source 1..21: mol_type = other RNA
caaaggtggctactggtaatt

SEQ ID NO: 11173 - RNA, 21 nt, synthetic construct
  misc_feature 1..21: note = Description of Artificial Sequence: Synthetic oligonucleotide
  modified_base 1: mod_base = OTHER; note = 2' fluoro-modified nucleoside
  modified_base 1..2: mod_base = OTHER; note = Phosphorothioate linkage
  modified_base 2: mod_base = OTHER; note = 2' O-methyl modified nucleoside
  modified_base 2..3: mod_base = OTHER; note = Phosphorothioate linkage
  modified_base 3: mod_base = OTHER; note = 2' fluoro-modified nucleoside
  modified_base 4: mod_base = OTHER; note = 2' O-methyl modified nucleoside
  modified_base 5: mod_base = OTHER; note = 2' fluoro-modified nucleoside
  modified_base 6: mod_base = OTHER; note = 2' O-methyl modified nucleoside
  modified_base 7: mod_base = OTHER; note = 2' fluoro-modified nucleoside
  modified_base 8: mod_base = OTHER; note = 2' fluoro-modified nucleoside
  modified_base 9: mod_base = OTHER; note = 2' fluoro-modified nucleoside
  modified_base 10: mod_base = OTHER; note = 2' O-methyl modified nucleoside
  modified_base 11: mod_base = OTHER; note = 2' fluoro-modified nucleoside
  modified_base 12: mod_base = OTHER; note = 2' O-methyl modified nucleoside
  modified_base 13: mod_base = OTHER; note = 2' fluoro-modified nucleoside
  modified_base 14: mod_base = OTHER; note = 2' O-methyl modified nucleoside
  modified_base 15: mod_base = OTHER; note = 2' fluoro-modified nucleoside
  modified_base 16: mod_base = OTHER; note = 2' O-methyl modified nucleoside
  modified_base 17: mod_base = OTHER; note = 2' fluoro-modified nucleoside
  modified_base 18: mod_base = OTHER; note = 2' O-methyl modified nucleoside
  modified_base 19: mod_base = OTHER; note = 2' fluoro-modified nucleoside
  modified_base 19..20: mod_base = OTHER; note = Phosphorothioate linkage
  modified_base 20: mod_base = OTHER; note = 2' O-methyl modified nucleoside
  modified_base 20..21: mod_base = OTHER; note = Phosphorothioate linkage
  modified_base 21: mod_base = OTHER; note = 2' O-methyl modified nucleoside
  source 1..21: mol_type = other RNA
aaggtggctactggtacaatt

SEQ ID NO: 11174 - RNA, 21 nt, synthetic construct
  misc_feature 1..21: note = Description of Artificial Sequence: Synthetic oligonucleotide
  modified_base 1: mod_base = OTHER; note = 2' fluoro-modified nucleoside
  modified_base 1..2: mod_base = OTHER; note = Phosphorothioate linkage
  modified_base 2: mod_base = OTHER; note = 2' O-methyl modified nucleoside
  modified_base 2..3: mod_base = OTHER; note = Phosphorothioate linkage
  modified_base 3: mod_base = OTHER; note = 2' fluoro-modified nucleoside
  modified_base 4: mod_base = OTHER; note = 2' O-methyl modified nucleoside
  modified_base 5: mod_base = OTHER; note = 2' fluoro-modified nucleoside
  modified_base 6: mod_base = OTHER; note = 2' O-methyl modified nucleoside
  modified_base 7: mod_base = OTHER; note = 2' fluoro-modified nucleoside
  modified_base 8: mod_base = OTHER; note = 2' fluoro-modified nucleoside
  modified_base 9: mod_base = OTHER; note = 2' fluoro-modified nucleoside
  modified_base 10: mod_base = OTHER; note = 2' O-methyl modified nucleoside
  modified_base 11: mod_base = OTHER; note = 2' fluoro-modified nucleoside
  modified_base 12: mod_base = OTHER; note = 2' O-methyl modified nucleoside
  modified_base 13: mod_base = OTHER; note = 2' fluoro-modified nucleoside
  modified_base 14: mod_base = OTHER; note = 2' O-methyl modified nucleoside
  modified_base 15: mod_base = OTHER; note = 2' fluoro-modified nucleoside
  modified_base 16: mod_base = OTHER; note = 2' O-methyl modified nucleoside
  modified_base 17: mod_base = OTHER; note = 2' fluoro-modified nucleoside
  modified_base 18: mod_base = OTHER; note = 2' O-methyl modified nucleoside
  modified_base 19: mod_base = OTHER; note = 2' fluoro-modified nucleoside
  modified_base 19..20: mod_base = OTHER; note = Phosphorothioate linkage
  modified_base 20: mod_base = OTHER; note = 2' O-methyl modified nucleoside
  modified_base 20..21: mod_base = OTHER; note = Phosphorothioate linkage
  modified_base 21: mod_base = OTHER; note = 2' O-methyl modified nucleoside
  source 1..21: mol_type = other RNA
gtggctactggtacaactatt

SEQ ID NO: 11175 - RNA, 21 nt, synthetic construct
  misc_feature 1..21: note = Description of Artificial Sequence: Synthetic oligonucleotide
  modified_base 1: mod_base = OTHER; note = 2' fluoro-modified nucleoside
  modified_base 1..2: mod_base = OTHER; note = Phosphorothioate linkage
  modified_base 2: mod_base = OTHER; note = 2' O-methyl modified nucleoside
  modified_base 2..3: mod_base = OTHER; note = Phosphorothioate linkage
  modified_base 3: mod_base = OTHER; note = 2' fluoro-modified nucleoside
  modified_base 4: mod_base = OTHER; note = 2' O-methyl modified nucleoside
  modified_base 5: mod_base = OTHER; note = 2' fluoro-modified nucleoside
  modified_base 6: mod_base = OTHER; note = 2' O-methyl modified nucleoside
  modified_base 7: mod_base = OTHER; note = 2' fluoro-modified nucleoside
  modified_base 8: mod_base = OTHER; note = 2' fluoro-modified nucleoside
  modified_base 9: mod_base = OTHER; note = 2' fluoro-modified nucleoside
  modified_base 10: mod_base = OTHER; note = 2' O-methyl modified nucleoside
  modified_base 11: mod_base = OTHER; note = 2' fluoro-modified nucleoside
  modified_base 12: mod_base = OTHER; note = 2' O-methyl modified nucleoside
  modified_base 13: mod_base = OTHER; note = 2' fluoro-modified nucleoside
  modified_base 14: mod_base = OTHER; note = 2' O-methyl modified nucleoside
  modified_base 15: mod_base = OTHER; note = 2' fluoro-modified nucleoside
  modified_base 16: mod_base = OTHER; note = 2' O-methyl modified nucleoside
  modified_base 17: mod_base = OTHER; note = 2' fluoro-modified nucleoside
  modified_base 18: mod_base = OTHER; note = 2' O-methyl modified nucleoside
  modified_base 19: mod_base = OTHER; note = 2' fluoro-modified nucleoside
  modified_base 19..20: mod_base = OTHER; note = Phosphorothioate linkage
  modified_base 20: mod_base = OTHER; note = 2' O-methyl modified nucleoside
  modified_base 20..21: mod_base = OTHER; note = Phosphorothioate linkage
  modified_base 21: mod_base = OTHER; note = 2' O-methyl modified nucleoside
  source 1..21: mol_type = other RNA
tggtacaactgctgcacaatt

SEQ ID NO: 11176 - RNA, 21 nt, synthetic construct
  misc_feature 1..21: note = Description of Artificial Sequence: Synthetic oligonucleotide
  modified_base 1: mod_base = OTHER; note = 2' fluoro-modified nucleoside
  modified_base 1..2: mod_base = OTHER; note = Phosphorothioate linkage
  modified_base 2: mod_base = OTHER; note = 2' O-methyl modified nucleoside
  modified_base 2..3: mod_base = OTHER; note = Phosphorothioate linkage
  modified_base 3: mod_base = OTHER; note = 2' fluoro-modified nucleoside
  modified_base 4: mod_base = OTHER; note = 2' O-methyl modified nucleoside
  modified_base 5: mod_base = OTHER; note = 2' fluoro-modified nucleoside
  modified_base 6: mod_base = OTHER; note = 2' O-methyl modified nucleoside
  modified_base 7: mod_base = OTHER; note = 2' fluoro-modified nucleoside
  modified_base 8: mod_base = OTHER; note = 2' fluoro-modified nucleoside
  modified_base 9: mod_base = OTHER; note = 2' fluoro-modified nucleoside
  modified_base 10: mod_base = OTHER; note = 2' O-methyl modified nucleoside
  modified_base 11: mod_base = OTHER; note = 2' fluoro-modified nucleoside
  modified_base 12: mod_base = OTHER; note = 2' O-methyl modified nucleoside
  modified_base 13: mod_base = OTHER; note = 2' fluoro-modified nucleoside
  modified_base 14: mod_base = OTHER; note = 2' O-methyl modified nucleoside
  modified_base 15: mod_base = OTHER; note = 2' fluoro-modified nucleoside
  modified_base 16: mod_base = OTHER; note = 2' O-methyl modified nucleoside
  modified_base 17: mod_base = OTHER; note = 2' fluoro-modified nucleoside
  modified_base 18: mod_base = OTHER; note = 2' O-methyl modified nucleoside
  modified_base 19: mod_base = OTHER; note = 2' fluoro-modified nucleoside
  modified_base 19..20: mod_base = OTHER; note = Phosphorothioate linkage
  modified_base 20: mod_base = OTHER; note = 2' O-methyl modified nucleoside
  modified_base 20..21: mod_base = OTHER; note = Phosphorothioate linkage
  modified_base 21: mod_base = OTHER; note = 2' O-methyl modified nucleoside
  source 1..21: mol_type = other RNA
gtacaactgctgcacagaatt

SEQ ID NO: 11177 - RNA, 21 nt, synthetic construct
  misc_feature 1..21: note = Description of Artificial Sequence: Synthetic oligonucleotide
  modified_base 1: mod_base = OTHER; note = 2' fluoro-modified nucleoside
  modified_base 1..2: mod_base = OTHER; note = Phosphorothioate linkage
  modified_base 2: mod_base = OTHER; note = 2' O-methyl modified nucleoside
  modified_base 2..3: mod_base = OTHER; note = Phosphorothioate linkage
  modified_base 3: mod_base = OTHER; note = 2' fluoro-modified nucleoside
  modified_base 4: mod_base = OTHER; note = 2' O-methyl modified nucleoside
  modified_base 5: mod_base = OTHER; note = 2' fluoro-modified nucleoside
  modified_base 6: mod_base = OTHER; note = 2' O-methyl modified nucleoside
  modified_base 7: mod_base = OTHER; note = 2' fluoro-modified nucleoside
  modified_base 8: mod_base = OTHER; note = 2' fluoro-modified nucleoside
  modified_base 9: mod_base = OTHER; note = 2' fluoro-modified nucleoside
  modified_base 10: mod_base = OTHER; note = 2' O-methyl modified nucleoside
  modified_base 11: mod_base = OTHER; note = 2' fluoro-modified nucleoside
  modified_base 12: mod_base = OTHER; note = 2' O-methyl modified nucleoside
  modified_base 13: mod_base = OTHER; note = 2' fluoro-modified nucleoside
  modified_base 14: mod_base = OTHER; note = 2' O-methyl modified nucleoside
  modified_base 15: mod_base = OTHER; note = 2' fluoro-modified nucleoside
  modified_base 16: mod_base = OTHER; note = 2' O-methyl modified nucleoside
  modified_base 17: mod_base = OTHER; note = 2' fluoro-modified nucleoside
  modified_base 18: mod_base = OTHER; note = 2' O-methyl modified nucleoside
  modified_base 19: mod_base = OTHER; note = 2' fluoro-modified nucleoside
  modified_base 19..20: mod_base = OTHER; note = Phosphorothioate linkage
  modified_base 20: mod_base = OTHER; note = 2' O-methyl modified nucleoside
  modified_base 20..21: mod_base = OTHER; note = Phosphorothioate linkage
  modified_base 21: mod_base = OTHER; note = 2' O-methyl modified nucleoside
  source 1..21: mol_type = other RNA
cctcaatggagtgtactaatt

SEQ ID NO: 11178 - RNA, 21 nt, synthetic construct
  misc_feature 1..21: note = Description of Artificial Sequence: Synthetic oligonucleotide
  modified_base 1: mod_base = OTHER; note = 2' fluoro-modified nucleoside
  modified_base 1..2: mod_base = OTHER; note = Phosphorothioate linkage
  modified_base 2: mod_base = OTHER; note = 2' O-methyl modified nucleoside
  modified_base 2..3: mod_base = OTHER; note = Phosphorothioate linkage
  modified_base 3: mod_base = OTHER; note = 2' fluoro-modified nucleoside
  modified_base 4: mod_base = OTHER; note = 2' O-methyl modified nucleoside
  modified_base 5: mod_base = OTHER; note = 2' fluoro-modified nucleoside
  modified_base 6: mod_base = OTHER; note = 2' O-methyl modified nucleoside
  modified_base 7: mod_base = OTHER; note = 2' fluoro-modified nucleoside
  modified_base 8: mod_base = OTHER; note = 2' fluoro-modified nucleoside
  modified_base 9: mod_base = OTHER; note = 2' fluoro-modified nucleoside
  modified_base 10: mod_base = OTHER; note = 2' O-methyl modified nucleoside
  modified_base 11: mod_base = OTHER; note = 2' fluoro-modified nucleoside
  modified_base 12: mod_base = OTHER; note = 2' O-methyl modified nucleoside
  modified_base 13: mod_base = OTHER; note = 2' fluoro-modified nucleoside
  modified_base 14: mod_base = OTHER; note = 2' O-methyl modified nucleoside
  modified_base 15: mod_base = OTHER; note = 2' fluoro-modified nucleoside
  modified_base 16: mod_base = OTHER; note = 2' O-methyl modified nucleoside
  modified_base 17: mod_base = OTHER; note = 2' fluoro-modified nucleoside
  modified_base 18: mod_base = OTHER; note = 2' O-methyl modified nucleoside
  modified_base 19: mod_base = OTHER; note = 2' fluoro-modified nucleoside
  modified_base 19..20: mod_base = OTHER; note = Phosphorothioate linkage
  modified_base 20: mod_base = OTHER; note = 2' O-methyl modified nucleoside
  modified_base 20..21: mod_base = OTHER; note = Phosphorothioate linkage
  modified_base 21: mod_base = OTHER; note = 2' O-methyl modified nucleoside
  source 1..21: mol_type = other RNA
ctcaatggagtgtactacatt

SEQ ID NO: 11179 - RNA, 21 nt, synthetic construct
  misc_feature 1..21: note = Description of Artificial Sequence: Synthetic oligonucleotide
  modified_base 1: mod_base = OTHER; note = 2' fluoro-modified nucleoside
  modified_base 1..2: mod_base = OTHER; note = Phosphorothioate linkage
  modified_base 2: mod_base = OTHER; note = 2' O-methyl modified nucleoside
  modified_base 2..3: mod_base = OTHER; note = Phosphorothioate linkage
  modified_base 3: mod_base = OTHER; note = 2' fluoro-modified nucleoside
  modified_base 4: mod_base = OTHER; note = 2' O-methyl modified nucleoside
  modified_base 5: mod_base = OTHER; note = 2' fluoro-modified nucleoside
  modified_base 6: mod_base = OTHER; note = 2' O-methyl modified nucleoside
  modified_base 7: mod_base = OTHER; note = 2' fluoro-modified nucleoside
  modified_base 8: mod_base = OTHER; note = 2' fluoro-modified nucleoside
  modified_base 9: mod_base = OTHER; note = 2' fluoro-modified nucleoside
  modified_base 10: mod_base = OTHER; note = 2' O-methyl modified nucleoside
  modified_base 11: mod_base = OTHER; note = 2' fluoro-modified nucleoside
  modified_base 12: mod_base = OTHER; note = 2' O-methyl modified nucleoside
  modified_base 13: mod_base = OTHER; note = 2' fluoro-modified nucleoside
  modified_base 14: mod_base = OTHER; note = 2' O-methyl modified nucleoside
  modified_base 15: mod_base = OTHER; note = 2' fluoro-modified nucleoside
  modified_base 16: mod_base = OTHER; note = 2' O-methyl modified nucleoside
  modified_base 17: mod_base = OTHER; note = 2' fluoro-modified nucleoside
  modified_base 18: mod_base = OTHER; note = 2' O-methyl modified nucleoside
  modified_base 19: mod_base = OTHER; note = 2' fluoro-modified nucleoside
  modified_base 19..20: mod_base = OTHER; note = Phosphorothioate linkage
  modified_base 20: mod_base = OTHER; note = 2' O-methyl modified nucleoside
  modified_base 20..21: mod_base = OTHER; note = Phosphorothioate linkage
  modified_base 21: mod_base = OTHER; note = 2' O-methyl modified nucleoside
  source 1..21: mol_type = other RNA
tcaatggagtgtactaccatt

SEQ ID NO: 11180 - RNA, 21 nt, synthetic construct
  misc_feature 1..21: note = Description of Artificial Sequence: Synthetic oligonucleotide
  modified_base 1: mod_base = OTHER; note = 2' fluoro-modified nucleoside
  modified_base 1..2: mod_base = OTHER; note = Phosphorothioate linkage
  modified_base 2: mod_base = OTHER; note = 2' O-methyl modified nucleoside
  modified_base 2..3: mod_base = OTHER; note = Phosphorothioate linkage
  modified_base 3: mod_base = OTHER; note = 2' fluoro-modified nucleoside
  modified_base 4: mod_base = OTHER; note = 2' O-methyl modified nucleoside
  modified_base 5: mod_base = OTHER; note = 2' fluoro-modified nucleoside
  modified_base 6: mod_base = OTHER; note = 2' O-methyl modified nucleoside
  modified_base 7: mod_base = OTHER; note = 2' fluoro-modified nucleoside
  modified_base 8: mod_base = OTHER; note = 2' fluoro-modified nucleoside
  modified_base 9: mod_base = OTHER; note = 2' fluoro-modified nucleoside
  modified_base 10: mod_base = OTHER; note = 2' O-methyl modified nucleoside
  modified_base 11: mod_base = OTHER; note = 2' fluoro-modified nucleoside
  modified_base 12: mod_base = OTHER; note = 2' O-methyl modified nucleoside
  modified_base 13: mod_base = OTHER; note = 2' fluoro-modified nucleoside
  modified_base 14: mod_base = OTHER; note = 2' O-methyl modified nucleoside
  modified_base 15: mod_base = OTHER; note = 2' fluoro-modified nucleoside
  modified_base 16: mod_base = OTHER; note = 2' O-methyl modified nucleoside
  modified_base 17: mod_base = OTHER; note = 2' fluoro-modified nucleoside
  modified_base 18: mod_base = OTHER; note = 2' O-methyl modified nucleoside
  modified_base 19: mod_base = OTHER; note = 2' fluoro-modified nucleoside
  modified_base 19..20: mod_base = OTHER; note = Phosphorothioate linkage
  modified_base 20: mod_base = OTHER; note = 2' O-methyl modified nucleoside
  modified_base 20..21: mod_base = OTHER; note = Phosphorothioate linkage
  modified_base 21: mod_base = OTHER; note = 2' O-methyl modified nucleoside
  source 1..21: mol_type = other RNA
caatggagtgtactaccgatt

SEQ ID NO: 11181 - RNA, 21 nt, synthetic construct
  misc_feature 1..21: note = Description of Artificial Sequence: Synthetic oligonucleotide
  modified_base 1: mod_base = OTHER; note = 2' fluoro-modified nucleoside
  modified_base 1..2: mod_base = OTHER; note = Phosphorothioate linkage
  modified_base 2: mod_base = OTHER; note = 2' O-methyl modified nucleoside
  modified_base 2..3: mod_base = OTHER; note = Phosphorothioate linkage
  modified_base 3: mod_base = OTHER; note = 2' fluoro-modified nucleoside
  modified_base 4: mod_base = OTHER; note = 2' O-methyl modified nucleoside
  modified_base 5: mod_base = OTHER; note = 2' fluoro-modified nucleoside
  modified_base 6: mod_base = OTHER; note = 2' O-methyl modified nucleoside
  modified_base 7: mod_base = OTHER; note = 2' fluoro-modified nucleoside
  modified_base 8: mod_base = OTHER; note = 2' fluoro-modified nucleoside
  modified_base 9: mod_base = OTHER; note = 2' fluoro-modified nucleoside
  modified_base 10: mod_base = OTHER; note = 2' O-methyl modified nucleoside
  modified_base 11: mod_base = OTHER; note = 2' fluoro-modified nucleoside
  modified_base 12: mod_base = OTHER; note = 2' O-methyl modified nucleoside
  modified_base 13: mod_base = OTHER; note = 2' fluoro-modified nucleoside
  modified_base 14: mod_base = OTHER; note = 2' O-methyl modified nucleoside
  modified_base 15: mod_base = OTHER; note = 2' fluoro-modified nucleoside
  modified_base 16: mod_base = OTHER; note = 2' O-methyl modified nucleoside
  modified_base 17: mod_base = OTHER; note = 2' fluoro-modified nucleoside
  modified_base 18: mod_base = OTHER; note = 2' O-methyl modified nucleoside
  modified_base 19: mod_base = OTHER; note = 2' fluoro-modified nucleoside
  modified_base 19..20: mod_base = OTHER; note = Phosphorothioate linkage
  modified_base 20: mod_base = OTHER; note = 2' O-methyl modified nucleoside
  modified_base 20..21: mod_base = OTHER; note = Phosphorothioate linkage
  modified_base 21: mod_base = OTHER; note = 2' O-methyl modified nucleoside
  source 1..21: mol_type = other RNA
tggcatggatctacctacatt

SEQ ID NO: 11182 - RNA, 21 nt, synthetic construct
  misc_feature 1..21: note = Description of Artificial Sequence: Synthetic oligonucleotide
  modified_base 1: mod_base = OTHER; note = 2' fluoro-modified nucleoside
  modified_base 1..2: mod_base = OTHER; note = Phosphorothioate linkage
  modified_base 2: mod_base = OTHER; note = 2' O-methyl modified nucleoside
  modified_base 2..3: mod_base = OTHER; note = Phosphorothioate linkage
  modified_base 3: mod_base = OTHER; note = 2' fluoro-modified nucleoside
  modified_base 4: mod_base = OTHER; note = 2' O-methyl modified nucleoside
  modified_base 5: mod_base = OTHER; note = 2' fluoro-modified nucleoside
  modified_base 6: mod_base = OTHER; note = 2' O-methyl modified nucleoside
  modified_base 7: mod_base = OTHER; note = 2' fluoro-modified nucleoside
  modified_base 8: mod_base = OTHER; note = 2' fluoro-modified nucleoside
  modified_base 9: mod_base = OTHER; note = 2' fluoro-modified nucleoside
  modified_base 10: mod_base = OTHER; note = 2' O-methyl modified nucleoside
  modified_base 11: mod_base = OTHER; note = 2' fluoro-modified nucleoside
  modified_base 12: mod_base = OTHER; note = 2' O-methyl modified nucleoside
  modified_base 13: mod_base = OTHER; note = 2' fluoro-modified nucleoside
  modified_base 14: mod_base = OTHER; note = 2' O-methyl modified nucleoside
  modified_base 15: mod_base = OTHER; note = 2' fluoro-modified nucleoside
  modified_base 16: mod_base = OTHER; note = 2' O-methyl modified nucleoside
  modified_base 17: mod_base = OTHER; note = 2' fluoro-modified nucleoside
  modified_base 18: mod_base = OTHER; note = 2' O-methyl modified nucleoside
  modified_base 19: mod_base = OTHER; note = 2' fluoro-modified nucleoside
  modified_base 19..20: mod_base = OTHER; note = Phosphorothioate linkage
  modified_base 20: mod_base = OTHER; note = 2' O-methyl modified nucleoside
  modified_base 20..21: mod_base = OTHER; note = Phosphorothioate linkage
  modified_base 21: mod_base = OTHER; note = 2' O-methyl modified nucleoside
  source 1..21: mol_type = other RNA
ggcatggatctacctactatt

SEQ ID NO: 11183 - RNA, 21 nt, synthetic construct
  misc_feature 1..21: note = Description of Artificial Sequence: Synthetic oligonucleotide
  modified_base 1: mod_base = OTHER; note = 2' fluoro-modified nucleoside
  modified_base 1..2: mod_base = OTHER; note = Phosphorothioate linkage
  modified_base 2: mod_base = OTHER; note = 2' O-methyl modified nucleoside
  modified_base 2..3: mod_base = OTHER; note = Phosphorothioate linkage
  modified_base 3: mod_base = OTHER; note = 2' fluoro-modified nucleoside
  modified_base 4: mod_base = OTHER; note = 2' O-methyl modified nucleoside
  modified_base 5: mod_base = OTHER; note = 2' fluoro-modified nucleoside
  modified_base 6: mod_base = OTHER; note = 2' O-methyl modified nucleoside
  modified_base 7: mod_base = OTHER; note = 2' fluoro-modified nucleoside
  modified_base 8: mod_base = OTHER; note = 2' fluoro-modified nucleoside
  modified_base 9: mod_base = OTHER; note = 2' fluoro-modified nucleoside
  modified_base 10: mod_base = OTHER; note = 2' O-methyl modified nucleoside
  modified_base 11: mod_base = OTHER; note = 2' fluoro-modified nucleoside
  modified_base 12: mod_base = OTHER; note = 2' O-methyl modified nucleoside
  modified_base 13: mod_base = OTHER; note = 2' fluoro-modified nucleoside
  modified_base 14: mod_base = OTHER; note = 2' O-methyl modified nucleoside
  modified_base 15: mod_base = OTHER; note = 2' fluoro-modified nucleoside
  modified_base 16: mod_base = OTHER; note = 2' O-methyl modified nucleoside
  modified_base 17: mod_base = OTHER; note = 2' fluoro-modified nucleoside
  modified_base 18: mod_base = OTHER; note = 2' O-methyl modified nucleoside
  modified_base 19: mod_base = OTHER; note = 2' fluoro-modified nucleoside
  modified_base 19..20: mod_base = OTHER; note = Phosphorothioate linkage
  modified_base 20: mod_base = OTHER; note = 2' O-methyl modified nucleoside
  modified_base 20..21: mod_base = OTHER; note = Phosphorothioate linkage
  modified_base 21: mod_base = OTHER; note = 2' O-methyl modified nucleoside
  source 1..21: mol_type = other RNA
catggatctacctactccatt

SEQ ID NO: 11184 - RNA, 21 nt, synthetic construct
  misc_feature 1..21: note = Description of Artificial Sequence: Synthetic oligonucleotide
  modified_base 1: mod_base = OTHER; note = 2' fluoro-modified nucleoside
  modified_base 1..2: mod_base = OTHER; note = Phosphorothioate linkage
  modified_base 2: mod_base = OTHER; note = 2' O-methyl modified nucleoside
  modified_base 2..3: mod_base = OTHER; note = Phosphorothioate linkage
  modified_base 3: mod_base = OTHER; note = 2' fluoro-modified nucleoside
  modified_base 4: mod_base = OTHER; note = 2' O-methyl modified nucleoside
  modified_base 5: mod_base = OTHER; note = 2' fluoro-modified nucleoside
  modified_base 6: mod_base = OTHER; note = 2' O-methyl modified nucleoside
  modified_base 7: mod_base = OTHER; note = 2' fluoro-modified nucleoside
  modified_base 8: mod_base = OTHER; note = 2' fluoro-modified nucleoside
  modified_base 9: mod_base = OTHER; note = 2' fluoro-modified nucleoside
  modified_base 10: mod_base = OTHER; note = 2' O-methyl modified nucleoside
  modified_base 11: mod_base = OTHER; note = 2' fluoro-modified nucleoside
  modified_base 12: mod_base = OTHER; note = 2' O-methyl modified nucleoside
  modified_base 13: mod_base = OTHER; note = 2' fluoro-modified nucleoside
  modified_base 14: mod_base = OTHER; note = 2' O-methyl modified nucleoside
  modified_base 15: mod_base = OTHER; note = 2' fluoro-modified nucleoside
  modified_base 16: mod_base = OTHER; note = 2' O-methyl modified nucleoside
  modified_base 17: mod_base = OTHER; note = 2' fluoro-modified nucleoside
  modified_base 18: mod_base = OTHER; note = 2' O-methyl modified nucleoside
  modified_base 19: mod_base = OTHER; note = 2' fluoro-modified nucleoside
  modified_base 19..20: mod_base = OTHER; note = Phosphorothioate linkage
  modified_base 20: mod_base = OTHER; note = 2' O-methyl modified nucleoside
  modified_base 20..21: mod_base = OTHER; note = Phosphorothioate linkage
  modified_base 21: mod_base = OTHER; note = 2' O-methyl modified nucleoside
  source 1..21: mol_type = other RNA
atggatctacctactcccatt

SEQ ID NO: 11185 - RNA, 21 nt, synthetic construct
  misc_feature 1..21: note = Description of Artificial Sequence: Synthetic oligonucleotide
  modified_base 1: mod_base = OTHER; note = 2' fluoro-modified nucleoside
  modified_base 1..2: mod_base = OTHER; note = Phosphorothioate linkage
  modified_base 2: mod_base = OTHER; note = 2' O-methyl modified nucleoside
  modified_base 2..3: mod_base = OTHER; note = Phosphorothioate linkage
  modified_base 3: mod_base = OTHER; note = 2' fluoro-modified nucleoside
  modified_base 4: mod_base = OTHER; note = 2' O-methyl modified nucleoside
  modified_base 5: mod_base = OTHER; note = 2' fluoro-modified nucleoside
  modified_base 6: mod_base = OTHER; note = 2' O-methyl modified nucleoside
  modified_base 7: mod_base = OTHER; note = 2' fluoro-modified nucleoside
  modified_base 8: mod_base = OTHER; note = 2' fluoro-modified nucleoside
  modified_base 9: mod_base = OTHER; note = 2' fluoro-modified nucleoside
  modified_base 10: mod_base = OTHER; note = 2' O-methyl modified nucleoside
  modified_base 11: mod_base = OTHER; note = 2' fluoro-modified nucleoside
  modified_base 12: mod_base = OTHER; note = 2' O-methyl modified nucleoside
  modified_base 13: mod_base = OTHER; note = 2' fluoro-modified nucleoside
  modified_base 14: mod_base = OTHER; note = 2' O-methyl modified nucleoside
  modified_base 15: mod_base = OTHER; note = 2' fluoro-modified nucleoside
  modified_base 16: mod_base = OTHER; note = 2' O-methyl modified nucleoside
  modified_base 17: mod_base = OTHER; note = 2' fluoro-modified nucleoside
  modified_base 18: mod_base = OTHER; note = 2' O-methyl modified nucleoside
  modified_base 19: mod_base = OTHER; note = 2' fluoro-modified nucleoside
  modified_base 19..20: mod_base = OTHER; note = Phosphorothioate linkage
  modified_base 20: mod_base = OTHER; note = 2' O-methyl modified nucleoside
  modified_base 20..21: mod_base = OTHER; note = Phosphorothioate linkage
  modified_base 21: mod_base = OTHER; note = 2' O-methyl modified nucleoside
  source 1..21: mol_type = other RNA
cttaaaaggaggctgccgatt

SEQ ID NO: 11186 - RNA, 21 nt, synthetic construct
  misc_feature 1..21: note = Description of Artificial Sequence: Synthetic oligonucleotide
  modified_base 1: mod_base = OTHER; note = 2' fluoro-modified nucleoside
  modified_base 1..2: mod_base = OTHER; note = Phosphorothioate linkage
  modified_base 2: mod_base = OTHER; note = 2' O-methyl modified nucleoside
  modified_base 2..3: mod_base = OTHER; note = Phosphorothioate linkage
  modified_base 3: mod_base = OTHER; note = 2' fluoro-modified nucleoside
  modified_base 4: mod_base = OTHER; note = 2' O-methyl modified nucleoside
  modified_base 5: mod_base = OTHER; note = 2' fluoro-modified nucleoside
  modified_base 6: mod_base = OTHER; note = 2' O-methyl modified nucleoside
  modified_base 7: mod_base = OTHER; note = 2' fluoro-modified nucleoside
  modified_base 8: mod_base = OTHER; note = 2' fluoro-modified nucleoside
  modified_base 9: mod_base = OTHER; note = 2' fluoro-modified nucleoside
  modified_base 10: mod_base = OTHER; note = 2' O-methyl modified nucleoside
  modified_base 11: mod_base = OTHER; note = 2' fluoro-modified nucleoside
  modified_base 12: mod_base = OTHER; note = 2' O-methyl modified nucleoside
  modified_base 13: mod_base = OTHER; note = 2' fluoro-modified nucleoside
  modified_base 14: mod_base = OTHER; note = 2' O-methyl modified nucleoside
  modified_base 15: mod_base = OTHER; note = 2' fluoro-modified nucleoside
  modified_base 16: mod_base = OTHER; note = 2' O-methyl modified nucleoside
  modified_base 17: mod_base = OTHER; note = 2' fluoro-modified nucleoside
  modified_base 18: mod_base = OTHER; note = 2' O-methyl modified nucleoside
  modified_base 19: mod_base = OTHER; note = 2' fluoro-modified nucleoside
  modified_base 19..20: mod_base = OTHER; note = Phosphorothioate linkage
  modified_base 20: mod_base = OTHER; note = 2' O-methyl modified nucleoside
  modified_base 20..21: mod_base = OTHER; note = Phosphorothioate linkage
  modified_base 21: mod_base = OTHER; note = 2' O-methyl modified nucleoside
  source 1..21: mol_type = other RNA
atatgtaccaaggatgttatt

SEQ ID NO: 11187 - RNA, 21 nt, synthetic construct
  misc_feature 1..21: note = Description of Artificial Sequence: Synthetic oligonucleotide
  modified_base 1: mod_base = OTHER; note = 2' fluoro-modified nucleoside
  modified_base 1..2: mod_base = OTHER; note = Phosphorothioate linkage
  modified_base 2: mod_base = OTHER; note = 2' O-methyl modified nucleoside
  modified_base 2..3: mod_base = OTHER; note = Phosphorothioate linkage
  modified_base 3: mod_base = OTHER; note = 2' fluoro-modified nucleoside
  modified_base 4: mod_base = OTHER; note = 2' O-methyl modified nucleoside
  modified_base 5: mod_base = OTHER; note = 2' fluoro-modified nucleoside
  modified_base 6: mod_base = OTHER; note = 2' O-methyl modified nucleoside
  modified_base 7: mod_base = OTHER; note = 2' fluoro-modified nucleoside
  modified_base 8: mod_base = OTHER; note = 2' fluoro-modified nucleoside
  modified_base 9: mod_base = OTHER; note = 2' fluoro-modified nucleoside
  modified_base 10: mod_base = OTHER; note = 2' O-methyl modified nucleoside
  modified_base 11: mod_base = OTHER; note = 2' fluoro-modified nucleoside
  modified_base 12: mod_base = OTHER; note = 2' O-methyl modified nucleoside
  modified_base 13: mod_base = OTHER; note = 2' fluoro-modified nucleoside
  modified_base 14: mod_base = OTHER; note = 2' O-methyl modified nucleoside
  modified_base 15: mod_base = OTHER; note = 2' fluoro-modified nucleoside
  modified_base 16: mod_base = OTHER; note = 2' O-methyl modified nucleoside
  modified_base 17: mod_base = OTHER; note = 2' fluoro-modified nucleoside
  modified_base 18: mod_base = OTHER; note = 2' O-methyl modified nucleoside
  modified_base 19: mod_base = OTHER; note = 2' fluoro-modified nucleoside
  modified_base 19..20: mod_base = OTHER; note = Phosphorothioate linkage
  modified_base 20: mod_base = OTHER; note = 2' O-methyl modified nucleoside
  modified_base 20..21: mod_base = OTHER; note = Phosphorothioate linkage
  modified_base 21: mod_base = OTHER; note = 2' O-methyl modified nucleoside
  source 1..21: mol_type = other RNA
tgtaccaaggatgttacaatt

SEQ ID NO: 11188 - RNA, 21 nt, synthetic construct
  misc_feature 1..21: note = Description of Artificial Sequence: Synthetic oligonucleotide
  modified_base 1: mod_base = OTHER; note = 2' fluoro-modified nucleoside
  modified_base 1..2: mod_base = OTHER; note = Phosphorothioate linkage
  modified_base 2: mod_base = OTHER; note = 2' O-methyl modified nucleoside
  modified_base 2..3: mod_base = OTHER; note = Phosphorothioate linkage
  modified_base 3: mod_base = OTHER; note = 2' fluoro-modified nucleoside
  modified_base 4: mod_base = OTHER; note = 2' O-methyl modified nucleoside
  modified_base 5: mod_base = OTHER; note = 2' fluoro-modified nucleoside
  modified_base 6: mod_base = OTHER; note = 2' O-methyl modified nucleoside
  modified_base 7: mod_base = OTHER; note = 2' fluoro-modified nucleoside
  modified_base 8: mod_base = OTHER; note = 2' fluoro-modified nucleoside
  modified_base 9: mod_base = OTHER; note = 2' fluoro-modified nucleoside
  modified_base 10: mod_base = OTHER; note = 2' O-methyl modified nucleoside
  modified_base 11: mod_base = OTHER; note = 2' fluoro-modified nucleoside
  modified_base 12: mod_base = OTHER; note = 2' O-methyl modified nucleoside
  modified_base 13: mod_base = OTHER; note = 2' fluoro-modified nucleoside
  modified_base 14: mod_base = OTHER; note = 2' O-methyl modified nucleoside
  modified_base 15: mod_base = OTHER; note = 2' fluoro-modified nucleoside
  modified_base 16: mod_base = OTHER; note = 2' O-methyl modified nucleoside
  modified_base 17: mod_base = OTHER; note = 2' fluoro-modified nucleoside
  modified_base 18: mod_base = OTHER; note = 2' O-methyl modified nucleoside
  modified_base 19: mod_base = OTHER; note = 2' fluoro-modified nucleoside
  modified_base 19..20: mod_base = OTHER; note = Phosphorothioate linkage
  modified_base 20: mod_base = OTHER; note = 2' O-methyl modified nucleoside
  modified_base 20..21: mod_base = OTHER; note = Phosphorothioate linkage
  modified_base 21: mod_base = OTHER; note = 2' O-methyl modified nucleoside
  source 1..21: mol_type = other RNA
aggatgttacagtaaacaatt

SEQ ID NO: 11189 - RNA, 21 nt, synthetic construct
  misc_feature 1..21: note = Description of Artificial Sequence: Synthetic oligonucleotide
  modified_base 1: mod_base = OTHER; note = 2' fluoro-modified nucleoside
  modified_base 1..2: mod_base = OTHER; note = Phosphorothioate linkage
  modified_base 2: mod_base = OTHER; note = 2' O-methyl modified nucleoside
  modified_base 2..3: mod_base = OTHER; note = Phosphorothioate linkage
  modified_base 3: mod_base = OTHER; note = 2' fluoro-modified nucleoside
  modified_base 4: mod_base = OTHER; note = 2' O-methyl modified nucleoside
  modified_base 5: mod_base = OTHER; note = 2' fluoro-modified nucleoside
  modified_base 6: mod_base = OTHER; note = 2' O-methyl modified nucleoside
  modified_base 7: mod_base = OTHER; note = 2' fluoro-modified nucleoside
  modified_base 8: mod_base = OTHER; note = 2' fluoro-modified nucleoside
  modified_base 9: mod_base = OTHER; note = 2' fluoro-modified nucleoside
  modified_base 10: mod_base = OTHER; note = 2' O-methyl modified nucleoside
  modified_base 11: mod_base = OTHER; note = 2' fluoro-modified nucleoside
  modified_base 12: mod_base = OTHER; note = 2' O-methyl modified nucleoside
  modified_base 13: mod_base = OTHER; note = 2' fluoro-modified nucleoside
  modified_base 14: mod_base = OTHER; note = 2' O-methyl modified nucleoside
  modified_base 15: mod_base = OTHER; note = 2' fluoro-modified nucleoside
  modified_base 16: mod_base = OTHER; note = 2' O-methyl modified nucleoside
  modified_base 17: mod_base = OTHER; note = 2' fluoro-modified nucleoside
  modified_base 18: mod_base = OTHER; note = 2' O-methyl modified nucleoside
  modified_base 19: mod_base = OTHER; note = 2' fluoro-modified nucleoside
  modified_base 19..20: mod_base = OTHER; note = Phosphorothioate linkage
  modified_base 20: mod_base = OTHER; note = 2' O-methyl modified nucleoside
  modified_base 20..21: mod_base = OTHER; note = Phosphorothioate linkage
  modified_base 21: mod_base = OTHER; note = 2' O-methyl modified nucleoside
  source 1..21: mol_type = other RNA
ggatgttacagtaaacagatt

SEQ ID NO: 11190 - RNA, 21 nt, synthetic construct
  misc_feature 1..21: note = Description of Artificial Sequence: Synthetic oligonucleotide
  modified_base 1: mod_base = OTHER; note = 2' fluoro-modified nucleoside
  modified_base 1..2: mod_base = OTHER; note = Phosphorothioate linkage
  modified_base 2: mod_base = OTHER; note = 2' O-methyl modified nucleoside
  modified_base 2..3: mod_base = OTHER; note = Phosphorothioate linkage
  modified_base 3: mod_base = OTHER; note = 2' fluoro-modified nucleoside
  modified_base 4: mod_base = OTHER; note = 2' O-methyl modified nucleoside
  modified_base 5: mod_base = OTHER; note = 2' fluoro-modified nucleoside
  modified_base 6: mod_base = OTHER; note = 2' O-methyl modified nucleoside
  modified_base 7: mod_base = OTHER; note = 2' fluoro-modified nucleoside
  modified_base 8: mod_base = OTHER; note = 2' fluoro-modified nucleoside
  modified_base 9: mod_base = OTHER; note = 2' fluoro-modified nucleoside
  modified_base 10: mod_base = OTHER; note = 2' O-methyl modified nucleoside
  modified_base 11: mod_base = OTHER; note = 2' fluoro-modified nucleoside
  modified_base 12: mod_base = OTHER; note = 2' O-methyl modified nucleoside
  modified_base 13: mod_base = OTHER; note = 2' fluoro-modified nucleoside
  modified_base 14: mod_base = OTHER; note = 2' O-methyl modified nucleoside
  modified_base 15: mod_base = OTHER; note = 2' fluoro-modified nucleoside
  modified_base 16: mod_base = OTHER; note = 2' O-methyl modified nucleoside
  modified_base 17: mod_base = OTHER; note = 2' fluoro-modified nucleoside
  modified_base 18: mod_base = OTHER; note = 2' O-methyl modified nucleoside
  modified_base 19: mod_base = OTHER; note = 2' fluoro-modified nucleoside
  modified_base 19..20: mod_base = OTHER; note = Phosphorothioate linkage
  modified_base 20: mod_base = OTHER; note = 2' O-methyl modified nucleoside
  modified_base 20..21: mod_base = OTHER; note = Phosphorothioate linkage
  modified_base 21: mod_base = OTHER; note = 2' O-methyl modified nucleoside
  source 1..21: mol_type = other RNA
ttaaacccactgggtcctatt

SEQ ID NO: 11191 - RNA, 21 nt, synthetic construct
  misc_feature 1..21: note = Description of Artificial Sequence: Synthetic oligonucleotide
  modified_base 1: mod_base = OTHER; note = 2' fluoro-modified nucleoside
  modified_base 1..2: mod_base = OTHER; note = Phosphorothioate linkage
  modified_base 2: mod_base = OTHER; note = 2' O-methyl modified nucleoside
  modified_base 2..3: mod_base = OTHER; note = Phosphorothioate linkage
  modified_base 3: mod_base = OTHER; note = 2' fluoro-modified nucleoside
  modified_base 4: mod_base = OTHER; note = 2' O-methyl modified nucleoside
  modified_base 5: mod_base = OTHER; note = 2' fluoro-modified nucleoside
  modified_base 6: mod_base = OTHER; note = 2' O-methyl modified nucleoside
  modified_base 7: mod_base = OTHER; note = 2' fluoro-modified nucleoside
  modified_base 8: mod_base = OTHER; note = 2' fluoro-modified nucleoside
  modified_base 9: mod_base = OTHER; note = 2' fluoro-modified nucleoside
  modified_base 10: mod_base = OTHER; note = 2' O-methyl modified nucleoside
  modified_base 11: mod_base = OTHER; note = 2' fluoro-modified nucleoside
  modified_base 12: mod_base = OTHER; note = 2' O-methyl modified nucleoside
  modified_base 13: mod_base = OTHER; note = 2' fluoro-modified nucleoside
  modified_base 14: mod_base = OTHER; note = 2' O-methyl modified nucleoside
  modified_base 15: mod_base = OTHER; note = 2' fluoro-modified nucleoside
  modified_base 16: mod_base = OTHER; note = 2' O-methyl modified nucleoside
  modified_base 17: mod_base = OTHER; note = 2' fluoro-modified nucleoside
  modified_base 18: mod_base = OTHER; note = 2' O-methyl modified nucleoside
  modified_base 19: mod_base = OTHER; note = 2' fluoro-modified nucleoside
  modified_base 19..20: mod_base = OTHER; note = Phosphorothioate linkage
  modified_base 20: mod_base = OTHER; note = 2' O-methyl modified nucleoside
  modified_base 20..21: mod_base = OTHER; note = Phosphorothioate linkage
  modified_base 21: mod_base = OTHER; note = 2' O-methyl modified nucleoside
  source 1..21: mol_type = other RNA
cccaagatccctgacataatt

SEQ ID NO: 11192 - RNA, 21 nt, synthetic construct
  misc_feature 1..21: note = Description of Artificial Sequence: Synthetic oligonucleotide
  modified_base 1: mod_base = OTHER; note = 2' fluoro-modified nucleoside
  modified_base 1..2: mod_base = OTHER; note = Phosphorothioate linkage
  modified_base 2: mod_base = OTHER; note = 2' O-methyl modified nucleoside
  modified_base 2..3: mod_base = OTHER; note = Phosphorothioate linkage
  modified_base 3: mod_base = OTHER; note = 2' fluoro-modified nucleoside
  modified_base 4: mod_base = OTHER; note = 2' O-methyl modified nucleoside
  modified_base 5: mod_base = OTHER; note = 2' fluoro-modified nucleoside
  modified_base 6: mod_base = OTHER; note = 2' O-methyl modified nucleoside
  modified_base 7: mod_base = OTHER; note = 2' fluoro-modified nucleoside
  modified_base 8: mod_base = OTHER; note = 2' fluoro-modified nucleoside
  modified_base 9: mod_base = OTHER; note = 2' fluoro-modified nucleoside
  modified_base 10: mod_base = OTHER; note = 2' O-methyl modified nucleoside
  modified_base 11: mod_base = OTHER; note = 2' fluoro-modified nucleoside
  modified_base 12: mod_base = OTHER; note = 2' O-methyl modified nucleoside
  modified_base 13: mod_base = OTHER; note = 2' fluoro-modified nucleoside
  modified_base 14: mod_base = OTHER; note = 2' O-methyl modified nucleoside
  modified_base 15: mod_base = OTHER; note = 2' fluoro-modified nucleoside
  modified_base 16: mod_base = OTHER; note = 2' O-methyl modified nucleoside
  modified_base 17: mod_base = OTHER; note = 2' fluoro-modified nucleoside
  modified_base 18: mod_base = OTHER; note = 2' O-methyl modified nucleoside
  modified_base 19: mod_base = OTHER; note = 2' fluoro-modified nucleoside
  modified_base 19..20: mod_base = OTHER; note = Phosphorothioate linkage
  modified_base 20: mod_base = OTHER; note = 2' O-methyl modified nucleoside
  modified_base 20..21: mod_base = OTHER; note = Phosphorothioate linkage
  modified_base 21: mod_base = OTHER; note = 2' O-methyl modified nucleoside
  source 1..21: mol_type = other RNA
ccaagatccctgacatagatt

SEQ ID NO: 11193 - RNA, 21 nt, synthetic construct
  misc_feature 1..21: note = Description of Artificial Sequence: Synthetic oligonucleotide
  modified_base 1: mod_base = OTHER; note = 2' fluoro-modified nucleoside
  modified_base 1..2: mod_base = OTHER; note = Phosphorothioate linkage
  modified_base 2: mod_base = OTHER; note = 2' O-methyl modified nucleoside
  modified_base 2..3: mod_base = OTHER; note = Phosphorothioate linkage
  modified_base 3: mod_base = OTHER; note = 2' fluoro-modified nucleoside
  modified_base 4: mod_base = OTHER; note = 2' O-methyl modified nucleoside
  modified_base 5: mod_base = OTHER; note = 2' fluoro-modified nucleoside
  modified_base 6: mod_base = OTHER; note = 2' O-methyl modified nucleoside
  modified_base 7: mod_base = OTHER; note = 2' fluoro-modified nucleoside
  modified_base 8: mod_base = OTHER; note = 2' fluoro-modified nucleoside
  modified_base 9: mod_base = OTHER; note = 2' fluoro-modified nucleoside
  modified_base 10: mod_base = OTHER; note = 2' O-methyl modified nucleoside
  modified_base 11: mod_base = OTHER; note = 2' fluoro-modified nucleoside
  modified_base 12: mod_base = OTHER; note = 2' O-methyl modified nucleoside
  modified_base 13: mod_base = OTHER; note = 2' fluoro-modified nucleoside
  modified_base 14: mod_base = OTHER; note = 2' O-methyl modified nucleoside
  modified_base 15: mod_base = OTHER; note = 2' fluoro-modified nucleoside
  modified_base 16: mod_base = OTHER; note = 2' O-methyl modified nucleoside
  modified_base 17: mod_base = OTHER; note = 2' fluoro-modified nucleoside
  modified_base 18: mod_base = OTHER; note = 2' O-methyl modified nucleoside
  modified_base 19: mod_base = OTHER; note = 2' fluoro-modified nucleoside
  modified_base 19..20: mod_base = OTHER; note = Phosphorothioate linkage
  modified_base 20: mod_base = OTHER; note = 2' O-methyl modified nucleoside
  modified_base 20..21: mod_base = OTHER; note = Phosphorothioate linkage
  modified_base 21: mod_base = OTHER; note = 2' O-methyl modified nucleoside
  source 1..21: mol_type = other RNA
aagatccctgacatagcaatt

SEQ ID NO: 11194 - RNA, 21 nt, synthetic construct
  misc_feature 1..21: note = Description of Artificial Sequence: Synthetic oligonucleotide
  modified_base 1: mod_base = OTHER; note = 2' fluoro-modified nucleoside
  modified_base 1..2: mod_base = OTHER; note = Phosphorothioate linkage
  modified_base 2: mod_base = OTHER; note = 2' O-methyl modified nucleoside
  modified_base 2..3: mod_base = OTHER; note = Phosphorothioate linkage
  modified_base 3: mod_base = OTHER; note = 2' fluoro-modified nucleoside
  modified_base 4: mod_base = OTHER; note = 2' O-methyl modified nucleoside
  modified_base 5: mod_base = OTHER; note = 2' fluoro-modified nucleoside
  modified_base 6: mod_base = OTHER; note = 2' O-methyl modified nucleoside
  modified_base 7: mod_base = OTHER; note = 2' fluoro-modified nucleoside
  modified_base 8: mod_base = OTHER; note = 2' fluoro-modified nucleoside
  modified_base 9: mod_base = OTHER; note = 2' fluoro-modified nucleoside
  modified_base 10: mod_base = OTHER; note = 2' O-methyl modified nucleoside
  modified_base 11: mod_base = OTHER; note = 2' fluoro-modified nucleoside
  modified_base 12: mod_base = OTHER; note = 2' O-methyl modified nucleoside
  modified_base 13: mod_base = OTHER; note = 2' fluoro-modified nucleoside
  modified_base 14: mod_base = OTHER; note = 2' O-methyl modified nucleoside
  modified_base 15: mod_base = OTHER; note = 2' fluoro-modified nucleoside
  modified_base 16: mod_base = OTHER; note = 2' O-methyl modified nucleoside
  modified_base 17: mod_base = OTHER; note = 2' fluoro-modified nucleoside
  modified_base 18: mod_base = OTHER; note = 2' O-methyl modified nucleoside
  modified_base 19: mod_base = OTHER; note = 2' fluoro-modified nucleoside
  modified_base 19..20: mod_base = OTHER; note = Phosphorothioate linkage
  modified_base 20: mod_base = OTHER; note = 2' O-methyl modified nucleoside
  modified_base 20..21: mod_base = OTHER; note = Phosphorothioate linkage
  modified_base 21: mod_base = OTHER; note = 2' O-methyl modified nucleoside
  source 1..21: mol_type = other RNA
agatccctgacatagcagatt

SEQ ID NO: 11195 - RNA, 21 nt, synthetic construct
  misc_feature 1..21: note = Description of Artificial Sequence: Synthetic oligonucleotide
  modified_base 1: mod_base = OTHER; note = 2' fluoro-modified nucleoside
  modified_base 1..2: mod_base = OTHER; note = Phosphorothioate linkage
  modified_base 2: mod_base = OTHER; note = 2' O-methyl modified nucleoside
  modified_base 2..3: mod_base = OTHER; note = Phosphorothioate linkage
  modified_base 3: mod_base = OTHER; note = 2' fluoro-modified nucleoside
  modified_base 4: mod_base = OTHER; note = 2' O-methyl modified nucleoside
  modified_base 5: mod_base = OTHER; note = 2' fluoro-modified nucleoside
  modified_base 6: mod_base = OTHER; note = 2' O-methyl modified nucleoside
  modified_base 7: mod_base = OTHER; note = 2' fluoro-modified nucleoside
  modified_base 8: mod_base = OTHER; note = 2' fluoro-modified nucleoside
  modified_base 9: mod_base = OTHER; note = 2' fluoro-modified nucleoside
  modified_base 10: mod_base = OTHER; note = 2' O-methyl modified nucleoside
  modified_base 11: mod_base = OTHER; note = 2' fluoro-modified nucleoside
  modified_base 12: mod_base = OTHER; note = 2' O-methyl modified nucleoside
  modified_base 13: mod_base = OTHER; note = 2' fluoro-modified nucleoside
  modified_base 14: mod_base = OTHER; note = 2' O-methyl modified nucleoside
  modified_base 15: mod_base = OTHER; note = 2' fluoro-modified nucleoside
  modified_base 16: mod_base = OTHER; note = 2' O-methyl modified nucleoside
  modified_base 17: mod_base = OTHER; note = 2' fluoro-modified nucleoside
  modified_base 18: mod_base = OTHER; note = 2' O-methyl modified nucleoside
  modified_base 19: mod_base = OTHER; note = 2' fluoro-modified nucleoside
  modified_base 19..20: mod_base = OTHER; note = Phosphorothioate linkage
  modified_base 20: mod_base = OTHER; note = 2' O-methyl modified nucleoside
  modified_base 20..21: mod_base = OTHER; note = Phosphorothioate linkage
  modified_base 21: mod_base = OTHER; note = 2' O-methyl modified nucleoside
  source 1..21: mol_type = other RNA
atccctgacatagcagtaatt

SEQ ID NO: 11196 - RNA, 21 nt, synthetic construct
  misc_feature 1..21: note = Description of Artificial Sequence: Synthetic oligonucleotide
  modified_base 1: mod_base = OTHER; note = 2' fluoro-modified nucleoside
  modified_base 1..2: mod_base = OTHER; note = Phosphorothioate linkage
  modified_base 2: mod_base = OTHER; note = 2' O-methyl modified nucleoside
  modified_base 2..3: mod_base = OTHER; note = Phosphorothioate linkage
  modified_base 3: mod_base = OTHER; note = 2' fluoro-modified nucleoside
  modified_base 4: mod_base = OTHER; note = 2' O-methyl modified nucleoside
  modified_base 5: mod_base = OTHER; note = 2' fluoro-modified nucleoside
  modified_base 6: mod_base = OTHER; note = 2' O-methyl modified nucleoside
  modified_base 7: mod_base = OTHER; note = 2' fluoro-modified nucleoside
  modified_base 8: mod_base = OTHER; note = 2' fluoro-modified nucleoside
  modified_base 9: mod_base = OTHER; note = 2' fluoro-modified nucleoside
  modified_base 10: mod_base = OTHER; note = 2' O-methyl modified nucleoside
  modified_base 11: mod_base = OTHER; note = 2' fluoro-modified nucleoside
  modified_base 12: mod_base = OTHER; note = 2' O-methyl modified nucleoside
  modified_base 13: mod_base = OTHER; note = 2' fluoro-modified nucleoside
  modified_base 14: mod_base = OTHER; note = 2' O-methyl modified nucleoside
  modified_base 15: mod_base = OTHER; note = 2' fluoro-modified nucleoside
  modified_base 16: mod_base = OTHER; note = 2' O-methyl modified nucleoside
  modified_base 17: mod_base = OTHER; note = 2' fluoro-modified nucleoside
  modified_base 18: mod_base = OTHER; note = 2' O-methyl modified nucleoside
  modified_base 19: mod_base = OTHER; note = 2' fluoro-modified nucleoside
  modified_base 19..20: mod_base = OTHER; note = Phosphorothioate linkage
  modified_base 20: mod_base = OTHER; note = 2' O-methyl modified nucleoside
  modified_base 20..21: mod_base = OTHER; note = Phosphorothioate linkage
  modified_base 21: mod_base = OTHER; note = 2' O-methyl modified nucleoside
  source 1..21: mol_type = other RNA
ccctgacatagcagtagcatt

SEQ ID NO: 11197 - RNA, 21 nt, synthetic construct
  misc_feature 1..21: note = Description of Artificial Sequence: Synthetic oligonucleotide
  modified_base 1: mod_base = OTHER; note = 2' fluoro-modified nucleoside
  modified_base 1..2: mod_base = OTHER; note = Phosphorothioate linkage
  modified_base 2: mod_base = OTHER; note = 2' O-methyl modified nucleoside
  modified_base 2..3: mod_base = OTHER; note = Phosphorothioate linkage
  modified_base 3: mod_base = OTHER; note = 2' fluoro-modified nucleoside
  modified_base 4: mod_base = OTHER; note = 2' O-methyl modified nucleoside
  modified_base 5: mod_base = OTHER; note = 2' fluoro-modified nucleoside
  modified_base 6: mod_base = OTHER; note = 2' O-methyl modified nucleoside
  modified_base 7: mod_base = OTHER; note = 2' fluoro-modified nucleoside
  modified_base 8: mod_base = OTHER; note = 2' fluoro-modified nucleoside
  modified_base 9: mod_base = OTHER; note = 2' fluoro-modified nucleoside
  modified_base 10: mod_base = OTHER; note = 2' O-methyl modified nucleoside
  modified_base 11: mod_base = OTHER; note = 2' fluoro-modified nucleoside
  modified_base 12: mod_base = OTHER; note = 2' O-methyl modified nucleoside
  modified_base 13: mod_base = OTHER; note = 2' fluoro-modified nucleoside
  modified_base 14: mod_base = OTHER; note = 2' O-methyl modified nucleoside
  modified_base 15: mod_base = OTHER; note = 2' fluoro-modified nucleoside
  modified_base 16: mod_base = OTHER; note = 2' O-methyl modified nucleoside
  modified_base 17: mod_base = OTHER; note = 2' fluoro-modified nucleoside
  modified_base 18: mod_base = OTHER; note = 2' O-methyl modified nucleoside
  modified_base 19: mod_base = OTHER; note = 2' fluoro-modified nucleoside
  modified_base 19..20: mod_base = OTHER; note = Phosphorothioate linkage
  modified_base 20: mod_base = OTHER; note = 2' O-methyl modified nucleoside
  modified_base 20..21: mod_base = OTHER; note = Phosphorothioate linkage
  modified_base 21: mod_base = OTHER; note = 2' O-methyl modified nucleoside
  source 1..21: mol_type = other RNA
cctgacatagcagtagctatt

SEQ ID NO: 11198 - RNA, 21 nt, synthetic construct
  misc_feature 1..21: note = Description of Artificial Sequence: Synthetic oligonucleotide
  modified_base 1: mod_base = OTHER; note = 2' fluoro-modified nucleoside
  modified_base 1..2: mod_base = OTHER; note = Phosphorothioate linkage
  modified_base 2: mod_base = OTHER; note = 2' O-methyl modified nucleoside
  modified_base 2..3: mod_base = OTHER; note = Phosphorothioate linkage
  modified_base 3: mod_base = OTHER; note = 2' fluoro-modified nucleoside
  modified_base 4: mod_base = OTHER; note = 2' O-methyl modified nucleoside
  modified_base 5: mod_base = OTHER; note = 2' fluoro-modified nucleoside
  modified_base 6: mod_base = OTHER; note = 2' O-methyl modified nucleoside
  modified_base 7: mod_base = OTHER; note = 2' fluoro-modified nucleoside
  modified_base 8: mod_base = OTHER; note = 2' fluoro-modified nucleoside
  modified_base 9: mod_base = OTHER; note = 2' fluoro-modified nucleoside
  modified_base 10: mod_base = OTHER; note = 2' O-methyl modified nucleoside
  modified_base 11: mod_base = OTHER; note = 2' fluoro-modified nucleoside
  modified_base 12: mod_base = OTHER; note = 2' O-methyl modified nucleoside
  modified_base 13: mod_base = OTHER; note = 2' fluoro-modified nucleoside
  modified_base 14: mod_base = OTHER; note = 2' O-methyl modified nucleoside
  modified_base 15: mod_base = OTHER; note = 2' fluoro-modified nucleoside
  modified_base 16: mod_base = OTHER; note = 2' O-methyl modified nucleoside
  modified_base 17: mod_base = OTHER; note = 2' fluoro-modified nucleoside
  modified_base 18: mod_base = OTHER; note = 2' O-methyl modified nucleoside
  modified_base 19: mod_base = OTHER; note = 2' fluoro-modified nucleoside
  modified_base 19..20: mod_base = OTHER; note = Phosphorothioate linkage
  modified_base 20: mod_base = OTHER; note = 2' O-methyl modified nucleoside
  modified_base 20..21: mod_base = OTHER; note = Phosphorothioate linkage
  modified_base 21: mod_base = OTHER; note = 2' O-methyl modified nucleoside
  source 1..21: mol_type = other RNA
acatagcagtagcttgtcatt

SEQ ID NO: 11199 - RNA, 21 nt, synthetic construct
  misc_feature 1..21: note = Description of Artificial Sequence: Synthetic oligonucleotide
  modified_base 1: mod_base = OTHER; note = 2' fluoro-modified nucleoside
  modified_base 1..2: mod_base = OTHER; note = Phosphorothioate linkage
  modified_base 2: mod_base = OTHER; note = 2' O-methyl modified nucleoside
  modified_base 2..3: mod_base = OTHER; note = Phosphorothioate linkage
  modified_base 3: mod_base = OTHER; note = 2' fluoro-modified nucleoside
  modified_base 4: mod_base = OTHER; note = 2' O-methyl modified nucleoside
  modified_base 5: mod_base = OTHER; note = 2' fluoro-modified nucleoside
  modified_base 6: mod_base = OTHER; note = 2' O-methyl modified nucleoside
  modified_base 7: mod_base = OTHER; note = 2' fluoro-modified nucleoside
  modified_base 8: mod_base = OTHER; note = 2' fluoro-modified nucleoside
  modified_base 9: mod_base = OTHER; note = 2' fluoro-modified nucleoside
  modified_base 10: mod_base = OTHER; note = 2' O-methyl modified nucleoside
  modified_base 11: mod_base = OTHER; note = 2' fluoro-modified nucleoside
  modified_base 12: mod_base = OTHER; note = 2' O-methyl modified nucleoside
  modified_base 13: mod_base = OTHER; note = 2' fluoro-modified nucleoside
  modified_base 14: mod_base = OTHER; note = 2' O-methyl modified nucleoside
  modified_base 15: mod_base = OTHER; note = 2' fluoro-modified nucleoside
  modified_base 16: mod_base = OTHER; note = 2' O-methyl modified nucleoside
  modified_base 17: mod_base = OTHER; note = 2' fluoro-modified nucleoside
  modified_base 18: mod_base = OTHER; note = 2' O-methyl modified nucleoside
  modified_base 19: mod_base = OTHER; note = 2' fluoro-modified nucleoside
  modified_base 19..20: mod_base = OTHER; note = Phosphorothioate linkage
  modified_base 20: mod_base = OTHER; note = 2' O-methyl modified nucleoside
  modified_base 20..21: mod_base = OTHER; note = Phosphorothioate linkage
  modified_base 21: mod_base = OTHER; note = 2' O-methyl modified nucleoside
  source 1..21: mol_type = other RNA
catagcagtagcttgtctatt

SEQ ID NO: 11200 - RNA, 21 nt, synthetic construct
  misc_feature 1..21: note = Description of Artificial Sequence: Synthetic oligonucleotide
  modified_base 1: mod_base = OTHER; note = 2' fluoro-modified nucleoside
  modified_base 1..2: mod_base = OTHER; note = Phosphorothioate linkage
  modified_base 2: mod_base = OTHER; note = 2' O-methyl modified nucleoside
  modified_base 2..3: mod_base = OTHER; note = Phosphorothioate linkage
  modified_base 3: mod_base = OTHER; note = 2' fluoro-modified nucleoside
  modified_base 4: mod_base = OTHER; note = 2' O-methyl modified nucleoside
  modified_base 5: mod_base = OTHER; note = 2' fluoro-modified nucleoside
  modified_base 6: mod_base = OTHER; note = 2' O-methyl modified nucleoside
  modified_base 7: mod_base = OTHER; note = 2' fluoro-modified nucleoside
  modified_base 8: mod_base = OTHER; note = 2' fluoro-modified nucleoside
  modified_base 9: mod_base = OTHER; note = 2' fluoro-modified nucleoside
  modified_base 10: mod_base = OTHER; note = 2' O-methyl modified nucleoside
  modified_base 11: mod_base = OTHER; note = 2' fluoro-modified nucleoside
  modified_base 12: mod_base = OTHER; note = 2' O-methyl modified nucleoside
  modified_base 13: mod_base = OTHER; note = 2' fluoro-modified nucleoside
  modified_base 14: mod_base = OTHER; note = 2' O-methyl modified nucleoside
  modified_base 15: mod_base = OTHER; note = 2' fluoro-modified nucleoside
  modified_base 16: mod_base = OTHER; note = 2' O-methyl modified nucleoside
  modified_base 17: mod_base = OTHER; note = 2' fluoro-modified nucleoside
  modified_base 18: mod_base = OTHER; note = 2' O-methyl modified nucleoside
  modified_base 19: mod_base = OTHER; note = 2' fluoro-modified nucleoside
  modified_base 19..20: mod_base = OTHER; note = Phosphorothioate linkage
  modified_base 20: mod_base = OTHER; note = 2' O-methyl modified nucleoside
  modified_base 20..21: mod_base = OTHER; note = Phosphorothioate linkage
  modified_base 21: mod_base = OTHER; note = 2' O-methyl modified nucleoside
  source 1..21: mol_type = other RNA
agcagtagcttgtcttttatt

SEQ ID NO: 11201 - RNA, 21 nt, synthetic construct
  misc_feature 1..21: note = Description of Artificial Sequence: Synthetic oligonucleotide
  modified_base 1: mod_base = OTHER; note = 2' fluoro-modified nucleoside
  modified_base 1..2: mod_base = OTHER; note = Phosphorothioate linkage
  modified_base 2: mod_base = OTHER; note = 2' O-methyl modified nucleoside
  modified_base 2..3: mod_base = OTHER; note = Phosphorothioate linkage
  modified_base 3: mod_base = OTHER; note = 2' fluoro-modified nucleoside
  modified_base 4: mod_base = OTHER; note = 2' O-methyl modified nucleoside
  modified_base 5: mod_base = OTHER; note = 2' fluoro-modified nucleoside
  modified_base 6: mod_base = OTHER; note = 2' O-methyl modified nucleoside
  modified_base 7: mod_base = OTHER; note = 2' fluoro-modified nucleoside
  modified_base 8: mod_base = OTHER; note = 2' fluoro-modified nucleoside
  modified_base 9: mod_base = OTHER; note = 2' fluoro-modified nucleoside
  modified_base 10: mod_base = OTHER; note = 2' O-methyl modified nucleoside
  modified_base 11: mod_base = OTHER; note = 2' fluoro-modified nucleoside
  modified_base 12: mod_base = OTHER; note = 2' O-methyl modified nucleoside
  modified_base 13: mod_base = OTHER; note = 2' fluoro-modified nucleoside
  modified_base 14: mod_base = OTHER; note = 2' O-methyl modified nucleoside
  modified_base 15: mod_base = OTHER; note = 2' fluoro-modified nucleoside
  modified_base 16: mod_base = OTHER; note = 2' O-methyl modified nucleoside
  modified_base 17: mod_base = OTHER; note = 2' fluoro-modified nucleoside
  modified_base 18: mod_base = OTHER; note = 2' O-methyl modified nucleoside
  modified_base 19: mod_base = OTHER; note = 2' fluoro-modified nucleoside
  modified_base 19..20: mod_base = OTHER; note = Phosphorothioate linkage
  modified_base 20: mod_base = OTHER; note = 2' O-methyl modified nucleoside
  modified_base 20..21: mod_base = OTHER; note = Phosphorothioate linkage
  modified_base 21: mod_base = OTHER; note = 2' O-methyl modified nucleoside
  source 1..21: mol_type = other RNA
aaacacaaatccctttgcatt

SEQ ID NO: 11202 - RNA, 21 nt, synthetic construct
  misc_feature 1..21: note = Description of Artificial Sequence: Synthetic oligonucleotide
  modified_base 1: mod_base = OTHER; note = 2' fluoro-modified nucleoside
  modified_base 1..2: mod_base = OTHER; note = Phosphorothioate linkage
  modified_base 2: mod_base = OTHER; note = 2' O-methyl modified nucleoside
  modified_base 2..3: mod_base = OTHER; note = Phosphorothioate linkage
  modified_base 3: mod_base = OTHER; note = 2' fluoro-modified nucleoside
  modified_base 4: mod_base = OTHER; note = 2' O-methyl modified nucleoside
  modified_base 5: mod_base = OTHER; note = 2' fluoro-modified nucleoside
  modified_base 6: mod_base = OTHER; note = 2' O-methyl modified nucleoside
  modified_base 7: mod_base = OTHER; note = 2' fluoro-modified nucleoside
  modified_base 8: mod_base = OTHER; note = 2' fluoro-modified nucleoside
  modified_base 9: mod_base = OTHER; note = 2' fluoro-modified nucleoside
  modified_base 10: mod_base = OTHER; note = 2' O-methyl modified nucleoside
  modified_base 11: mod_base = OTHER; note = 2' fluoro-modified nucleoside
  modified_base 12: mod_base = OTHER; note = 2' O-methyl modified nucleoside
  modified_base 13: mod_base = OTHER; note = 2' fluoro-modified nucleoside
  modified_base 14: mod_base = OTHER; note = 2' O-methyl modified nucleoside
  modified_base 15: mod_base = OTHER; note = 2' fluoro-modified nucleoside
  modified_base 16: mod_base = OTHER; note = 2' O-methyl modified nucleoside
  modified_base 17: mod_base = OTHER; note = 2' fluoro-modified nucleoside
  modified_base 18: mod_base = OTHER; note = 2' O-methyl modified nucleoside
  modified_base 19: mod_base = OTHER; note = 2' fluoro-modified nucleoside
  modified_base 19..20: mod_base = OTHER; note = Phosphorothioate linkage
  modified_base 20: mod_base = OTHER; note = 2' O-methyl modified nucleoside
  modified_base 20..21: mod_base = OTHER; note = Phosphorothioate linkage
  modified_base 21: mod_base = OTHER; note = 2' O-methyl modified nucleoside
  source 1..21: mol_type = other RNA
taggcctttgagtgttagatt

SEQ ID NO: 11203 - RNA, 21 nt, synthetic construct
  misc_feature 1..21: note = Description of Artificial Sequence: Synthetic oligonucleotide
  modified_base 1: mod_base = OTHER; note = 2' fluoro-modified nucleoside
  modified_base 1..2: mod_base = OTHER; note = Phosphorothioate linkage
  modified_base 2: mod_base = OTHER; note = 2' O-methyl modified nucleoside
  modified_base 2..3: mod_base = OTHER; note = Phosphorothioate linkage
  modified_base 3: mod_base = OTHER; note = 2' fluoro-modified nucleoside
  modified_base 4: mod_base = OTHER; note = 2' O-methyl modified nucleoside
  modified_base 5: mod_base = OTHER; note = 2' fluoro-modified nucleoside
  modified_base 6: mod_base = OTHER; note = 2' O-methyl modified nucleoside
  modified_base 7: mod_base = OTHER; note = 2' fluoro-modified nucleoside
  modified_base 8: mod_base = OTHER; note = 2' fluoro-modified nucleoside
  modified_base 9: mod_base = OTHER; note = 2' fluoro-modified nucleoside
  modified_base 10: mod_base = OTHER; note = 2' O-methyl modified nucleoside
  modified_base 11: mod_base = OTHER; note = 2' fluoro-modified nucleoside
  modified_base 12: mod_base = OTHER; note = 2' O-methyl modified nucleoside
  modified_base 13: mod_base = OTHER; note = 2' fluoro-modified nucleoside
  modified_base 14: mod_base = OTHER; note = 2' O-methyl modified nucleoside
  modified_base 15: mod_base = OTHER; note = 2' fluoro-modified nucleoside
  modified_base 16: mod_base = OTHER; note = 2' O-methyl modified nucleoside
  modified_base 17: mod_base = OTHER; note = 2' fluoro-modified nucleoside
  modified_base 18: mod_base = OTHER; note = 2' O-methyl modified nucleoside
  modified_base 19: mod_base = OTHER; note = 2' fluoro-modified nucleoside
  modified_base 19..20: mod_base = OTHER; note = Phosphorothioate linkage
  modified_base 20: mod_base = OTHER; note = 2' O-methyl modified nucleoside
  modified_base 20..21: mod_base = OTHER; note = Phosphorothioate linkage
  modified_base 21: mod_base = OTHER; note = 2' O-methyl modified nucleoside
  source 1..21: mol_type = other RNA
aggcctttgagtgttagaatt

SEQ ID NO: 11204 - RNA, 21 nt, synthetic construct
  misc_feature 1..21: note = Description of Artificial Sequence: Synthetic oligonucleotide
  modified_base 1: mod_base = OTHER; note = 2' fluoro-modified nucleoside
  modified_base 1..2: mod_base = OTHER; note = Phosphorothioate linkage
  modified_base 2: mod_base = OTHER; note = 2' O-methyl modified nucleoside
  modified_base 2..3: mod_base = OTHER; note = Phosphorothioate linkage
  modified_base 3: mod_base = OTHER; note = 2' fluoro-modified nucleoside
  modified_base 4: mod_base = OTHER; note = 2' O-methyl modified nucleoside
  modified_base 5: mod_base = OTHER; note = 2' fluoro-modified nucleoside
  modified_base 6: mod_base = OTHER; note = 2' O-methyl modified nucleoside
  modified_base 7: mod_base = OTHER; note = 2' fluoro-modified nucleoside
  modified_base 8: mod_base = OTHER; note = 2' fluoro-modified nucleoside
  modified_base 9: mod_base = OTHER; note = 2' fluoro-modified nucleoside
  modified_base 10: mod_base = OTHER; note = 2' O-methyl modified nucleoside
  modified_base 11: mod_base = OTHER; note = 2' fluoro-modified nucleoside
  modified_base 12: mod_base = OTHER; note = 2' O-methyl modified nucleoside
  modified_base 13: mod_base = OTHER; note = 2' fluoro-modified nucleoside
  modified_base 14: mod_base = OTHER; note = 2' O-methyl modified nucleoside
  modified_base 15: mod_base = OTHER; note = 2' fluoro-modified nucleoside
  modified_base 16: mod_base = OTHER; note = 2' O-methyl modified nucleoside
  modified_base 17: mod_base = OTHER; note = 2' fluoro-modified nucleoside
  modified_base 18: mod_base = OTHER; note = 2' O-methyl modified nucleoside
  modified_base 19: mod_base = OTHER; note = 2' fluoro-modified nucleoside
  modified_base 19..20: mod_base = OTHER; note = Phosphorothioate linkage
  modified_base 20: mod_base = OTHER; note = 2' O-methyl modified nucleoside
  modified_base 20..21: mod_base = OTHER; note = Phosphorothioate linkage
  modified_base 21: mod_base = OTHER; note = 2' O-methyl modified nucleoside
  source 1..21: mol_type = other RNA
aaattatcttgagtctacatt

SEQ ID NO: 11205 - RNA, 21 nt, synthetic construct
  misc_feature 1..21: note = Description of Artificial Sequence: Synthetic oligonucleotide
  modified_base 1: mod_base = OTHER; note = 2' fluoro-modified nucleoside
  modified_base 1..2: mod_base = OTHER; note = Phosphorothioate linkage
  modified_base 2: mod_base = OTHER; note = 2' O-methyl modified nucleoside
  modified_base 2..3: mod_base = OTHER; note = Phosphorothioate linkage
  modified_base 3: mod_base = OTHER; note = 2' fluoro-modified nucleoside
  modified_base 4: mod_base = OTHER; note = 2' O-methyl modified nucleoside
  modified_base 5: mod_base = OTHER; note = 2' fluoro-modified nucleoside
  modified_base 6: mod_base = OTHER; note = 2' O-methyl modified nucleoside
  modified_base 7: mod_base = OTHER; note = 2' fluoro-modified nucleoside
  modified_base 8: mod_base = OTHER; note = 2' fluoro-modified nucleoside
  modified_base 9: mod_base = OTHER; note = 2' fluoro-modified nucleoside
  modified_base 10: mod_base = OTHER; note = 2' O-methyl modified nucleoside
  modified_base 11: mod_base = OTHER; note = 2' fluoro-modified nucleoside
  modified_base 12: mod_base = OTHER; note = 2' O-methyl modified nucleoside
  modified_base 13: mod_base = OTHER; note = 2' fluoro-modified nucleoside
  modified_base 14: mod_base = OTHER; note = 2' O-methyl modified nucleoside
  modified_base 15: mod_base = OTHER; note = 2' fluoro-modified nucleoside
  modified_base 16: mod_base = OTHER; note = 2' O-methyl modified nucleoside
  modified_base 17: mod_base = OTHER; note = 2' fluoro-modified nucleoside
  modified_base 18: mod_base = OTHER; note = 2' O-methyl modified nucleoside
  modified_base 19: mod_base = OTHER; note = 2' fluoro-modified nucleoside
  modified_base 19..20: mod_base = OTHER; note = Phosphorothioate linkage
  modified_base 20: mod_base = OTHER; note = 2' O-methyl modified nucleoside
  modified_base 20..21: mod_base = OTHER; note = Phosphorothioate linkage
  modified_base 21: mod_base = OTHER; note = 2' O-methyl modified nucleoside
  source 1..21: mol_type = other RNA
aattatcttgagtctacaatt

SEQ ID NO: 11206 - RNA, 21 nt, synthetic construct
  misc_feature 1..21: note = Description of Artificial Sequence: Synthetic oligonucleotide
  modified_base 1: mod_base = OTHER; note = 2' fluoro-modified nucleoside
  modified_base 1..2: mod_base = OTHER; note = Phosphorothioate linkage
  modified_base 2: mod_base = OTHER; note = 2' O-methyl modified nucleoside
  modified_base 2..3: mod_base = OTHER; note = Phosphorothioate linkage
  modified_base 3: mod_base = OTHER; note = 2' fluoro-modified nucleoside
  modified_base 4: mod_base = OTHER; note = 2' O-methyl modified nucleoside
  modified_base 5: mod_base = OTHER; note = 2' fluoro-modified nucleoside
  modified_base 6: mod_base = OTHER; note = 2' O-methyl modified nucleoside
  modified_base 7: mod_base = OTHER; note = 2' fluoro-modified nucleoside
  modified_base 8: mod_base = OTHER; note = 2' fluoro-modified nucleoside
  modified_base 9: mod_base = OTHER; note = 2' fluoro-modified nucleoside
  modified_base 10: mod_base = OTHER; note = 2' O-methyl modified nucleoside
  modified_base 11: mod_base = OTHER; note = 2' fluoro-modified nucleoside
  modified_base 12: mod_base = OTHER; note = 2' O-methyl modified nucleoside
  modified_base 13: mod_base = OTHER; note = 2' fluoro-modified nucleoside
  modified_base 14: mod_base = OTHER; note = 2' O-methyl modified nucleoside
  modified_base 15: mod_base = OTHER; note = 2' fluoro-modified nucleoside
  modified_base 16: mod_base = OTHER; note = 2' O-methyl modified nucleoside
  modified_base 17: mod_base = OTHER; note = 2' fluoro-modified nucleoside
  modified_base 18: mod_base = OTHER; note = 2' O-methyl modified nucleoside
  modified_base 19: mod_base = OTHER; note = 2' fluoro-modified nucleoside
  modified_base 19..20: mod_base = OTHER; note = Phosphorothioate linkage
  modified_base 20: mod_base = OTHER; note = 2' O-methyl modified nucleoside
  modified_base 20..21: mod_base = OTHER; note = Phosphorothioate linkage
  modified_base 21: mod_base = OTHER; note = 2' O-methyl modified nucleoside
  source 1..21: mol_type = other RNA
aaacacaaaaattgttcgatt

SEQ ID NO: 11207 - RNA, 21 nt, synthetic construct
  misc_feature 1..21: note = Description of Artificial Sequence: Synthetic oligonucleotide
  modified_base 1: mod_base = OTHER; note = 2' fluoro-modified nucleoside
  modified_base 1..2: mod_base = OTHER; note = Phosphorothioate linkage
  modified_base 2: mod_base = OTHER; note = 2' O-methyl modified nucleoside
  modified_base 2..3: mod_base = OTHER; note = Phosphorothioate linkage
  modified_base 3: mod_base = OTHER; note = 2' fluoro-modified nucleoside
  modified_base 4: mod_base = OTHER; note = 2' O-methyl modified nucleoside
  modified_base 5: mod_base = OTHER; note = 2' fluoro-modified nucleoside
  modified_base 6: mod_base = OTHER; note = 2' O-methyl modified nucleoside
  modified_base 7: mod_base = OTHER; note = 2' fluoro-modified nucleoside
  modified_base 8: mod_base = OTHER; note = 2' fluoro-modified nucleoside
  modified_base 9: mod_base = OTHER; note = 2' fluoro-modified nucleoside
  modified_base 10: mod_base = OTHER; note = 2' O-methyl modified nucleoside
  modified_base 11: mod_base = OTHER; note = 2' fluoro-modified nucleoside
  modified_base 12: mod_base = OTHER; note = 2' O-methyl modified nucleoside
  modified_base 13: mod_base = OTHER; note = 2' fluoro-modified nucleoside
  modified_base 14: mod_base = OTHER; note = 2' O-methyl modified nucleoside
  modified_base 15: mod_base = OTHER; note = 2' fluoro-modified nucleoside
  modified_base 16: mod_base = OTHER; note = 2' O-methyl modified nucleoside
  modified_base 17: mod_base = OTHER; note = 2' fluoro-modified nucleoside
  modified_base 18: mod_base = OTHER; note = 2' O-methyl modified nucleoside
  modified_base 19: mod_base = OTHER; note = 2' fluoro-modified nucleoside
  modified_base 19..20: mod_base = OTHER; note = Phosphorothioate linkage
  modified_base 20: mod_base = OTHER; note = 2' O-methyl modified nucleoside
  modified_base 20..21: mod_base = OTHER; note = Phosphorothioate linkage
  modified_base 21: mod_base = OTHER; note = 2' O-methyl modified nucleoside
  source 1..21: mol_type = other RNA
acacaaaaattgttcggcatt

SEQ ID NO: 11208 - RNA, 21 nt, synthetic construct
  misc_feature 1..21: note = Description of Artificial Sequence: Synthetic oligonucleotide
  modified_base 1: mod_base = OTHER; note = 2' fluoro-modified nucleoside
  modified_base 1..2: mod_base = OTHER; note = Phosphorothioate linkage
  modified_base 2: mod_base = OTHER; note = 2' O-methyl modified nucleoside
  modified_base 2..3: mod_base = OTHER; note = Phosphorothioate linkage
  modified_base 3: mod_base = OTHER; note = 2' fluoro-modified nucleoside
  modified_base 4: mod_base = OTHER; note = 2' O-methyl modified nucleoside
  modified_base 5: mod_base = OTHER; note = 2' fluoro-modified nucleoside
  modified_base 6: mod_base = OTHER; note = 2' O-methyl modified nucleoside
  modified_base 7: mod_base = OTHER; note = 2' fluoro-modified nucleoside
  modified_base 8: mod_base = OTHER; note = 2' fluoro-modified nucleoside
  modified_base 9: mod_base = OTHER; note = 2' fluoro-modified nucleoside
  modified_base 10: mod_base = OTHER; note = 2' O-methyl modified nucleoside
  modified_base 11: mod_base = OTHER; note = 2' fluoro-modified nucleoside
  modified_base 12: mod_base = OTHER; note = 2' O-methyl modified nucleoside
  modified_base 13: mod_base = OTHER; note = 2' fluoro-modified nucleoside
  modified_base 14: mod_base = OTHER; note = 2' O-methyl modified nucleoside
  modified_base 15: mod_base = OTHER; note = 2' fluoro-modified nucleoside
  modified_base 16: mod_base = OTHER; note = 2' O-methyl modified nucleoside
  modified_base 17: mod_base = OTHER; note = 2' fluoro-modified nucleoside
  modified_base 18: mod_base = OTHER; note = 2' O-methyl modified nucleoside
  modified_base 19: mod_base = OTHER; note = 2' fluoro-modified nucleoside
  modified_base 19..20: mod_base = OTHER; note = Phosphorothioate linkage
  modified_base 20: mod_base = OTHER; note = 2' O-methyl modified nucleoside
  modified_base 20..21: mod_base = OTHER; note = Phosphorothioate linkage
  modified_base 21: mod_base = OTHER; note = 2' O-methyl modified nucleoside
  source 1..21: mol_type = other RNA
cacaaaaattgttcggctatt

SEQ ID NO: 11209 - RNA, 21 nt, synthetic construct
  misc_feature 1..21: note = Description of Artificial Sequence: Synthetic oligonucleotide
  modified_base 1: mod_base = OTHER; note = 2' fluoro-modified nucleoside
  modified_base 1..2: mod_base = OTHER; note = Phosphorothioate linkage
  modified_base 2: mod_base = OTHER; note = 2' O-methyl modified nucleoside
  modified_base 2..3: mod_base = OTHER; note = Phosphorothioate linkage
  modified_base 3: mod_base = OTHER; note = 2' fluoro-modified nucleoside
  modified_base 4: mod_base = OTHER; note = 2' O-methyl modified nucleoside
  modified_base 5: mod_base = OTHER; note = 2' fluoro-modified nucleoside
  modified_base 6: mod_base = OTHER; note = 2' O-methyl modified nucleoside
  modified_base 7: mod_base = OTHER; note = 2' fluoro-modified nucleoside
  modified_base 8: mod_base = OTHER; note = 2' fluoro-modified nucleoside
  modified_base 9: mod_base = OTHER; note = 2' fluoro-modified nucleoside
  modified_base 10: mod_base = OTHER; note = 2' O-methyl modified nucleoside
  modified_base 11: mod_base = OTHER; note = 2' fluoro-modified nucleoside
  modified_base 12: mod_base = OTHER; note = 2' O-methyl modified nucleoside
  modified_base 13: mod_base = OTHER; note = 2' fluoro-modified nucleoside
  modified_base 14: mod_base = OTHER; note = 2' O-methyl modified nucleoside
  modified_base 15: mod_base = OTHER; note = 2' fluoro-modified nucleoside
  modified_base 16: mod_base = OTHER; note = 2' O-methyl modified nucleoside
  modified_base 17: mod_base = OTHER; note = 2' fluoro-modified nucleoside
  modified_base 18: mod_base = OTHER; note = 2' O-methyl modified nucleoside
  modified_base 19: mod_base = OTHER; note = 2' fluoro-modified nucleoside
  modified_base 19..20: mod_base = OTHER; note = Phosphorothioate linkage
  modified_base 20: mod_base = OTHER; note = 2' O-methyl modified nucleoside
  modified_base 20..21: mod_base = OTHER; note = Phosphorothioate linkage
  modified_base 21: mod_base = OTHER; note = 2' O-methyl modified nucleoside
  source 1..21: mol_type = other RNA
acaaaaattgttcggctgatt

SEQ ID NO: 11210 - RNA, 21 nt, synthetic construct
  misc_feature 1..21: note = Description of Artificial Sequence: Synthetic oligonucleotide
  modified_base 1: mod_base = OTHER; note = 2' fluoro-modified nucleoside
  modified_base 1..2: mod_base = OTHER; note = Phosphorothioate linkage
  modified_base 2: mod_base = OTHER; note = 2' O-methyl modified nucleoside
  modified_base 2..3: mod_base = OTHER; note = Phosphorothioate linkage
  modified_base 3: mod_base = OTHER; note = 2' fluoro-modified nucleoside
  modified_base 4: mod_base = OTHER; note = 2' O-methyl modified nucleoside
  modified_base 5: mod_base = OTHER; note = 2' fluoro-modified nucleoside
  modified_base 6: mod_base = OTHER; note = 2' O-methyl modified nucleoside
  modified_base 7: mod_base = OTHER; note = 2' fluoro-modified nucleoside
  modified_base 8: mod_base = OTHER; note = 2' fluoro-modified nucleoside
  modified_base 9: mod_base = OTHER; note = 2' fluoro-modified nucleoside
  modified_base 10: mod_base = OTHER; note = 2' O-methyl modified nucleoside
  modified_base 11: mod_base = OTHER; note = 2' fluoro-modified nucleoside
  modified_base 12: mod_base = OTHER; note = 2' O-methyl modified nucleoside
  modified_base 13: mod_base = OTHER; note = 2' fluoro-modified nucleoside
  modified_base 14: mod_base = OTHER; note = 2' O-methyl modified nucleoside
  modified_base 15: mod_base = OTHER; note = 2' fluoro-modified nucleoside
  modified_base 16: mod_base = OTHER; note = 2' O-methyl modified nucleoside
  modified_base 17: mod_base = OTHER; note = 2' fluoro-modified nucleoside
  modified_base 18: mod_base = OTHER; note = 2' O-methyl modified nucleoside
  modified_base 19: mod_base = OTHER; note = 2' fluoro-modified nucleoside
  modified_base 19..20: mod_base = OTHER; note = Phosphorothioate linkage
  modified_base 20: mod_base = OTHER; note = 2' O-methyl modified nucleoside
  modified_base 20..21: mod_base = OTHER; note = Phosphorothioate linkage
  modified_base 21: mod_base = OTHER; note = 2' O-methyl modified nucleoside
  source 1..21: mol_type = other RNA
cggcacaaaactgccttaatt

SEQ ID NO: 11211 - RNA, 21 nt, synthetic construct
  misc_feature 1..21: note = Description of Artificial Sequence: Synthetic oligonucleotide
  modified_base 1: mod_base = OTHER; note = 2' fluoro-modified nucleoside
  modified_base 1..2: mod_base = OTHER; note = Phosphorothioate linkage
  modified_base 2: mod_base = OTHER; note = 2' O-methyl modified nucleoside
  modified_base 2..3: mod_base = OTHER; note = Phosphorothioate linkage
  modified_base 3: mod_base = OTHER; note = 2' fluoro-modified nucleoside
  modified_base 4: mod_base = OTHER; note = 2' O-methyl modified nucleoside
  modified_base 5: mod_base = OTHER; note = 2' fluoro-modified nucleoside
  modified_base 6: mod_base = OTHER; note = 2' O-methyl modified nucleoside
  modified_base 7: mod_base = OTHER; note = 2' fluoro-modified nucleoside
  modified_base 8: mod_base = OTHER; note = 2' fluoro-modified nucleoside
  modified_base 9: mod_base = OTHER; note = 2' fluoro-modified nucleoside
  modified_base 10: mod_base = OTHER; note = 2' O-methyl modified nucleoside
  modified_base 11: mod_base = OTHER; note = 2' fluoro-modified nucleoside
  modified_base 12: mod_base = OTHER; note = 2' O-methyl modified nucleoside
  modified_base 13: mod_base = OTHER; note = 2' fluoro-modified nucleoside
  modified_base 14: mod_base = OTHER; note = 2' O-methyl modified nucleoside
  modified_base 15: mod_base = OTHER; note = 2' fluoro-modified nucleoside
  modified_base 16: mod_base = OTHER; note = 2' O-methyl modified nucleoside
  modified_base 17: mod_base = OTHER; note = 2' fluoro-modified nucleoside
  modified_base 18: mod_base = OTHER; note = 2' O-methyl modified nucleoside
  modified_base 19: mod_base = OTHER; note = 2' fluoro-modified nucleoside
  modified_base 19..20: mod_base = OTHER; note = Phosphorothioate linkage
  modified_base 20: mod_base = OTHER; note = 2' O-methyl modified nucleoside
  modified_base 20..21: mod_base = OTHER; note = Phosphorothioate linkage
  modified_base 21: mod_base = OTHER; note = 2' O-methyl modified nucleoside
  source 1..21: mol_type = other RNA
gaaggtagatggtgttatatt

SEQ ID NO: 11212 - RNA, 21 nt, synthetic construct
  misc_feature 1..21: note = Description of Artificial Sequence: Synthetic oligonucleotide
  modified_base 1: mod_base = OTHER; note = 2' fluoro-modified nucleoside
  modified_base 1..2: mod_base = OTHER; note = Phosphorothioate linkage
  modified_base 2: mod_base = OTHER; note = 2' O-methyl modified nucleoside
  modified_base 2..3: mod_base = OTHER; note = Phosphorothioate linkage
  modified_base 3: mod_base = OTHER; note = 2' fluoro-modified nucleoside
  modified_base 4: mod_base = OTHER; note = 2' O-methyl modified nucleoside
  modified_base 5: mod_base = OTHER; note = 2' fluoro-modified nucleoside
  modified_base 6: mod_base = OTHER; note = 2' O-methyl modified nucleoside
  modified_base 7: mod_base = OTHER; note = 2' fluoro-modified nucleoside
  modified_base 8: mod_base = OTHER; note = 2' fluoro-modified nucleoside
  modified_base 9: mod_base = OTHER; note = 2' fluoro-modified nucleoside
  modified_base 10: mod_base = OTHER; note = 2' O-methyl modified nucleoside
  modified_base 11: mod_base = OTHER; note = 2' fluoro-modified nucleoside
  modified_base 12: mod_base = OTHER; note = 2' O-methyl modified nucleoside
  modified_base 13: mod_base = OTHER; note = 2' fluoro-modified nucleoside
  modified_base 14: mod_base = OTHER; note = 2' O-methyl modified nucleoside
  modified_base 15: mod_base = OTHER; note = 2' fluoro-modified nucleoside
  modified_base 16: mod_base = OTHER; note = 2' O-methyl modified nucleoside
  modified_base 17: mod_base = OTHER; note = 2' fluoro-modified nucleoside
  modified_base 18: mod_base = OTHER; note = 2' O-methyl modified nucleoside
  modified_base 19: mod_base = OTHER; note = 2' fluoro-modified nucleoside
  modified_base 19..20: mod_base = OTHER; note = Phosphorothioate linkage
  modified_base 20: mod_base = OTHER; note = 2' O-methyl modified nucleoside
  modified_base 20..21: mod_base = OTHER; note = Phosphorothioate linkage
  modified_base 21: mod_base = OTHER; note = 2' O-methyl modified nucleoside
  source 1..21: mol_type = other RNA
gtagatggtgttatagttatt

SEQ ID NO: 11213 - RNA, 21 nt, synthetic construct
  misc_feature 1..21: note = Description of Artificial Sequence: Synthetic oligonucleotide
  modified_base 1: mod_base = OTHER; note = 2' O-methyl modified nucleoside
  modified_base 1..2: mod_base = OTHER; note = Phosphorothioate linkage
  modified_base 2: mod_base = OTHER; note = 2' fluoro-modified nucleoside
  modified_base 2..3: mod_base = OTHER; note = Phosphorothioate linkage
  modified_base 3: mod_base = OTHER; note = 2' O-methyl modified nucleoside
  modified_base 4: mod_base = OTHER; note = 2' fluoro-modified nucleoside
  modified_base 5: mod_base = OTHER; note = 2' O-methyl modified nucleoside
  modified_base 6: mod_base = OTHER; note = 2' fluoro-modified nucleoside
  modified_base 7: mod_base = OTHER; note = 2' O-methyl modified nucleoside
  modified_base 8: mod_base = OTHER; note = 2' fluoro-modified nucleoside
  modified_base 9: mod_base = OTHER; note = 2' O-methyl modified nucleoside
  modified_base 10: mod_base = OTHER; note = 2' fluoro-modified nucleoside
  modified_base 11: mod_base = OTHER; note = 2' O-methyl modified nucleoside
  modified_base 12: mod_base = OTHER; note = 2' O-methyl modified nucleoside
  modified_base 13: mod_base = OTHER; note = 2' O-methyl modified nucleoside
  modified_base 14: mod_base = OTHER; note = 2' fluoro-modified nucleoside
  modified_base 15: mod_base = OTHER; note = 2' O-methyl modified nucleoside
  modified_base 16: mod_base = OTHER; note = 2' fluoro-modified nucleoside
  modified_base 17: mod_base = OTHER; note = 2' O-methyl modified nucleoside
  modified_base 18: mod_base = OTHER; note = 2' fluoro-modified nucleoside
  modified_base 19: mod_base = OTHER; note = 2' O-methyl modified nucleoside
  modified_base 19..20: mod_base = OTHER; note = Phosphorothioate linkage
  modified_base 20: mod_base = OTHER; note = 2' O-methyl modified nucleoside
  modified_base 20..21: mod_base = OTHER; note = Phosphorothioate linkage
  modified_base 21: mod_base = OTHER; note = 2' O-methyl modified nucleoside
  source 1..21: mol_type = other RNA
tgcctatagctttccttcctt

SEQ ID NO: 11214 - RNA, 21 nt, synthetic construct
  misc_feature 1..21: note = Description of Artificial Sequence: Synthetic oligonucleotide
  modified_base 1: mod_base = OTHER; note = 2' O-methyl modified nucleoside
  modified_base 1..2: mod_base = OTHER; note = Phosphorothioate linkage
  modified_base 2: mod_base = OTHER; note = 2' fluoro-modified nucleoside
  modified_base 2..3: mod_base = OTHER; note = Phosphorothioate linkage
  modified_base 3: mod_base = OTHER; note = 2' O-methyl modified nucleoside
  modified_base 4: mod_base = OTHER; note = 2' fluoro-modified nucleoside
  modified_base 5: mod_base = OTHER; note = 2' O-methyl modified nucleoside
  modified_base 6: mod_base = OTHER; note = 2' fluoro-modified nucleoside
  modified_base 7: mod_base = OTHER; note = 2' O-methyl modified nucleoside
  modified_base 8: mod_base = OTHER; note = 2' fluoro-modified nucleoside
  modified_base 9: mod_base = OTHER; note = 2' O-methyl modified nucleoside
  modified_base 10: mod_base = OTHER; note = 2' fluoro-modified nucleoside
  modified_base 11: mod_base = OTHER; note = 2' O-methyl modified nucleoside
  modified_base 12: mod_base = OTHER; note = 2' O-methyl modified nucleoside
  modified_base 13: mod_base = OTHER; note = 2' O-methyl modified nucleoside
  modified_base 14: mod_base = OTHER; note = 2' fluoro-modified nucleoside
  modified_base 15: mod_base = OTHER; note = 2' O-methyl modified nucleoside
  modified_base 16: mod_base = OTHER; note = 2' fluoro-modified nucleoside
  modified_base 17: mod_base = OTHER; note = 2' O-methyl modified nucleoside
  modified_base 18: mod_base = OTHER; note = 2' fluoro-modified nucleoside
  modified_base 19: mod_base = OTHER; note = 2' O-methyl modified nucleoside
  modified_base 19..20: mod_base = OTHER; note = Phosphorothioate linkage
  modified_base 20: mod_base = OTHER; note = 2' O-methyl modified nucleoside
  modified_base 20..21: mod_base = OTHER; note = Phosphorothioate linkage
  modified_base 21: mod_base = OTHER; note = 2' O-methyl modified nucleoside
  source 1..21: mol_type = other RNA
tcttgagtctctgacagggtt

SEQ ID NO: 11215 - RNA, 21 nt, synthetic construct
  misc_feature 1..21: note = Description of Artificial Sequence: Synthetic oligonucleotide
  modified_base 1: mod_base = OTHER; note = 2' O-methyl modified nucleoside
  modified_base 1..2: mod_base = OTHER; note = Phosphorothioate linkage
  modified_base 2: mod_base = OTHER; note = 2' fluoro-modified nucleoside
  modified_base 2..3: mod_base = OTHER; note = Phosphorothioate linkage
  modified_base 3: mod_base = OTHER; note = 2' O-methyl modified nucleoside
  modified_base 4: mod_base = OTHER; note = 2' fluoro-modified nucleoside
  modified_base 5: mod_base = OTHER; note = 2' O-methyl modified nucleoside
  modified_base 6: mod_base = OTHER; note = 2' fluoro-modified nucleoside
  modified_base 7: mod_base = OTHER; note = 2' O-methyl modified nucleoside
  modified_base 8: mod_base = OTHER; note = 2' fluoro-modified nucleoside
  modified_base 9: mod_base = OTHER; note = 2' O-methyl modified nucleoside
  modified_base 10: mod_base = OTHER; note = 2' fluoro-modified nucleoside
  modified_base 11: mod_base = OTHER; note = 2' O-methyl modified nucleoside
  modified_base 12: mod_base = OTHER; note = 2' O-methyl modified nucleoside
  modified_base 13: mod_base = OTHER; note = 2' O-methyl modified nucleoside
  modified_base 14: mod_base = OTHER; note = 2' fluoro-modified nucleoside
  modified_base 15: mod_base = OTHER; note = 2' O-methyl modified nucleoside
  modified_base 16: mod_base = OTHER; note = 2' fluoro-modified nucleoside
  modified_base 17: mod_base = OTHER; note = 2' O-methyl modified nucleoside
  modified_base 18: mod_base = OTHER; note = 2' fluoro-modified nucleoside
  modified_base 19: mod_base = OTHER; note = 2' O-methyl modified nucleoside
  modified_base 19..20: mod_base = OTHER; note = Phosphorothioate linkage
  modified_base 20: mod_base = OTHER; note = 2' O-methyl modified nucleoside
  modified_base 20..21: mod_base = OTHER; note = Phosphorothioate linkage
  modified_base 21: mod_base = OTHER; note = 2' O-methyl modified nucleoside
  source 1..21: mol_type = other RNA
tcgccactttgttgttttctt

SEQ ID NO: 11216 - RNA, 21 nt, synthetic construct
  misc_feature 1..21: note = Description of Artificial Sequence: Synthetic oligonucleotide
  modified_base 1: mod_base = OTHER; note = 2' O-methyl modified nucleoside
  modified_base 1..2: mod_base = OTHER; note = Phosphorothioate linkage
  modified_base 2: mod_base = OTHER; note = 2' fluoro-modified nucleoside
  modified_base 2..3: mod_base = OTHER; note = Phosphorothioate linkage
  modified_base 3: mod_base = OTHER; note = 2' O-methyl modified nucleoside
  modified_base 4: mod_base = OTHER; note = 2' fluoro-modified nucleoside
  modified_base 5: mod_base = OTHER; note = 2' O-methyl modified nucleoside
  modified_base 6: mod_base = OTHER; note = 2' fluoro-modified nucleoside
  modified_base 7: mod_base = OTHER; note = 2' O-methyl modified nucleoside
  modified_base 8: mod_base = OTHER; note = 2' fluoro-modified nucleoside
  modified_base 9: mod_base = OTHER; note = 2' O-methyl modified nucleoside
  modified_base 10: mod_base = OTHER; note = 2' fluoro-modified nucleoside
  modified_base 11: mod_base = OTHER; note = 2' O-methyl modified nucleoside
  modified_base 12: mod_base = OTHER; note = 2' O-methyl modified nucleoside
  modified_base 13: mod_base = OTHER; note = 2' O-methyl modified nucleoside
  modified_base 14: mod_base = OTHER; note = 2' fluoro-modified nucleoside
  modified_base 15: mod_base = OTHER; note = 2' O-methyl modified nucleoside
  modified_base 16: mod_base = OTHER; note = 2' fluoro-modified nucleoside
  modified_base 17: mod_base = OTHER; note = 2' O-methyl modified nucleoside
  modified_base 18: mod_base = OTHER; note = 2' fluoro-modified nucleoside
  modified_base 19: mod_base = OTHER; note = 2' O-methyl modified nucleoside
  modified_base 19..20: mod_base = OTHER; note = Phosphorothioate linkage
  modified_base 20: mod_base = OTHER; note = 2' O-methyl modified nucleoside
  modified_base 20..21: mod_base = OTHER; note = Phosphorothioate linkage
  modified_base 21: mod_base = OTHER; note = 2' O-methyl modified nucleoside
  source 1..21: mol_type = other RNA
tctcgccactttgttgttttt

SEQ ID NO: 11217 - RNA, 21 nt, synthetic construct
  misc_feature 1..21: note = Description of Artificial Sequence: Synthetic oligonucleotide
  modified_base 1: mod_base = OTHER; note = 2' O-methyl modified nucleoside
  modified_base 1..2: mod_base = OTHER; note = Phosphorothioate linkage
  modified_base 2: mod_base = OTHER; note = 2' fluoro-modified nucleoside
  modified_base 2..3: mod_base = OTHER; note = Phosphorothioate linkage
  modified_base 3: mod_base = OTHER; note = 2' O-methyl modified nucleoside
  modified_base 4: mod_base = OTHER; note = 2' fluoro-modified nucleoside
  modified_base 5: mod_base = OTHER; note = 2' O-methyl modified nucleoside
  modified_base 6: mod_base = OTHER; note = 2' fluoro-modified nucleoside
  modified_base 7: mod_base = OTHER; note = 2' O-methyl modified nucleoside
  modified_base 8: mod_base = OTHER; note = 2' fluoro-modified nucleoside
  modified_base 9: mod_base = OTHER; note = 2' O-methyl modified nucleoside
  modified_base 10: mod_base = OTHER; note = 2' fluoro-modified nucleoside
  modified_base 11: mod_base = OTHER; note = 2' O-methyl modified nucleoside
  modified_base 12: mod_base = OTHER; note = 2' O-methyl modified nucleoside
  modified_base 13: mod_base = OTHER; note = 2' O-methyl modified nucleoside
  modified_base 14: mod_base = OTHER; note = 2' fluoro-modified nucleoside
  modified_base 15: mod_base = OTHER; note = 2' O-methyl modified nucleoside
  modified_base 16: mod_base = OTHER; note = 2' fluoro-modified nucleoside
  modified_base 17: mod_base = OTHER; note = 2' O-methyl modified nucleoside
  modified_base 18: mod_base = OTHER; note = 2' fluoro-modified nucleoside
  modified_base 19: mod_base = OTHER; note = 2' O-methyl modified nucleoside
  modified_base 19..20: mod_base = OTHER; note = Phosphorothioate linkage
  modified_base 20: mod_base = OTHER; note = 2' O-methyl modified nucleoside
  modified_base 20..21: mod_base = OTHER; note = Phosphorothioate linkage
  modified_base 21: mod_base = OTHER; note = 2' O-methyl modified nucleoside
  source 1..21: mol_type = other RNA
tacgctttcactctgagggtt

SEQ ID NO: 11218 - RNA, 21 nt, synthetic construct
  misc_feature 1..21: note = Description of Artificial Sequence: Synthetic oligonucleotide
  modified_base 1: mod_base = OTHER; note = 2' O-methyl modified nucleoside
  modified_base 1..2: mod_base = OTHER; note = Phosphorothioate linkage
  modified_base 2: mod_base = OTHER; note = 2' fluoro-modified nucleoside
  modified_base 2..3: mod_base = OTHER; note = Phosphorothioate linkage
  modified_base 3: mod_base = OTHER; note = 2' O-methyl modified nucleoside
  modified_base 4: mod_base = OTHER; note = 2' fluoro-modified nucleoside
  modified_base 5: mod_base = OTHER; note = 2' O-methyl modified nucleoside
  modified_base 6: mod_base = OTHER; note = 2' fluoro-modified nucleoside
  modified_base 7: mod_base = OTHER; note = 2' O-methyl modified nucleoside
  modified_base 8: mod_base = OTHER; note = 2' fluoro-modified nucleoside
  modified_base 9: mod_base = OTHER; note = 2' O-methyl modified nucleoside
  modified_base 10: mod_base = OTHER; note = 2' fluoro-modified nucleoside
  modified_base 11: mod_base = OTHER; note = 2' O-methyl modified nucleoside
  modified_base 12: mod_base = OTHER; note = 2' O-methyl modified nucleoside
  modified_base 13: mod_base = OTHER; note = 2' O-methyl modified nucleoside
  modified_base 14: mod_base = OTHER; note = 2' fluoro-modified nucleoside
  modified_base 15: mod_base = OTHER; note = 2' O-methyl modified nucleoside
  modified_base 16: mod_base = OTHER; note = 2' fluoro-modified nucleoside
  modified_base 17: mod_base = OTHER; note = 2' O-methyl modified nucleoside
  modified_base 18: mod_base = OTHER; note = 2' fluoro-modified nucleoside
  modified_base 19: mod_base = OTHER; note = 2' O-methyl modified nucleoside
  modified_base 19..20: mod_base = OTHER; note = Phosphorothioate linkage
  modified_base 20: mod_base = OTHER; note = 2' O-methyl modified nucleoside
  modified_base 20..21: mod_base = OTHER; note = Phosphorothioate linkage
  modified_base 21: mod_base = OTHER; note = 2' O-methyl modified nucleoside
  source 1..21: mol_type = other RNA
ttacgctttcactctgaggtt

SEQ ID NO: 11219 - RNA, 21 nt, synthetic construct
  misc_feature 1..21: note = Description of Artificial Sequence: Synthetic oligonucleotide
  modified_base 1: mod_base = OTHER; note = 2' O-methyl modified nucleoside
  modified_base 1..2: mod_base = OTHER; note = Phosphorothioate linkage
  modified_base 2: mod_base = OTHER; note = 2' fluoro-modified nucleoside
  modified_base 2..3: mod_base = OTHER; note = Phosphorothioate linkage
  modified_base 3: mod_base = OTHER; note = 2' O-methyl modified nucleoside
  modified_base 4: mod_base = OTHER; note = 2' fluoro-modified nucleoside
  modified_base 5: mod_base = OTHER; note = 2' O-methyl modified nucleoside
  modified_base 6: mod_base = OTHER; note = 2' fluoro-modified nucleoside
  modified_base 7: mod_base = OTHER; note = 2' O-methyl modified nucleoside
  modified_base 8: mod_base = OTHER; note = 2' fluoro-modified nucleoside
  modified_base 9: mod_base = OTHER; note = 2' O-methyl modified nucleoside
  modified_base 10: mod_base = OTHER; note = 2' fluoro-modified nucleoside
  modified_base 11: mod_base = OTHER; note = 2' O-methyl modified nucleoside
  modified_base 12: mod_base = OTHER; note = 2' O-methyl modified nucleoside
  modified_base 13: mod_base = OTHER; note = 2' O-methyl modified nucleoside
  modified_base 14: mod_base = OTHER; note = 2' fluoro-modified nucleoside
  modified_base 15: mod_base = OTHER; note = 2' O-methyl modified nucleoside
  modified_base 16: mod_base = OTHER; note = 2' fluoro-modified nucleoside
  modified_base 17: mod_base = OTHER; note = 2' O-methyl modified nucleoside
  modified_base 18: mod_base = OTHER; note = 2' fluoro-modified nucleoside
  modified_base 19: mod_base = OTHER; note = 2' O-methyl modified nucleoside
  modified_base 19..20: mod_base = OTHER; note = Phosphorothioate linkage
  modified_base 20: mod_base = OTHER; note = 2' O-methyl modified nucleoside
  modified_base 20..21: mod_base = OTHER; note = Phosphorothioate linkage
  modified_base 21: mod_base = OTHER; note = 2' O-methyl modified nucleoside
  source 1..21: mol_type = other RNA
tttacgctttcactctgagtt

SEQ ID NO: 11220 - RNA, 21 nt, synthetic construct
  misc_feature 1..21: note = Description of Artificial Sequence: Synthetic oligonucleotide
  modified_base 1: mod_base = OTHER; note = 2' O-methyl modified nucleoside
  modified_base 1..2: mod_base = OTHER; note = Phosphorothioate linkage
  modified_base 2: mod_base = OTHER; note = 2' fluoro-modified nucleoside
  modified_base 2..3: mod_base = OTHER; note = Phosphorothioate linkage
  modified_base 3: mod_base = OTHER; note = 2' O-methyl modified nucleoside
  modified_base 4: mod_base = OTHER; note = 2' fluoro-modified nucleoside
  modified_base 5: mod_base = OTHER; note = 2' O-methyl modified nucleoside
  modified_base 6: mod_base = OTHER; note = 2' fluoro-modified nucleoside
  modified_base 7: mod_base = OTHER; note = 2' O-methyl modified nucleoside
  modified_base 8: mod_base = OTHER; note = 2' fluoro-modified nucleoside
  modified_base 9: mod_base = OTHER; note = 2' O-methyl modified nucleoside
  modified_base 10: mod_base = OTHER; note = 2' fluoro-modified nucleoside
  modified_base 11: mod_base = OTHER; note = 2' O-methyl modified nucleoside
  modified_base 12: mod_base = OTHER; note = 2' O-methyl modified nucleoside
  modified_base 13: mod_base = OTHER; note = 2' O-methyl modified nucleoside
  modified_base 14: mod_base = OTHER; note = 2' fluoro-modified nucleoside
  modified_base 15: mod_base = OTHER; note = 2' O-methyl modified nucleoside
  modified_base 16: mod_base = OTHER; note = 2' fluoro-modified nucleoside
  modified_base 17: mod_base = OTHER; note = 2' O-methyl modified nucleoside
  modified_base 18: mod_base = OTHER; note = 2' fluoro-modified nucleoside
  modified_base 19: mod_base = OTHER; note = 2' O-methyl modified nucleoside
  modified_base 19..20: mod_base = OTHER; note = Phosphorothioate linkage
  modified_base 20: mod_base = OTHER; note = 2' O-methyl modified nucleoside
  modified_base 20..21: mod_base = OTHER; note = Phosphorothioate linkage
  modified_base 21: mod_base = OTHER; note = 2' O-methyl modified nucleoside
  source 1..21: mol_type = other RNA
tccttacgctttcactctgtt

SEQ ID NO: 11221 - RNA, 21 nt, synthetic construct
  misc_feature 1..21: note = Description of Artificial Sequence: Synthetic oligonucleotide
  modified_base 1: mod_base = OTHER; note = 2' O-methyl modified nucleoside
  modified_base 1..2: mod_base = OTHER; note = Phosphorothioate linkage
  modified_base 2: mod_base = OTHER; note = 2' fluoro-modified nucleoside
  modified_base 2..3: mod_base = OTHER; note = Phosphorothioate linkage
  modified_base 3: mod_base = OTHER; note = 2' O-methyl modified nucleoside
  modified_base 4: mod_base = OTHER; note = 2' fluoro-modified nucleoside
  modified_base 5: mod_base = OTHER; note = 2' O-methyl modified nucleoside
  modified_base 6: mod_base = OTHER; note = 2' fluoro-modified nucleoside
  modified_base 7: mod_base = OTHER; note = 2' O-methyl modified nucleoside
  modified_base 8: mod_base = OTHER; note = 2' fluoro-modified nucleoside
  modified_base 9: mod_base = OTHER; note = 2' O-methyl modified nucleoside
  modified_base 10: mod_base = OTHER; note = 2' fluoro-modified nucleoside
  modified_base 11: mod_base = OTHER; note = 2' O-methyl modified nucleoside
  modified_base 12: mod_base = OTHER; note = 2' O-methyl modified nucleoside
  modified_base 13: mod_base = OTHER; note = 2' O-methyl modified nucleoside
  modified_base 14: mod_base = OTHER; note = 2' fluoro-modified nucleoside
  modified_base 15: mod_base = OTHER; note = 2' O-methyl modified nucleoside
  modified_base 16: mod_base = OTHER; note = 2' fluoro-modified nucleoside
  modified_base 17: mod_base = OTHER; note = 2' O-methyl modified nucleoside
  modified_base 18: mod_base = OTHER; note = 2' fluoro-modified nucleoside
  modified_base 19: mod_base = OTHER; note = 2' O-methyl modified nucleoside
  modified_base 19..20: mod_base = OTHER; note = Phosphorothioate linkage
  modified_base 20: mod_base = OTHER; note = 2' O-methyl modified nucleoside
  modified_base 20..21: mod_base = OTHER; note = Phosphorothioate linkage
  modified_base 21: mod_base = OTHER; note = 2' O-methyl modified nucleoside
  source 1..21: mol_type = other RNA
taccttacgctttcactcttt

SEQ ID NO: 11222 - RNA, 21 nt, synthetic construct
  misc_feature 1..21: note = Description of Artificial Sequence: Synthetic oligonucleotide
  modified_base 1: mod_base = OTHER; note = 2' O-methyl modified nucleoside
  modified_base 1..2: mod_base = OTHER; note = Phosphorothioate linkage
  modified_base 2: mod_base = OTHER; note = 2' fluoro-modified nucleoside
  modified_base 2..3: mod_base = OTHER; note = Phosphorothioate linkage
  modified_base 3: mod_base = OTHER; note = 2' O-methyl modified nucleoside
  modified_base 4: mod_base = OTHER; note = 2' fluoro-modified nucleoside
  modified_base 5: mod_base = OTHER; note = 2' O-methyl modified nucleoside
  modified_base 6: mod_base = OTHER; note = 2' fluoro-modified nucleoside
  modified_base 7: mod_base = OTHER; note = 2' O-methyl modified nucleoside
  modified_base 8: mod_base = OTHER; note = 2' fluoro-modified nucleoside
  modified_base 9: mod_base = OTHER; note = 2' O-methyl modified nucleoside
  modified_base 10: mod_base = OTHER; note = 2' fluoro-modified nucleoside
  modified_base 11: mod_base = OTHER; note = 2' O-methyl modified nucleoside
  modified_base 12: mod_base = OTHER; note = 2' O-methyl modified nucleoside
  modified_base 13: mod_base = OTHER; note = 2' O-methyl modified nucleoside
  modified_base 14: mod_base = OTHER; note = 2' fluoro-modified nucleoside
  modified_base 15: mod_base = OTHER; note = 2' O-methyl modified nucleoside
  modified_base 16: mod_base = OTHER; note = 2' fluoro-modified nucleoside
  modified_base 17: mod_base = OTHER; note = 2' O-methyl modified nucleoside
  modified_base 18: mod_base = OTHER; note = 2' fluoro-modified nucleoside
  modified_base 19: mod_base = OTHER; note = 2' O-methyl modified nucleoside
  modified_base 19..20: mod_base = OTHER; note = Phosphorothioate linkage
  modified_base 20: mod_base = OTHER; note = 2' O-methyl modified nucleoside
  modified_base 20..21: mod_base = OTHER; note = Phosphorothioate linkage
  modified_base 21: mod_base = OTHER; note = 2' O-methyl modified nucleoside
  source 1..21: mol_type = other RNA
taaccttacgctttcactctt

SEQ ID NO: 11223 - RNA, 21 nt, synthetic construct
  misc_feature 1..21: note = Description of Artificial Sequence: Synthetic oligonucleotide
  modified_base 1: mod_base = OTHER; note = 2' O-methyl modified nucleoside
  modified_base 1..2: mod_base = OTHER; note = Phosphorothioate linkage
  modified_base 2: mod_base = OTHER; note = 2' fluoro-modified nucleoside
  modified_base 2..3: mod_base = OTHER; note = Phosphorothioate linkage
  modified_base 3: mod_base = OTHER; note = 2' O-methyl modified nucleoside
  modified_base 4: mod_base = OTHER; note = 2' fluoro-modified nucleoside
  modified_base 5: mod_base = OTHER; note = 2' O-methyl modified nucleoside
  modified_base 6: mod_base = OTHER; note = 2' fluoro-modified nucleoside
  modified_base 7: mod_base = OTHER; note = 2' O-methyl modified nucleoside
  modified_base 8: mod_base = OTHER; note = 2' fluoro-modified nucleoside
  modified_base 9: mod_base = OTHER; note = 2' O-methyl modified nucleoside
  modified_base 10: mod_base = OTHER; note = 2' fluoro-modified nucleoside
  modified_base 11: mod_base = OTHER; note = 2' O-methyl modified nucleoside
  modified_base 12: mod_base = OTHER; note = 2' O-methyl modified nucleoside
  modified_base 13: mod_base = OTHER; note = 2' O-methyl modified nucleoside
  modified_base 14: mod_base = OTHER; note = 2' fluoro-modified nucleoside
  modified_base 15: mod_base = OTHER; note = 2' O-methyl modified nucleoside
  modified_base 16: mod_base = OTHER; note = 2' fluoro-modified nucleoside
  modified_base 17: mod_base = OTHER; note = 2' O-methyl modified nucleoside
  modified_base 18: mod_base = OTHER; note = 2' fluoro-modified nucleoside
  modified_base 19: mod_base = OTHER; note = 2' O-methyl modified nucleoside
  modified_base 19..20: mod_base = OTHER; note = Phosphorothioate linkage
  modified_base 20: mod_base = OTHER; note = 2' O-methyl modified nucleoside
  modified_base 20..21: mod_base = OTHER; note = Phosphorothioate linkage
  modified_base 21: mod_base = OTHER; note = 2' O-methyl modified nucleoside
  source 1..21: mol_type = other RNA
tgaaccttacgctttcacttt

SEQ ID NO: 11224 - RNA, 21 nt, synthetic construct
  misc_feature 1..21: note = Description of Artificial Sequence: Synthetic oligonucleotide
  modified_base 1: mod_base = OTHER; note = 2' O-methyl modified nucleoside
  modified_base 1..2: mod_base = OTHER; note = Phosphorothioate linkage
  modified_base 2: mod_base = OTHER; note = 2' fluoro-modified nucleoside
  modified_base 2..3: mod_base = OTHER; note = Phosphorothioate linkage
  modified_base 3: mod_base = OTHER; note = 2' O-methyl modified nucleoside
  modified_base 4: mod_base = OTHER; note = 2' fluoro-modified nucleoside
  modified_base 5: mod_base = OTHER; note = 2' O-methyl modified nucleoside
  modified_base 6: mod_base = OTHER; note = 2' fluoro-modified nucleoside
  modified_base 7: mod_base = OTHER; note = 2' O-methyl modified nucleoside
  modified_base 8: mod_base = OTHER; note = 2' fluoro-modified nucleoside
  modified_base 9: mod_base = OTHER; note = 2' O-methyl modified nucleoside
  modified_base 10: mod_base = OTHER; note = 2' fluoro-modified nucleoside
  modified_base 11: mod_base = OTHER; note = 2' O-methyl modified nucleoside
  modified_base 12: mod_base = OTHER; note = 2' O-methyl modified nucleoside
  modified_base 13: mod_base = OTHER; note = 2' O-methyl modified nucleoside
  modified_base 14: mod_base = OTHER; note = 2' fluoro-modified nucleoside
  modified_base 15: mod_base = OTHER; note = 2' O-methyl modified nucleoside
  modified_base 16: mod_base = OTHER; note = 2' fluoro-modified nucleoside
  modified_base 17: mod_base = OTHER; note = 2' O-methyl modified nucleoside
  modified_base 18: mod_base = OTHER; note = 2' fluoro-modified nucleoside
  modified_base 19: mod_base = OTHER; note = 2' O-methyl modified nucleoside
  modified_base 19..20: mod_base = OTHER; note = Phosphorothioate linkage
  modified_base 20: mod_base = OTHER; note = 2' O-methyl modified nucleoside
  modified_base 20..21: mod_base = OTHER; note = Phosphorothioate linkage
  modified_base 21: mod_base = OTHER; note = 2' O-methyl modified nucleoside
  source 1..21: mol_type = other RNA
tgctgactgaaccttacgctt

SEQ ID NO: 11225 - RNA, 21 nt, synthetic construct
  misc_feature 1..21: note = Description of Artificial Sequence: Synthetic oligonucleotide
  modified_base 1: mod_base = OTHER; note = 2' O-methyl modified nucleoside
  modified_base 1..2: mod_base = OTHER; note = Phosphorothioate linkage
  modified_base 2: mod_base = OTHER; note = 2' fluoro-modified nucleoside
  modified_base 2..3: mod_base = OTHER; note = Phosphorothioate linkage
  modified_base 3: mod_base = OTHER; note = 2' O-methyl modified nucleoside
  modified_base 4: mod_base = OTHER; note = 2' fluoro-modified nucleoside
  modified_base 5: mod_base = OTHER; note = 2' O-methyl modified nucleoside
  modified_base 6: mod_base = OTHER; note = 2' fluoro-modified nucleoside
  modified_base 7: mod_base = OTHER; note = 2' O-methyl modified nucleoside
  modified_base 8: mod_base = OTHER; note = 2' fluoro-modified nucleoside
  modified_base 9: mod_base = OTHER; note = 2' O-methyl modified nucleoside
  modified_base 10: mod_base = OTHER; note = 2' fluoro-modified nucleoside
  modified_base 11: mod_base = OTHER; note = 2' O-methyl modified nucleoside
  modified_base 12: mod_base = OTHER; note = 2' O-methyl modified nucleoside
  modified_base 13: mod_base = OTHER; note = 2' O-methyl modified nucleoside
  modified_base 14: mod_base = OTHER; note = 2' fluoro-modified nucleoside
  modified_base 15: mod_base = OTHER; note = 2' O-methyl modified nucleoside
  modified_base 16: mod_base = OTHER; note = 2' fluoro-modified nucleoside
  modified_base 17: mod_base = OTHER; note = 2' O-methyl modified nucleoside
  modified_base 18: mod_base = OTHER; note = 2' fluoro-modified nucleoside
  modified_base 19: mod_base = OTHER; note = 2' O-methyl modified nucleoside
  modified_base 19..20: mod_base = OTHER; note = Phosphorothioate linkage
  modified_base 20: mod_base = OTHER; note = 2' O-methyl modified nucleoside
  modified_base 20..21: mod_base = OTHER; note = Phosphorothioate linkage
  modified_base 21: mod_base = OTHER; note = 2' O-methyl modified nucleoside
  source 1..21: mol_type = other RNA
tttttgtgggtttgggtgatt

SEQ ID NO: 11226 - RNA, 21 nt, synthetic construct
  misc_feature 1..21: note = Description of Artificial Sequence: Synthetic oligonucleotide
  modified_base 1: mod_base = OTHER; note = 2' O-methyl modified nucleoside
  modified_base 1..2: mod_base = OTHER; note = Phosphorothioate linkage
  modified_base 2: mod_base = OTHER; note = 2' fluoro-modified nucleoside
  modified_base 2..3: mod_base = OTHER; note = Phosphorothioate linkage
  modified_base 3: mod_base = OTHER; note = 2' O-methyl modified nucleoside
  modified_base 4: mod_base = OTHER; note = 2' fluoro-modified nucleoside
  modified_base 5: mod_base = OTHER; note = 2' O-methyl modified nucleoside
  modified_base 6: mod_base = OTHER; note = 2' fluoro-modified nucleoside
  modified_base 7: mod_base = OTHER; note = 2' O-methyl modified nucleoside
  modified_base 8: mod_base = OTHER; note = 2' fluoro-modified nucleoside
  modified_base 9: mod_base = OTHER; note = 2' O-methyl modified nucleoside
  modified_base 10: mod_base = OTHER; note = 2' fluoro-modified nucleoside
  modified_base 11: mod_base = OTHER; note = 2' O-methyl modified nucleoside
  modified_base 12: mod_base = OTHER; note = 2' O-methyl modified nucleoside
  modified_base 13: mod_base = OTHER; note = 2' O-methyl modified nucleoside
  modified_base 14: mod_base = OTHER; note = 2' fluoro-modified nucleoside
  modified_base 15: mod_base = OTHER; note = 2' O-methyl modified nucleoside
  modified_base 16: mod_base = OTHER; note = 2' fluoro-modified nucleoside
  modified_base 17: mod_base = OTHER; note = 2' O-methyl modified nucleoside
  modified_base 18: mod_base = OTHER; note = 2' fluoro-modified nucleoside
  modified_base 19: mod_base = OTHER; note = 2' O-methyl modified nucleoside
  modified_base 19..20: mod_base = OTHER; note = Phosphorothioate linkage
  modified_base 20: mod_base = OTHER; note = 2' O-methyl modified nucleoside
  modified_base 20..21: mod_base = OTHER; note = Phosphorothioate linkage
  modified_base 21: mod_base = OTHER; note = 2' O-methyl modified nucleoside
  source 1..21: mol_type = other RNA
tcgatgaaaatgcagagcctt

SEQ ID NO: 11227 - RNA, 21 nt, synthetic construct
  misc_feature 1..21: note = Description of Artificial Sequence: Synthetic oligonucleotide
  modified_base 1: mod_base = OTHER; note = 2' O-methyl modified nucleoside
  modified_base 1..2: mod_base = OTHER; note = Phosphorothioate linkage
  modified_base 2: mod_base = OTHER; note = 2' fluoro-modified nucleoside
  modified_base 2..3: mod_base = OTHER; note = Phosphorothioate linkage
  modified_base 3: mod_base = OTHER; note = 2' O-methyl modified nucleoside
  modified_base 4: mod_base = OTHER; note = 2' fluoro-modified nucleoside
  modified_base 5: mod_base = OTHER; note = 2' O-methyl modified nucleoside
  modified_base 6: mod_base = OTHER; note = 2' fluoro-modified nucleoside
  modified_base 7: mod_base = OTHER; note = 2' O-methyl modified nucleoside
  modified_base 8: mod_base = OTHER; note = 2' fluoro-modified nucleoside
  modified_base 9: mod_base = OTHER; note = 2' O-methyl modified nucleoside
  modified_base 10: mod_base = OTHER; note = 2' fluoro-modified nucleoside
  modified_base 11: mod_base = OTHER; note = 2' O-methyl modified nucleoside
  modified_base 12: mod_base = OTHER; note = 2' O-methyl modified nucleoside
  modified_base 13: mod_base = OTHER; note = 2' O-methyl modified nucleoside
  modified_base 14: mod_base = OTHER; note = 2' fluoro-modified nucleoside
  modified_base 15: mod_base = OTHER; note = 2' O-methyl modified nucleoside
  modified_base 16: mod_base = OTHER; note = 2' fluoro-modified nucleoside
  modified_base 17: mod_base = OTHER; note = 2' O-methyl modified nucleoside
  modified_base 18: mod_base = OTHER; note = 2' fluoro-modified nucleoside
  modified_base 19: mod_base = OTHER; note = 2' O-methyl modified nucleoside
  modified_base 19..20: mod_base = OTHER; note = Phosphorothioate linkage
  modified_base 20: mod_base = OTHER; note = 2' O-methyl modified nucleoside
  modified_base 20..21: mod_base = OTHER; note = Phosphorothioate linkage
  modified_base 21: mod_base = OTHER; note = 2' O-methyl modified nucleoside
  source 1..21: mol_type = other RNA
tgctgacaaaggccacgattt

SEQ ID NO: 11228 - RNA, 21 nt, synthetic construct
  misc_feature 1..21: note = Description of Artificial Sequence: Synthetic oligonucleotide
  modified_base 1: mod_base = OTHER; note = 2' O-methyl modified nucleoside
  modified_base 1..2: mod_base = OTHER; note = Phosphorothioate linkage
  modified_base 2: mod_base = OTHER; note = 2' fluoro-modified nucleoside
  modified_base 2..3: mod_base = OTHER; note = Phosphorothioate linkage
  modified_base 3: mod_base = OTHER; note = 2' O-methyl modified nucleoside
  modified_base 4: mod_base = OTHER; note = 2' fluoro-modified nucleoside
  modified_base 5: mod_base = OTHER; note = 2' O-methyl modified nucleoside
  modified_base 6: mod_base = OTHER; note = 2' fluoro-modified nucleoside
  modified_base 7: mod_base = OTHER; note = 2' O-methyl modified nucleoside
  modified_base 8: mod_base = OTHER; note = 2' fluoro-modified nucleoside
  modified_base 9: mod_base = OTHER; note = 2' O-methyl modified nucleoside
  modified_base 10: mod_base = OTHER; note = 2' fluoro-modified nucleoside
  modified_base 11: mod_base = OTHER; note = 2' O-methyl modified nucleoside
  modified_base 12: mod_base = OTHER; note = 2' O-methyl modified nucleoside
  modified_base 13: mod_base = OTHER; note = 2' O-methyl modified nucleoside
  modified_base 14: mod_base = OTHER; note = 2' fluoro-modified nucleoside
  modified_base 15: mod_base = OTHER; note = 2' O-methyl modified nucleoside
  modified_base 16: mod_base = OTHER; note = 2' fluoro-modified nucleoside
  modified_base 17: mod_base = OTHER; note = 2' O-methyl modified nucleoside
  modified_base 18: mod_base = OTHER; note = 2' fluoro-modified nucleoside
  modified_base 19: mod_base = OTHER; note = 2' O-methyl modified nucleoside
  modified_base 19..20: mod_base = OTHER; note = Phosphorothioate linkage
  modified_base 20: mod_base = OTHER; note = 2' O-methyl modified nucleoside
  modified_base 20..21: mod_base = OTHER; note = Phosphorothioate linkage
  modified_base 21: mod_base = OTHER; note = 2' O-methyl modified nucleoside
  source 1..21: mol_type = other RNA
tggctgacaaaggccacgatt

SEQ ID NO: 11229 - RNA, 21 nt, synthetic construct
  misc_feature 1..21: note = Description of Artificial Sequence: Synthetic oligonucleotide
  modified_base 1: mod_base = OTHER; note = 2' O-methyl modified nucleoside
  modified_base 1..2: mod_base = OTHER; note = Phosphorothioate linkage
  modified_base 2: mod_base = OTHER; note = 2' fluoro-modified nucleoside
  modified_base 2..3: mod_base = OTHER; note = Phosphorothioate linkage
  modified_base 3: mod_base = OTHER; note = 2' O-methyl modified nucleoside
  modified_base 4: mod_base = OTHER; note = 2' fluoro-modified nucleoside
  modified_base 5: mod_base = OTHER; note = 2' O-methyl modified nucleoside
  modified_base 6: mod_base = OTHER; note = 2' fluoro-modified nucleoside
  modified_base 7: mod_base = OTHER; note = 2' O-methyl modified nucleoside
  modified_base 8: mod_base = OTHER; note = 2' fluoro-modified nucleoside
  modified_base 9: mod_base = OTHER; note = 2' O-methyl modified nucleoside
  modified_base 10: mod_base = OTHER; note = 2' fluoro-modified nucleoside
  modified_base 11: mod_base = OTHER; note = 2' O-methyl modified nucleoside
  modified_base 12: mod_base = OTHER; note = 2' O-methyl modified nucleoside
  modified_base 13: mod_base = OTHER; note = 2' O-methyl modified nucleoside
  modified_base 14: mod_base = OTHER; note = 2' fluoro-modified nucleoside
  modified_base 15: mod_base = OTHER; note = 2' O-methyl modified nucleoside
  modified_base 16: mod_base = OTHER; note = 2' fluoro-modified nucleoside
  modified_base 17: mod_base = OTHER; note = 2' O-methyl modified nucleoside
  modified_base 18: mod_base = OTHER; note = 2' fluoro-modified nucleoside
  modified_base 19: mod_base = OTHER; note = 2' O-methyl modified nucleoside
  modified_base 19..20: mod_base = OTHER; note = Phosphorothioate linkage
  modified_base 20: mod_base = OTHER; note = 2' O-methyl modified nucleoside
  modified_base 20..21: mod_base = OTHER; note = Phosphorothioate linkage
  modified_base 21: mod_base = OTHER; note = 2' O-methyl modified nucleoside
  source 1..21: mol_type = other RNA
tgcgactccatgcgcttgctt

SEQ ID NO: 11230 - RNA, 21 nt, synthetic construct
  misc_feature 1..21: note = Description of Artificial Sequence: Synthetic oligonucleotide
  modified_base 1: mod_base = OTHER; note = 2' O-methyl modified nucleoside
  modified_base 1..2: mod_base = OTHER; note = Phosphorothioate linkage
  modified_base 2: mod_base = OTHER; note = 2' fluoro-modified nucleoside
  modified_base 2..3: mod_base = OTHER; note = Phosphorothioate linkage
  modified_base 3: mod_base = OTHER; note = 2' O-methyl modified nucleoside
  modified_base 4: mod_base = OTHER; note = 2' fluoro-modified nucleoside
  modified_base 5: mod_base = OTHER; note = 2' O-methyl modified nucleoside
  modified_base 6: mod_base = OTHER; note = 2' fluoro-modified nucleoside
  modified_base 7: mod_base = OTHER; note = 2' O-methyl modified nucleoside
  modified_base 8: mod_base = OTHER; note = 2' fluoro-modified nucleoside
  modified_base 9: mod_base = OTHER; note = 2' O-methyl modified nucleoside
  modified_base 10: mod_base = OTHER; note = 2' fluoro-modified nucleoside
  modified_base 11: mod_base = OTHER; note = 2' O-methyl modified nucleoside
  modified_base 12: mod_base = OTHER; note = 2' O-methyl modified nucleoside
  modified_base 13: mod_base = OTHER; note = 2' O-methyl modified nucleoside
  modified_base 14: mod_base = OTHER; note = 2' fluoro-modified nucleoside
  modified_base 15: mod_base = OTHER; note = 2' O-methyl modified nucleoside
  modified_base 16: mod_base = OTHER; note = 2' fluoro-modified nucleoside
  modified_base 17: mod_base = OTHER; note = 2' O-methyl modified nucleoside
  modified_base 18: mod_base = OTHER; note = 2' fluoro-modified nucleoside
  modified_base 19: mod_base = OTHER; note = 2' O-methyl modified nucleoside
  modified_base 19..20: mod_base = OTHER; note = Phosphorothioate linkage
  modified_base 20: mod_base = OTHER; note = 2' O-methyl modified nucleoside
  modified_base 20..21: mod_base = OTHER; note = Phosphorothioate linkage
  modified_base 21: mod_base = OTHER; note = 2' O-methyl modified nucleoside
  source 1..21: mol_type = other RNA
tcgcgactccatgcgcttgtt

SEQ ID NO: 11231 - RNA, 21 nt, synthetic construct
  misc_feature 1..21: note = Description of Artificial Sequence: Synthetic oligonucleotide
  modified_base 1: mod_base = OTHER; note = 2' O-methyl modified nucleoside
  modified_base 1..2: mod_base = OTHER; note = Phosphorothioate linkage
  modified_base 2: mod_base = OTHER; note = 2' fluoro-modified nucleoside
  modified_base 2..3: mod_base = OTHER; note = Phosphorothioate linkage
  modified_base 3: mod_base = OTHER; note = 2' O-methyl modified nucleoside
  modified_base 4: mod_base = OTHER; note = 2' fluoro-modified nucleoside
  modified_base 5: mod_base = OTHER; note = 2' O-methyl modified nucleoside
  modified_base 6: mod_base = OTHER; note = 2' fluoro-modified nucleoside
  modified_base 7: mod_base = OTHER; note = 2' O-methyl modified nucleoside
  modified_base 8: mod_base = OTHER; note = 2' fluoro-modified nucleoside
  modified_base 9: mod_base = OTHER; note = 2' O-methyl modified nucleoside
  modified_base 10: mod_base = OTHER; note = 2' fluoro-modified nucleoside
  modified_base 11: mod_base = OTHER; note = 2' O-methyl modified nucleoside
  modified_base 12: mod_base = OTHER; note = 2' O-methyl modified nucleoside
  modified_base 13: mod_base = OTHER; note = 2' O-methyl modified nucleoside
  modified_base 14: mod_base = OTHER; note = 2' fluoro-modified nucleoside
  modified_base 15: mod_base = OTHER; note = 2' O-methyl modified nucleoside
  modified_base 16: mod_base = OTHER; note = 2' fluoro-modified nucleoside
  modified_base 17: mod_base = OTHER; note = 2' O-methyl modified nucleoside
  modified_base 18: mod_base = OTHER; note = 2' fluoro-modified nucleoside
  modified_base 19: mod_base = OTHER; note = 2' O-methyl modified nucleoside
  modified_base 19..20: mod_base = OTHER; note = Phosphorothioate linkage
  modified_base 20: mod_base = OTHER; note = 2' O-methyl modified nucleoside
  modified_base 20..21: mod_base = OTHER; note = Phosphorothioate linkage
  modified_base 21: mod_base = OTHER; note = 2' O-methyl modified nucleoside
  source 1..21: mol_type = other RNA
tccgcgactccatgcgctttt

SEQ ID NO: 11232 - RNA, 21 nt, synthetic construct
  misc_feature 1..21: note = Description of Artificial Sequence: Synthetic oligonucleotide
  modified_base 1: mod_base = OTHER; note = 2' O-methyl modified nucleoside
  modified_base 1..2: mod_base = OTHER; note = Phosphorothioate linkage
  modified_base 2: mod_base = OTHER; note = 2' fluoro-modified nucleoside
  modified_base 2..3: mod_base = OTHER; note = Phosphorothioate linkage
  modified_base 3: mod_base = OTHER; note = 2' O-methyl modified nucleoside
  modified_base 4: mod_base = OTHER; note = 2' fluoro-modified nucleoside
  modified_base 5: mod_base = OTHER; note = 2' O-methyl modified nucleoside
  modified_base 6: mod_base = OTHER; note = 2' fluoro-modified nucleoside
  modified_base 7: mod_base = OTHER; note = 2' O-methyl modified nucleoside
  modified_base 8: mod_base = OTHER; note = 2' fluoro-modified nucleoside
  modified_base 9: mod_base = OTHER; note = 2' O-methyl modified nucleoside
  modified_base 10: mod_base = OTHER; note = 2' fluoro-modified nucleoside
  modified_base 11: mod_base = OTHER; note = 2' O-methyl modified nucleoside
  modified_base 12: mod_base = OTHER; note = 2' O-methyl modified nucleoside
  modified_base 13: mod_base = OTHER; note = 2' O-methyl modified nucleoside
  modified_base 14: mod_base = OTHER; note = 2' fluoro-modified nucleoside
  modified_base 15: mod_base = OTHER; note = 2' O-methyl modified nucleoside
  modified_base 16: mod_base = OTHER; note = 2' fluoro-modified nucleoside
  modified_base 17: mod_base = OTHER; note = 2' O-methyl modified nucleoside
  modified_base 18: mod_base = OTHER; note = 2' fluoro-modified nucleoside
  modified_base 19: mod_base = OTHER; note = 2' O-methyl modified nucleoside
  modified_base 19..20: mod_base = OTHER; note = Phosphorothioate linkage
  modified_base 20: mod_base = OTHER; note = 2' O-methyl modified nucleoside
  modified_base 20..21: mod_base = OTHER; note = Phosphorothioate linkage
  modified_base 21: mod_base = OTHER; note = 2' O-methyl modified nucleoside
  source 1..21: mol_type = other RNA
ttctgtgagccgcgactcctt

SEQ ID NO: 11233 - RNA, 21 nt, synthetic construct
  misc_feature 1..21: note = Description of Artificial Sequence: Synthetic oligonucleotide
  modified_base 1: mod_base = OTHER; note = 2' O-methyl modified nucleoside
  modified_base 1..2: mod_base = OTHER; note = Phosphorothioate linkage
  modified_base 2: mod_base = OTHER; note = 2' fluoro-modified nucleoside
  modified_base 2..3: mod_base = OTHER; note = Phosphorothioate linkage
  modified_base 3: mod_base = OTHER; note = 2' O-methyl modified nucleoside
  modified_base 4: mod_base = OTHER; note = 2' fluoro-modified nucleoside
  modified_base 5: mod_base = OTHER; note = 2' O-methyl modified nucleoside
  modified_base 6: mod_base = OTHER; note = 2' fluoro-modified nucleoside
  modified_base 7: mod_base = OTHER; note = 2' O-methyl modified nucleoside
  modified_base 8: mod_base = OTHER; note = 2' fluoro-modified nucleoside
  modified_base 9: mod_base = OTHER; note = 2' O-methyl modified nucleoside
  modified_base 10: mod_base = OTHER; note = 2' fluoro-modified nucleoside
  modified_base 11: mod_base = OTHER; note = 2' O-methyl modified nucleoside
  modified_base 12: mod_base = OTHER; note = 2' O-methyl modified nucleoside
  modified_base 13: mod_base = OTHER; note = 2' O-methyl modified nucleoside
  modified_base 14: mod_base = OTHER; note = 2' fluoro-modified nucleoside
  modified_base 15: mod_base = OTHER; note = 2' O-methyl modified nucleoside
  modified_base 16: mod_base = OTHER; note = 2' fluoro-modified nucleoside
  modified_base 17: mod_base = OTHER; note = 2' O-methyl modified nucleoside
  modified_base 18: mod_base = OTHER; note = 2' fluoro-modified nucleoside
  modified_base 19: mod_base = OTHER; note = 2' O-methyl modified nucleoside
  modified_base 19..20: mod_base = OTHER; note = Phosphorothioate linkage
  modified_base 20: mod_base = OTHER; note = 2' O-methyl modified nucleoside
  modified_base 20..21: mod_base = OTHER; note = Phosphorothioate linkage
  modified_base 21: mod_base = OTHER; note = 2' O-methyl modified nucleoside
  source 1..21: mol_type = other RNA
tatctgtgagccgcgactctt

SEQ ID NO: 11234 - RNA, 21 nt, synthetic construct
  misc_feature 1..21: note = Description of Artificial Sequence: Synthetic oligonucleotide
  modified_base 1: mod_base = OTHER; note = 2' O-methyl modified nucleoside
  modified_base 1..2: mod_base = OTHER; note = Phosphorothioate linkage
  modified_base 2: mod_base = OTHER; note = 2' fluoro-modified nucleoside
  modified_base 2..3: mod_base = OTHER; note = Phosphorothioate linkage
  modified_base 3: mod_base = OTHER; note = 2' O-methyl modified nucleoside
  modified_base 4: mod_base = OTHER; note = 2' fluoro-modified nucleoside
  modified_base 5: mod_base = OTHER; note = 2' O-methyl modified nucleoside
  modified_base 6: mod_base = OTHER; note = 2' fluoro-modified nucleoside
  modified_base 7: mod_base = OTHER; note = 2' O-methyl modified nucleoside
  modified_base 8: mod_base = OTHER; note = 2' fluoro-modified nucleoside
  modified_base 9: mod_base = OTHER; note = 2' O-methyl modified nucleoside
  modified_base 10: mod_base = OTHER; note = 2' fluoro-modified nucleoside
  modified_base 11: mod_base = OTHER; note = 2' O-methyl modified nucleoside
  modified_base 12: mod_base = OTHER; note = 2' O-methyl modified nucleoside
  modified_base 13: mod_base = OTHER; note = 2' O-methyl modified nucleoside
  modified_base 14: mod_base = OTHER; note = 2' fluoro-modified nucleoside
  modified_base 15: mod_base = OTHER; note = 2' O-methyl modified nucleoside
  modified_base 16: mod_base = OTHER; note = 2' fluoro-modified nucleoside
  modified_base 17: mod_base = OTHER; note = 2' O-methyl modified nucleoside
  modified_base 18: mod_base = OTHER; note = 2' fluoro-modified nucleoside
  modified_base 19: mod_base = OTHER; note = 2' O-methyl modified nucleoside
  modified_base 19..20: mod_base = OTHER; note = Phosphorothioate linkage
  modified_base 20: mod_base = OTHER; note = 2' O-methyl modified nucleoside
  modified_base 20..21: mod_base = OTHER; note = Phosphorothioate linkage
  modified_base 21: mod_base = OTHER; note = 2' O-methyl modified nucleoside
  source 1..21: mol_type = other RNA
tgcatctgtgagccgcgactt

SEQ ID NO: 11235 - RNA, 21 nt, synthetic construct
  misc_feature 1..21: note = Description of Artificial Sequence: Synthetic oligonucleotide
  modified_base 1: mod_base = OTHER; note = 2' O-methyl modified nucleoside
  modified_base 1..2: mod_base = OTHER; note = Phosphorothioate linkage
  modified_base 2: mod_base = OTHER; note = 2' fluoro-modified nucleoside
  modified_base 2..3: mod_base = OTHER; note = Phosphorothioate linkage
  modified_base 3: mod_base = OTHER; note = 2' O-methyl modified nucleoside
  modified_base 4: mod_base = OTHER; note = 2' fluoro-modified nucleoside
  modified_base 5: mod_base = OTHER; note = 2' O-methyl modified nucleoside
  modified_base 6: mod_base = OTHER; note = 2' fluoro-modified nucleoside
  modified_base 7: mod_base = OTHER; note = 2' O-methyl modified nucleoside
  modified_base 8: mod_base = OTHER; note = 2' fluoro-modified nucleoside
  modified_base 9: mod_base = OTHER; note = 2' O-methyl modified nucleoside
  modified_base 10: mod_base = OTHER; note = 2' fluoro-modified nucleoside
  modified_base 11: mod_base = OTHER; note = 2' O-methyl modified nucleoside
  modified_base 12: mod_base = OTHER; note = 2' O-methyl modified nucleoside
  modified_base 13: mod_base = OTHER; note = 2' O-methyl modified nucleoside
  modified_base 14: mod_base = OTHER; note = 2' fluoro-modified nucleoside
  modified_base 15: mod_base = OTHER; note = 2' O-methyl modified nucleoside
  modified_base 16: mod_base = OTHER; note = 2' fluoro-modified nucleoside
  modified_base 17: mod_base = OTHER; note = 2' O-methyl modified nucleoside
  modified_base 18: mod_base = OTHER; note = 2' fluoro-modified nucleoside
  modified_base 19: mod_base = OTHER; note = 2' O-methyl modified nucleoside
  modified_base 19..20: mod_base = OTHER; note = Phosphorothioate linkage
  modified_base 20: mod_base = OTHER; note = 2' O-methyl modified nucleoside
  modified_base 20..21: mod_base = OTHER; note = Phosphorothioate linkage
  modified_base 21: mod_base = OTHER; note = 2' O-methyl modified nucleoside
  source 1..21: mol_type = other RNA
tgaggtctgagtgaccgtctt

SEQ ID NO: 11236 - RNA, 21 nt, synthetic construct
  misc_feature 1..21: note = Description of Artificial Sequence: Synthetic oligonucleotide
  modified_base 1: mod_base = OTHER; note = 2' O-methyl modified nucleoside
  modified_base 1..2: mod_base = OTHER; note = Phosphorothioate linkage
  modified_base 2: mod_base = OTHER; note = 2' fluoro-modified nucleoside
  modified_base 2..3: mod_base = OTHER; note = Phosphorothioate linkage
  modified_base 3: mod_base = OTHER; note = 2' O-methyl modified nucleoside
  modified_base 4: mod_base = OTHER; note = 2' fluoro-modified nucleoside
  modified_base 5: mod_base = OTHER; note = 2' O-methyl modified nucleoside
  modified_base 6: mod_base = OTHER; note = 2' fluoro-modified nucleoside
  modified_base 7: mod_base = OTHER; note = 2' O-methyl modified nucleoside
  modified_base 8: mod_base = OTHER; note = 2' fluoro-modified nucleoside
  modified_base 9: mod_base = OTHER; note = 2' O-methyl modified nucleoside
  modified_base 10: mod_base = OTHER; note = 2' fluoro-modified nucleoside
  modified_base 11: mod_base = OTHER; note = 2' O-methyl modified nucleoside
  modified_base 12: mod_base = OTHER; note = 2' O-methyl modified nucleoside
  modified_base 13: mod_base = OTHER; note = 2' O-methyl modified nucleoside
  modified_base 14: mod_base = OTHER; note = 2' fluoro-modified nucleoside
  modified_base 15: mod_base = OTHER; note = 2' O-methyl modified nucleoside
  modified_base 16: mod_base = OTHER; note = 2' fluoro-modified nucleoside
  modified_base 17: mod_base = OTHER; note = 2' O-methyl modified nucleoside
  modified_base 18: mod_base = OTHER; note = 2' fluoro-modified nucleoside
  modified_base 19: mod_base = OTHER; note = 2' O-methyl modified nucleoside
  modified_base 19..20: mod_base = OTHER; note = Phosphorothioate linkage
  modified_base 20: mod_base = OTHER; note = 2' O-methyl modified nucleoside
  modified_base 20..21: mod_base = OTHER; note = Phosphorothioate linkage
  modified_base 21: mod_base = OTHER; note = 2' O-methyl modified nucleoside
  source 1..21: mol_type = other RNA
tcatctgcggaggtctgagtt

SEQ ID NO: 11237 - RNA, 21 nt, synthetic construct
  misc_feature 1..21: note = Description of Artificial Sequence: Synthetic oligonucleotide
  modified_base 1: mod_base = OTHER; note = 2' O-methyl modified nucleoside
  modified_base 1..2: mod_base = OTHER; note = Phosphorothioate linkage
  modified_base 2: mod_base = OTHER; note = 2' fluoro-modified nucleoside
  modified_base 2..3: mod_base = OTHER; note = Phosphorothioate linkage
  modified_base 3: mod_base = OTHER; note = 2' O-methyl modified nucleoside
  modified_base 4: mod_base = OTHER; note = 2' fluoro-modified nucleoside
  modified_base 5: mod_base = OTHER; note = 2' O-methyl modified nucleoside
  modified_base 6: mod_base = OTHER; note = 2' fluoro-modified nucleoside
  modified_base 7: mod_base = OTHER; note = 2' O-methyl modified nucleoside
  modified_base 8: mod_base = OTHER; note = 2' fluoro-modified nucleoside
  modified_base 9: mod_base = OTHER; note = 2' O-methyl modified nucleoside
  modified_base 10: mod_base = OTHER; note = 2' fluoro-modified nucleoside
  modified_base 11: mod_base = OTHER; note = 2' O-methyl modified nucleoside
  modified_base 12: mod_base = OTHER; note = 2' O-methyl modified nucleoside
  modified_base 13: mod_base = OTHER; note = 2' O-methyl modified nucleoside
  modified_base 14: mod_base = OTHER; note = 2' fluoro-modified nucleoside
  modified_base 15: mod_base = OTHER; note = 2' O-methyl modified nucleoside
  modified_base 16: mod_base = OTHER; note = 2' fluoro-modified nucleoside
  modified_base 17: mod_base = OTHER; note = 2' O-methyl modified nucleoside
  modified_base 18: mod_base = OTHER; note = 2' fluoro-modified nucleoside
  modified_base 19: mod_base = OTHER; note = 2' O-methyl modified nucleoside
  modified_base 19..20: mod_base = OTHER; note = Phosphorothioate linkage
  modified_base 20: mod_base = OTHER; note = 2' O-methyl modified nucleoside
  modified_base 20..21: mod_base = OTHER; note = Phosphorothioate linkage
  modified_base 21: mod_base = OTHER; note = 2' O-methyl modified nucleoside
  source 1..21: mol_type = other RNA
tgcatctgcggaggtctgatt

SEQ ID NO: 11238 - RNA, 21 nt, synthetic construct
  misc_feature 1..21: note = Description of Artificial Sequence: Synthetic oligonucleotide
  modified_base 1: mod_base = OTHER; note = 2' O-methyl modified nucleoside
  modified_base 1..2: mod_base = OTHER; note = Phosphorothioate linkage
  modified_base 2: mod_base = OTHER; note = 2' fluoro-modified nucleoside
  modified_base 2..3: mod_base = OTHER; note = Phosphorothioate linkage
  modified_base 3: mod_base = OTHER; note = 2' O-methyl modified nucleoside
  modified_base 4: mod_base = OTHER; note = 2' fluoro-modified nucleoside
  modified_base 5: mod_base = OTHER; note = 2' O-methyl modified nucleoside
  modified_base 6: mod_base = OTHER; note = 2' fluoro-modified nucleoside
  modified_base 7: mod_base = OTHER; note = 2' O-methyl modified nucleoside
  modified_base 8: mod_base = OTHER; note = 2' fluoro-modified nucleoside
  modified_base 9: mod_base = OTHER; note = 2' O-methyl modified nucleoside
  modified_base 10: mod_base = OTHER; note = 2' fluoro-modified nucleoside
  modified_base 11: mod_base = OTHER; note = 2' O-methyl modified nucleoside
  modified_base 12: mod_base = OTHER; note = 2' O-methyl modified nucleoside
  modified_base 13: mod_base = OTHER; note = 2' O-methyl modified nucleoside
  modified_base 14: mod_base = OTHER; note = 2' fluoro-modified nucleoside
  modified_base 15: mod_base = OTHER; note = 2' O-methyl modified nucleoside
  modified_base 16: mod_base = OTHER; note = 2' fluoro-modified nucleoside
  modified_base 17: mod_base = OTHER; note = 2' O-methyl modified nucleoside
  modified_base 18: mod_base = OTHER; note = 2' fluoro-modified nucleoside
  modified_base 19: mod_base = OTHER; note = 2' O-methyl modified nucleoside
  modified_base 19..20: mod_base = OTHER; note = Phosphorothioate linkage
  modified_base 20: mod_base = OTHER; note = 2' O-methyl modified nucleoside
  modified_base 20..21: mod_base = OTHER; note = Phosphorothioate linkage
  modified_base 21: mod_base = OTHER; note = 2' O-methyl modified nucleoside
  source 1..21: mol_type = other RNA
tagatggcatctgcggaggtt

SEQ ID NO: 11239 - RNA, 21 nt, synthetic construct
  misc_feature 1..21: note = Description of Artificial Sequence: Synthetic oligonucleotide
  modified_base 1: mod_base = OTHER; note = 2' O-methyl modified nucleoside
  modified_base 1..2: mod_base = OTHER; note = Phosphorothioate linkage
  modified_base 2: mod_base = OTHER; note = 2' fluoro-modified nucleoside
  modified_base 2..3: mod_base = OTHER; note = Phosphorothioate linkage
  modified_base 3: mod_base = OTHER; note = 2' O-methyl modified nucleoside
  modified_base 4: mod_base = OTHER; note = 2' fluoro-modified nucleoside
  modified_base 5: mod_base = OTHER; note = 2' O-methyl modified nucleoside
  modified_base 6: mod_base = OTHER; note = 2' fluoro-modified nucleoside
  modified_base 7: mod_base = OTHER; note = 2' O-methyl modified nucleoside
  modified_base 8: mod_base = OTHER; note = 2' fluoro-modified nucleoside
  modified_base 9: mod_base = OTHER; note = 2' O-methyl modified nucleoside
  modified_base 10: mod_base = OTHER; note = 2' fluoro-modified nucleoside
  modified_base 11: mod_base = OTHER; note = 2' O-methyl modified nucleoside
  modified_base 12: mod_base = OTHER; note = 2' O-methyl modified nucleoside
  modified_base 13: mod_base = OTHER; note = 2' O-methyl modified nucleoside
  modified_base 14: mod_base = OTHER; note = 2' fluoro-modified nucleoside
  modified_base 15: mod_base = OTHER; note = 2' O-methyl modified nucleoside
  modified_base 16: mod_base = OTHER; note = 2' fluoro-modified nucleoside
  modified_base 17: mod_base = OTHER; note = 2' O-methyl modified nucleoside
  modified_base 18: mod_base = OTHER; note = 2' fluoro-modified nucleoside
  modified_base 19: mod_base = OTHER; note = 2' O-methyl modified nucleoside
  modified_base 19..20: mod_base = OTHER; note = Phosphorothioate linkage
  modified_base 20: mod_base = OTHER; note = 2' O-methyl modified nucleoside
  modified_base 20..21: mod_base = OTHER; note = Phosphorothioate linkage
  modified_base 21: mod_base = OTHER; note = 2' O-methyl modified nucleoside
  source 1..21: mol_type = other RNA
ttagatggcatctgcggagtt

SEQ ID NO: 11240 - RNA, 21 nt, synthetic construct
  misc_feature 1..21: note = Description of Artificial Sequence: Synthetic oligonucleotide
  modified_base 1: mod_base = OTHER; note = 2' O-methyl modified nucleoside
  modified_base 1..2: mod_base = OTHER; note = Phosphorothioate linkage
  modified_base 2: mod_base = OTHER; note = 2' fluoro-modified nucleoside
  modified_base 2..3: mod_base = OTHER; note = Phosphorothioate linkage
  modified_base 3: mod_base = OTHER; note = 2' O-methyl modified nucleoside
  modified_base 4: mod_base = OTHER; note = 2' fluoro-modified nucleoside
  modified_base 5: mod_base = OTHER; note = 2' O-methyl modified nucleoside
  modified_base 6: mod_base = OTHER; note = 2' fluoro-modified nucleoside
  modified_base 7: mod_base = OTHER; note = 2' O-methyl modified nucleoside
  modified_base 8: mod_base = OTHER; note = 2' fluoro-modified nucleoside
  modified_base 9: mod_base = OTHER; note = 2' O-methyl modified nucleoside
  modified_base 10: mod_base = OTHER; note = 2' fluoro-modified nucleoside
  modified_base 11: mod_base = OTHER; note = 2' O-methyl modified nucleoside
  modified_base 12: mod_base = OTHER; note = 2' O-methyl modified nucleoside
  modified_base 13: mod_base = OTHER; note = 2' O-methyl modified nucleoside
  modified_base 14: mod_base = OTHER; note = 2' fluoro-modified nucleoside
  modified_base 15: mod_base = OTHER; note = 2' O-methyl modified nucleoside
  modified_base 16: mod_base = OTHER; note = 2' fluoro-modified nucleoside
  modified_base 17: mod_base = OTHER; note = 2' O-methyl modified nucleoside
  modified_base 18: mod_base = OTHER; note = 2' fluoro-modified nucleoside
  modified_base 19: mod_base = OTHER; note = 2' O-methyl modified nucleoside
  modified_base 19..20: mod_base = OTHER; note = Phosphorothioate linkage
  modified_base 20: mod_base = OTHER; note = 2' O-methyl modified nucleoside
  modified_base 20..21: mod_base = OTHER; note = Phosphorothioate linkage
  modified_base 21: mod_base = OTHER; note = 2' O-methyl modified nucleoside
  source 1..21: mol_type = other RNA
tcgtagatggcatctgcggtt

SEQ ID NO: 11241 - RNA, 21 nt, synthetic construct
  misc_feature 1..21: note = Description of Artificial Sequence: Synthetic oligonucleotide
  modified_base 1: mod_base = OTHER; note = 2' O-methyl modified nucleoside
  modified_base 1..2: mod_base = OTHER; note = Phosphorothioate linkage
  modified_base 2: mod_base = OTHER; note = 2' fluoro-modified nucleoside
  modified_base 2..3: mod_base = OTHER; note = Phosphorothioate linkage
  modified_base 3: mod_base = OTHER; note = 2' O-methyl modified nucleoside
  modified_base 4: mod_base = OTHER; note = 2' fluoro-modified nucleoside
  modified_base 5: mod_base = OTHER; note = 2' O-methyl modified nucleoside
  modified_base 6: mod_base = OTHER; note = 2' fluoro-modified nucleoside
  modified_base 7: mod_base = OTHER; note = 2' O-methyl modified nucleoside
  modified_base 8: mod_base = OTHER; note = 2' fluoro-modified nucleoside
  modified_base 9: mod_base = OTHER; note = 2' O-methyl modified nucleoside
  modified_base 10: mod_base = OTHER; note = 2' fluoro-modified nucleoside
  modified_base 11: mod_base = OTHER; note = 2' O-methyl modified nucleoside
  modified_base 12: mod_base = OTHER; note = 2' O-methyl modified nucleoside
  modified_base 13: mod_base = OTHER; note = 2' O-methyl modified nucleoside
  modified_base 14: mod_base = OTHER; note = 2' fluoro-modified nucleoside
  modified_base 15: mod_base = OTHER; note = 2' O-methyl modified nucleoside
  modified_base 16: mod_base = OTHER; note = 2' fluoro-modified nucleoside
  modified_base 17: mod_base = OTHER; note = 2' O-methyl modified nucleoside
  modified_base 18: mod_base = OTHER; note = 2' fluoro-modified nucleoside
  modified_base 19: mod_base = OTHER; note = 2' O-methyl modified nucleoside
  modified_base 19..20: mod_base = OTHER; note = Phosphorothioate linkage
  modified_base 20: mod_base = OTHER; note = 2' O-methyl modified nucleoside
  modified_base 20..21: mod_base = OTHER; note = Phosphorothioate linkage
  modified_base 21: mod_base = OTHER; note = 2' O-methyl modified nucleoside
  source 1..21: mol_type = other RNA
tcagtcgtagatggcatcttt

SEQ ID NO: 11242 - RNA, 21 nt, synthetic construct
  misc_feature 1..21: note = Description of Artificial Sequence: Synthetic oligonucleotide
  modified_base 1: mod_base = OTHER; note = 2' O-methyl modified nucleoside
  modified_base 1..2: mod_base = OTHER; note = Phosphorothioate linkage
  modified_base 2: mod_base = OTHER; note = 2' fluoro-modified nucleoside
  modified_base 2..3: mod_base = OTHER; note = Phosphorothioate linkage
  modified_base 3: mod_base = OTHER; note = 2' O-methyl modified nucleoside
  modified_base 4: mod_base = OTHER; note = 2' fluoro-modified nucleoside
  modified_base 5: mod_base = OTHER; note = 2' O-methyl modified nucleoside
  modified_base 6: mod_base = OTHER; note = 2' fluoro-modified nucleoside
  modified_base 7: mod_base = OTHER; note = 2' O-methyl modified nucleoside
  modified_base 8: mod_base = OTHER; note = 2' fluoro-modified nucleoside
  modified_base 9: mod_base = OTHER; note = 2' O-methyl modified nucleoside
  modified_base 10: mod_base = OTHER; note = 2' fluoro-modified nucleoside
  modified_base 11: mod_base = OTHER; note = 2' O-methyl modified nucleoside
  modified_base 12: mod_base = OTHER; note = 2' O-methyl modified nucleoside
  modified_base 13: mod_base = OTHER; note = 2' O-methyl modified nucleoside
  modified_base 14: mod_base = OTHER; note = 2' fluoro-modified nucleoside
  modified_base 15: mod_base = OTHER; note = 2' O-methyl modified nucleoside
  modified_base 16: mod_base = OTHER; note = 2' fluoro-modified nucleoside
  modified_base 17: mod_base = OTHER; note = 2' O-methyl modified nucleoside
  modified_base 18: mod_base = OTHER; note = 2' fluoro-modified nucleoside
  modified_base 19: mod_base = OTHER; note = 2' O-methyl modified nucleoside
  modified_base 19..20: mod_base = OTHER; note = Phosphorothioate linkage
  modified_base 20: mod_base = OTHER; note = 2' O-methyl modified nucleoside
  modified_base 20..21: mod_base = OTHER; note = Phosphorothioate linkage
  modified_base 21: mod_base = OTHER; note = 2' O-methyl modified nucleoside
  source 1..21: mol_type = other RNA
tgcagtcgtagatggcatctt

SEQ ID NO: 11243 - RNA, 21 nt, synthetic construct
  misc_feature 1..21: note = Description of Artificial Sequence: Synthetic oligonucleotide
  modified_base 1: mod_base = OTHER; note = 2' O-methyl modified nucleoside
  modified_base 1..2: mod_base = OTHER; note = Phosphorothioate linkage
  modified_base 2: mod_base = OTHER; note = 2' fluoro-modified nucleoside
  modified_base 2..3: mod_base = OTHER; note = Phosphorothioate linkage
  modified_base 3: mod_base = OTHER; note = 2' O-methyl modified nucleoside
  modified_base 4: mod_base = OTHER; note = 2' fluoro-modified nucleoside
  modified_base 5: mod_base = OTHER; note = 2' O-methyl modified nucleoside
  modified_base 6: mod_base = OTHER; note = 2' fluoro-modified nucleoside
  modified_base 7: mod_base = OTHER; note = 2' O-methyl modified nucleoside
  modified_base 8: mod_base = OTHER; note = 2' fluoro-modified nucleoside
  modified_base 9: mod_base = OTHER; note = 2' O-methyl modified nucleoside
  modified_base 10: mod_base = OTHER; note = 2' fluoro-modified nucleoside
  modified_base 11: mod_base = OTHER; note = 2' O-methyl modified nucleoside
  modified_base 12: mod_base = OTHER; note = 2' O-methyl modified nucleoside
  modified_base 13: mod_base = OTHER; note = 2' O-methyl modified nucleoside
  modified_base 14: mod_base = OTHER; note = 2' fluoro-modified nucleoside
  modified_base 15: mod_base = OTHER; note = 2' O-methyl modified nucleoside
  modified_base 16: mod_base = OTHER; note = 2' fluoro-modified nucleoside
  modified_base 17: mod_base = OTHER; note = 2' O-methyl modified nucleoside
  modified_base 18: mod_base = OTHER; note = 2' fluoro-modified nucleoside
  modified_base 19: mod_base = OTHER; note = 2' O-methyl modified nucleoside
  modified_base 19..20: mod_base = OTHER; note = Phosphorothioate linkage
  modified_base 20: mod_base = OTHER; note = 2' O-methyl modified nucleoside
  modified_base 20..21: mod_base = OTHER; note = Phosphorothioate linkage
  modified_base 21: mod_base = OTHER; note = 2' O-methyl modified nucleoside
  source 1..21: mol_type = other RNA
taagagcagtcgtagatggtt

SEQ ID NO: 11244 - RNA, 21 nt, synthetic construct
  misc_feature 1..21: note = Description of Artificial Sequence: Synthetic oligonucleotide
  modified_base 1: mod_base = OTHER; note = 2' O-methyl modified nucleoside
  modified_base 1..2: mod_base = OTHER; note = Phosphorothioate linkage
  modified_base 2: mod_base = OTHER; note = 2' fluoro-modified nucleoside
  modified_base 2..3: mod_base = OTHER; note = Phosphorothioate linkage
  modified_base 3: mod_base = OTHER; note = 2' O-methyl modified nucleoside
  modified_base 4: mod_base = OTHER; note = 2' fluoro-modified nucleoside
  modified_base 5: mod_base = OTHER; note = 2' O-methyl modified nucleoside
  modified_base 6: mod_base = OTHER; note = 2' fluoro-modified nucleoside
  modified_base 7: mod_base = OTHER; note = 2' O-methyl modified nucleoside
  modified_base 8: mod_base = OTHER; note = 2' fluoro-modified nucleoside
  modified_base 9: mod_base = OTHER; note = 2' O-methyl modified nucleoside
  modified_base 10: mod_base = OTHER; note = 2' fluoro-modified nucleoside
  modified_base 11: mod_base = OTHER; note = 2' O-methyl modified nucleoside
  modified_base 12: mod_base = OTHER; note = 2' O-methyl modified nucleoside
  modified_base 13: mod_base = OTHER; note = 2' O-methyl modified nucleoside
  modified_base 14: mod_base = OTHER; note = 2' fluoro-modified nucleoside
  modified_base 15: mod_base = OTHER; note = 2' O-methyl modified nucleoside
  modified_base 16: mod_base = OTHER; note = 2' fluoro-modified nucleoside
  modified_base 17: mod_base = OTHER; note = 2' O-methyl modified nucleoside
  modified_base 18: mod_base = OTHER; note = 2' fluoro-modified nucleoside
  modified_base 19: mod_base = OTHER; note = 2' O-methyl modified nucleoside
  modified_base 19..20: mod_base = OTHER; note = Phosphorothioate linkage
  modified_base 20: mod_base = OTHER; note = 2' O-methyl modified nucleoside
  modified_base 20..21: mod_base = OTHER; note = Phosphorothioate linkage
  modified_base 21: mod_base = OTHER; note = 2' O-methyl modified nucleoside
  source 1..21: mol_type = other RNA
tgaagagcagtcgtagatgtt

SEQ ID NO: 11245 - RNA, 21 nt, synthetic construct
  misc_feature 1..21: note = Description of Artificial Sequence: Synthetic oligonucleotide
  modified_base 1: mod_base = OTHER; note = 2' O-methyl modified nucleoside
  modified_base 1..2: mod_base = OTHER; note = Phosphorothioate linkage
  modified_base 2: mod_base = OTHER; note = 2' fluoro-modified nucleoside
  modified_base 2..3: mod_base = OTHER; note = Phosphorothioate linkage
  modified_base 3: mod_base = OTHER; note = 2' O-methyl modified nucleoside
  modified_base 4: mod_base = OTHER; note = 2' fluoro-modified nucleoside
  modified_base 5: mod_base = OTHER; note = 2' O-methyl modified nucleoside
  modified_base 6: mod_base = OTHER; note = 2' fluoro-modified nucleoside
  modified_base 7: mod_base = OTHER; note = 2' O-methyl modified nucleoside
  modified_base 8: mod_base = OTHER; note = 2' fluoro-modified nucleoside
  modified_base 9: mod_base = OTHER; note = 2' O-methyl modified nucleoside
  modified_base 10: mod_base = OTHER; note = 2' fluoro-modified nucleoside
  modified_base 11: mod_base = OTHER; note = 2' O-methyl modified nucleoside
  modified_base 12: mod_base = OTHER; note = 2' O-methyl modified nucleoside
  modified_base 13: mod_base = OTHER; note = 2' O-methyl modified nucleoside
  modified_base 14: mod_base = OTHER; note = 2' fluoro-modified nucleoside
  modified_base 15: mod_base = OTHER; note = 2' O-methyl modified nucleoside
  modified_base 16: mod_base = OTHER; note = 2' fluoro-modified nucleoside
  modified_base 17: mod_base = OTHER; note = 2' O-methyl modified nucleoside
  modified_base 18: mod_base = OTHER; note = 2' fluoro-modified nucleoside
  modified_base 19: mod_base = OTHER; note = 2' O-methyl modified nucleoside
  modified_base 19..20: mod_base = OTHER; note = Phosphorothioate linkage
  modified_base 20: mod_base = OTHER; note = 2' O-methyl modified nucleoside
  modified_base 20..21: mod_base = OTHER; note = Phosphorothioate linkage
  modified_base 21: mod_base = OTHER; note = 2' O-methyl modified nucleoside
  source 1..21: mol_type = other RNA
ttgcggtagttcttctggttt

SEQ ID NO: 11246 - RNA, 21 nt, synthetic construct
  misc_feature 1..21: note = Description of Artificial Sequence: Synthetic oligonucleotide
  modified_base 1: mod_base = OTHER; note = 2' O-methyl modified nucleoside
  modified_base 1..2: mod_base = OTHER; note = Phosphorothioate linkage
  modified_base 2: mod_base = OTHER; note = 2' fluoro-modified nucleoside
  modified_base 2..3: mod_base = OTHER; note = Phosphorothioate linkage
  modified_base 3: mod_base = OTHER; note = 2' O-methyl modified nucleoside
  modified_base 4: mod_base = OTHER; note = 2' fluoro-modified nucleoside
  modified_base 5: mod_base = OTHER; note = 2' O-methyl modified nucleoside
  modified_base 6: mod_base = OTHER; note = 2' fluoro-modified nucleoside
  modified_base 7: mod_base = OTHER; note = 2' O-methyl modified nucleoside
  modified_base 8: mod_base = OTHER; note = 2' fluoro-modified nucleoside
  modified_base 9: mod_base = OTHER; note = 2' O-methyl modified nucleoside
  modified_base 10: mod_base = OTHER; note = 2' fluoro-modified nucleoside
  modified_base 11: mod_base = OTHER; note = 2' O-methyl modified nucleoside
  modified_base 12: mod_base = OTHER; note = 2' O-methyl modified nucleoside
  modified_base 13: mod_base = OTHER; note = 2' O-methyl modified nucleoside
  modified_base 14: mod_base = OTHER; note = 2' fluoro-modified nucleoside
  modified_base 15: mod_base = OTHER; note = 2' O-methyl modified nucleoside
  modified_base 16: mod_base = OTHER; note = 2' fluoro-modified nucleoside
  modified_base 17: mod_base = OTHER; note = 2' O-methyl modified nucleoside
  modified_base 18: mod_base = OTHER; note = 2' fluoro-modified nucleoside
  modified_base 19: mod_base = OTHER; note = 2' O-methyl modified nucleoside
  modified_base 19..20: mod_base = OTHER; note = Phosphorothioate linkage
  modified_base 20: mod_base = OTHER; note = 2' O-methyl modified nucleoside
  modified_base 20..21: mod_base = OTHER; note = Phosphorothioate linkage
  modified_base 21: mod_base = OTHER; note = 2' O-methyl modified nucleoside
  source 1..21: mol_type = other RNA
tatgcggtagttcttctggtt

SEQ ID NO: 11247 - RNA, 21 nt, synthetic construct
  misc_feature 1..21: note = Description of Artificial Sequence: Synthetic oligonucleotide
  modified_base 1: mod_base = OTHER; note = 2' O-methyl modified nucleoside
  modified_base 1..2: mod_base = OTHER; note = Phosphorothioate linkage
  modified_base 2: mod_base = OTHER; note = 2' fluoro-modified nucleoside
  modified_base 2..3: mod_base = OTHER; note = Phosphorothioate linkage
  modified_base 3: mod_base = OTHER; note = 2' O-methyl modified nucleoside
  modified_base 4: mod_base = OTHER; note = 2' fluoro-modified nucleoside
  modified_base 5: mod_base = OTHER; note = 2' O-methyl modified nucleoside
  modified_base 6: mod_base = OTHER; note = 2' fluoro-modified nucleoside
  modified_base 7: mod_base = OTHER; note = 2' O-methyl modified nucleoside
  modified_base 8: mod_base = OTHER; note = 2' fluoro-modified nucleoside
  modified_base 9: mod_base = OTHER; note = 2' O-methyl modified nucleoside
  modified_base 10: mod_base = OTHER; note = 2' fluoro-modified nucleoside
  modified_base 11: mod_base = OTHER; note = 2' O-methyl modified nucleoside
  modified_base 12: mod_base = OTHER; note = 2' O-methyl modified nucleoside
  modified_base 13: mod_base = OTHER; note = 2' O-methyl modified nucleoside
  modified_base 14: mod_base = OTHER; note = 2' fluoro-modified nucleoside
  modified_base 15: mod_base = OTHER; note = 2' O-methyl modified nucleoside
  modified_base 16: mod_base = OTHER; note = 2' fluoro-modified nucleoside
  modified_base 17: mod_base = OTHER; note = 2' O-methyl modified nucleoside
  modified_base 18: mod_base = OTHER; note = 2' fluoro-modified nucleoside
  modified_base 19: mod_base = OTHER; note = 2' O-methyl modified nucleoside
  modified_base 19..20: mod_base = OTHER; note = Phosphorothioate linkage
  modified_base 20: mod_base = OTHER; note = 2' O-methyl modified nucleoside
  modified_base 20..21: mod_base = OTHER; note = Phosphorothioate linkage
  modified_base 21: mod_base = OTHER; note = 2' O-methyl modified nucleoside
  source 1..21: mol_type = other RNA
tccagagatgcggtagttctt

SEQ ID NO: 11248 - RNA, 21 nt, synthetic construct
  misc_feature 1..21: note = Description of Artificial Sequence: Synthetic oligonucleotide
  modified_base 1: mod_base = OTHER; note = 2' O-methyl modified nucleoside
  modified_base 1..2: mod_base = OTHER; note = Phosphorothioate linkage
  modified_base 2: mod_base = OTHER; note = 2' fluoro-modified nucleoside
  modified_base 2..3: mod_base = OTHER; note = Phosphorothioate linkage
  modified_base 3: mod_base = OTHER; note = 2' O-methyl modified nucleoside
  modified_base 4: mod_base = OTHER; note = 2' fluoro-modified nucleoside
  modified_base 5: mod_base = OTHER; note = 2' O-methyl modified nucleoside
  modified_base 6: mod_base = OTHER; note = 2' fluoro-modified nucleoside
  modified_base 7: mod_base = OTHER; note = 2' O-methyl modified nucleoside
  modified_base 8: mod_base = OTHER; note = 2' fluoro-modified nucleoside
  modified_base 9: mod_base = OTHER; note = 2' O-methyl modified nucleoside
  modified_base 10: mod_base = OTHER; note = 2' fluoro-modified nucleoside
  modified_base 11: mod_base = OTHER; note = 2' O-methyl modified nucleoside
  modified_base 12: mod_base = OTHER; note = 2' O-methyl modified nucleoside
  modified_base 13: mod_base = OTHER; note = 2' O-methyl modified nucleoside
  modified_base 14: mod_base = OTHER; note = 2' fluoro-modified nucleoside
  modified_base 15: mod_base = OTHER; note = 2' O-methyl modified nucleoside
  modified_base 16: mod_base = OTHER; note = 2' fluoro-modified nucleoside
  modified_base 17: mod_base = OTHER; note = 2' O-methyl modified nucleoside
  modified_base 18: mod_base = OTHER; note = 2' fluoro-modified nucleoside
  modified_base 19: mod_base = OTHER; note = 2' O-methyl modified nucleoside
  modified_base 19..20: mod_base = OTHER; note = Phosphorothioate linkage
  modified_base 20: mod_base = OTHER; note = 2' O-methyl modified nucleoside
  modified_base 20..21: mod_base = OTHER; note = Phosphorothioate linkage
  modified_base 21: mod_base = OTHER; note = 2' O-methyl modified nucleoside
  source 1..21: mol_type = other RNA
ttacactccagagatgcggtt

SEQ ID NO: 11249 - RNA, 21 nt, synthetic construct
  misc_feature 1..21: note = Description of Artificial Sequence: Synthetic oligonucleotide
  modified_base 1: mod_base = OTHER; note = 2' O-methyl modified nucleoside
  modified_base 1..2: mod_base = OTHER; note = Phosphorothioate linkage
  modified_base 2: mod_base = OTHER; note = 2' fluoro-modified nucleoside
  modified_base 2..3: mod_base = OTHER; note = Phosphorothioate linkage
  modified_base 3: mod_base = OTHER; note = 2' O-methyl modified nucleoside
  modified_base 4: mod_base = OTHER; note = 2' fluoro-modified nucleoside
  modified_base 5: mod_base = OTHER; note = 2' O-methyl modified nucleoside
  modified_base 6: mod_base = OTHER; note = 2' fluoro-modified nucleoside
  modified_base 7: mod_base = OTHER; note = 2' O-methyl modified nucleoside
  modified_base 8: mod_base = OTHER; note = 2' fluoro-modified nucleoside
  modified_base 9: mod_base = OTHER; note = 2' O-methyl modified nucleoside
  modified_base 10: mod_base = OTHER; note = 2' fluoro-modified nucleoside
  modified_base 11: mod_base = OTHER; note = 2' O-methyl modified nucleoside
  modified_base 12: mod_base = OTHER; note = 2' O-methyl modified nucleoside
  modified_base 13: mod_base = OTHER; note = 2' O-methyl modified nucleoside
  modified_base 14: mod_base = OTHER; note = 2' fluoro-modified nucleoside
  modified_base 15: mod_base = OTHER; note = 2' O-methyl modified nucleoside
  modified_base 16: mod_base = OTHER; note = 2' fluoro-modified nucleoside
  modified_base 17: mod_base = OTHER; note = 2' O-methyl modified nucleoside
  modified_base 18: mod_base = OTHER; note = 2' fluoro-modified nucleoside
  modified_base 19: mod_base = OTHER; note = 2' O-methyl modified nucleoside
  modified_base 19..20: mod_base = OTHER; note = Phosphorothioate linkage
  modified_base 20: mod_base = OTHER; note = 2' O-methyl modified nucleoside
  modified_base 20..21: mod_base = OTHER; note = Phosphorothioate linkage
  modified_base 21: mod_base = OTHER; note = 2' O-methyl modified nucleoside
  source 1..21: mol_type = other RNA
tttatacactccagagatgtt

SEQ ID NO: 11250 - RNA, 21 nt, synthetic construct
  misc_feature 1..21: note = Description of Artificial Sequence: Synthetic oligonucleotide
  modified_base 1: mod_base = OTHER; note = 2' O-methyl modified nucleoside
  modified_base 1..2: mod_base = OTHER; note = Phosphorothioate linkage
  modified_base 2: mod_base = OTHER; note = 2' fluoro-modified nucleoside
  modified_base 2..3: mod_base = OTHER; note = Phosphorothioate linkage
  modified_base 3: mod_base = OTHER; note = 2' O-methyl modified nucleoside
  modified_base 4: mod_base = OTHER; note = 2' fluoro-modified nucleoside
  modified_base 5: mod_base = OTHER; note = 2' O-methyl modified nucleoside
  modified_base 6: mod_base = OTHER; note = 2' fluoro-modified nucleoside
  modified_base 7: mod_base = OTHER; note = 2' O-methyl modified nucleoside
  modified_base 8: mod_base = OTHER; note = 2' fluoro-modified nucleoside
  modified_base 9: mod_base = OTHER; note = 2' O-methyl modified nucleoside
  modified_base 10: mod_base = OTHER; note = 2' fluoro-modified nucleoside
  modified_base 11: mod_base = OTHER; note = 2' O-methyl modified nucleoside
  modified_base 12: mod_base = OTHER; note = 2' O-methyl modified nucleoside
  modified_base 13: mod_base = OTHER; note = 2' O-methyl modified nucleoside
  modified_base 14: mod_base = OTHER; note = 2' fluoro-modified nucleoside
  modified_base 15: mod_base = OTHER; note = 2' O-methyl modified nucleoside
  modified_base 16: mod_base = OTHER; note = 2' fluoro-modified nucleoside
  modified_base 17: mod_base = OTHER; note = 2' O-methyl modified nucleoside
  modified_base 18: mod_base = OTHER; note = 2' fluoro-modified nucleoside
  modified_base 19: mod_base = OTHER; note = 2' O-methyl modified nucleoside
  modified_base 19..20: mod_base = OTHER; note = Phosphorothioate linkage
  modified_base 20: mod_base = OTHER; note = 2' O-methyl modified nucleoside
  modified_base 20..21: mod_base = OTHER; note = Phosphorothioate linkage
  modified_base 21: mod_base = OTHER; note = 2' O-methyl modified nucleoside
  source 1..21: mol_type = other RNA
tcttatacactccagagattt

SEQ ID NO: 11251 - RNA, 21 nt, synthetic construct
  misc_feature 1..21: note = Description of Artificial Sequence: Synthetic oligonucleotide
  modified_base 1: mod_base = OTHER; note = 2' O-methyl modified nucleoside
  modified_base 1..2: mod_base = OTHER; note = Phosphorothioate linkage
  modified_base 2: mod_base = OTHER; note = 2' fluoro-modified nucleoside
  modified_base 2..3: mod_base = OTHER; note = Phosphorothioate linkage
  modified_base 3: mod_base = OTHER; note = 2' O-methyl modified nucleoside
  modified_base 4: mod_base = OTHER; note = 2' fluoro-modified nucleoside
  modified_base 5: mod_base = OTHER; note = 2' O-methyl modified nucleoside
  modified_base 6: mod_base = OTHER; note = 2' fluoro-modified nucleoside
  modified_base 7: mod_base = OTHER; note = 2' O-methyl modified nucleoside
  modified_base 8: mod_base = OTHER; note = 2' fluoro-modified nucleoside
  modified_base 9: mod_base = OTHER; note = 2' O-methyl modified nucleoside
  modified_base 10: mod_base = OTHER; note = 2' fluoro-modified nucleoside
  modified_base 11: mod_base = OTHER; note = 2' O-methyl modified nucleoside
  modified_base 12: mod_base = OTHER; note = 2' O-methyl modified nucleoside
  modified_base 13: mod_base = OTHER; note = 2' O-methyl modified nucleoside
  modified_base 14: mod_base = OTHER; note = 2' fluoro-modified nucleoside
  modified_base 15: mod_base = OTHER; note = 2' O-methyl modified nucleoside
  modified_base 16: mod_base = OTHER; note = 2' fluoro-modified nucleoside
  modified_base 17: mod_base = OTHER; note = 2' O-methyl modified nucleoside
  modified_base 18: mod_base = OTHER; note = 2' fluoro-modified nucleoside
  modified_base 19: mod_base = OTHER; note = 2' O-methyl modified nucleoside
  modified_base 19..20: mod_base = OTHER; note = Phosphorothioate linkage
  modified_base 20: mod_base = OTHER; note = 2' O-methyl modified nucleoside
  modified_base 20..21: mod_base = OTHER; note = Phosphorothioate linkage
  modified_base 21: mod_base = OTHER; note = 2' O-methyl modified nucleoside
  source 1..21: mol_type = other RNA
ttcgtctctggatgatggttt

SEQ ID NO: 11252 - RNA, 21 nt, synthetic construct
  misc_feature 1..21: note = Description of Artificial Sequence: Synthetic oligonucleotide
  modified_base 1: mod_base = OTHER; note = 2' O-methyl modified nucleoside
  modified_base 1..2: mod_base = OTHER; note = Phosphorothioate linkage
  modified_base 2: mod_base = OTHER; note = 2' fluoro-modified nucleoside
  modified_base 2..3: mod_base = OTHER; note = Phosphorothioate linkage
  modified_base 3: mod_base = OTHER; note = 2' O-methyl modified nucleoside
  modified_base 4: mod_base = OTHER; note = 2' fluoro-modified nucleoside
  modified_base 5: mod_base = OTHER; note = 2' O-methyl modified nucleoside
  modified_base 6: mod_base = OTHER; note = 2' fluoro-modified nucleoside
  modified_base 7: mod_base = OTHER; note = 2' O-methyl modified nucleoside
  modified_base 8: mod_base = OTHER; note = 2' fluoro-modified nucleoside
  modified_base 9: mod_base = OTHER; note = 2' O-methyl modified nucleoside
  modified_base 10: mod_base = OTHER; note = 2' fluoro-modified nucleoside
  modified_base 11: mod_base = OTHER; note = 2' O-methyl modified nucleoside
  modified_base 12: mod_base = OTHER; note = 2' O-methyl modified nucleoside
  modified_base 13: mod_base = OTHER; note = 2' O-methyl modified nucleoside
  modified_base 14: mod_base = OTHER; note = 2' fluoro-modified nucleoside
  modified_base 15: mod_base = OTHER; note = 2' O-methyl modified nucleoside
  modified_base 16: mod_base = OTHER; note = 2' fluoro-modified nucleoside
  modified_base 17: mod_base = OTHER; note = 2' O-methyl modified nucleoside
  modified_base 18: mod_base = OTHER; note = 2' fluoro-modified nucleoside
  modified_base 19: mod_base = OTHER; note = 2' O-methyl modified nucleoside
  modified_base 19..20: mod_base = OTHER; note = Phosphorothioate linkage
  modified_base 20: mod_base = OTHER; note = 2' O-methyl modified nucleoside
  modified_base 20..21: mod_base = OTHER; note = Phosphorothioate linkage
  modified_base 21: mod_base = OTHER; note = 2' O-methyl modified nucleoside
  source 1..21: mol_type = other RNA
tttcgtctctggatgatggtt

SEQ ID NO: 11253 - RNA, 21 nt, synthetic construct
  misc_feature 1..21: note = Description of Artificial Sequence: Synthetic oligonucleotide
  modified_base 1: mod_base = OTHER; note = 2' O-methyl modified nucleoside
  modified_base 1..2: mod_base = OTHER; note = Phosphorothioate linkage
  modified_base 2: mod_base = OTHER; note = 2' fluoro-modified nucleoside
  modified_base 2..3: mod_base = OTHER; note = Phosphorothioate linkage
  modified_base 3: mod_base = OTHER; note = 2' O-methyl modified nucleoside
  modified_base 4: mod_base = OTHER; note = 2' fluoro-modified nucleoside
  modified_base 5: mod_base = OTHER; note = 2' O-methyl modified nucleoside
  modified_base 6: mod_base = OTHER; note = 2' fluoro-modified nucleoside
  modified_base 7: mod_base = OTHER; note = 2' O-methyl modified nucleoside
  modified_base 8: mod_base = OTHER; note = 2' fluoro-modified nucleoside
  modified_base 9: mod_base = OTHER; note = 2' O-methyl modified nucleoside
  modified_base 10: mod_base = OTHER; note = 2' fluoro-modified nucleoside
  modified_base 11: mod_base = OTHER; note = 2' O-methyl modified nucleoside
  modified_base 12: mod_base = OTHER; note = 2' O-methyl modified nucleoside
  modified_base 13: mod_base = OTHER; note = 2' O-methyl modified nucleoside
  modified_base 14: mod_base = OTHER; note = 2' fluoro-modified nucleoside
  modified_base 15: mod_base = OTHER; note = 2' O-methyl modified nucleoside
  modified_base 16: mod_base = OTHER; note = 2' fluoro-modified nucleoside
  modified_base 17: mod_base = OTHER; note = 2' O-methyl modified nucleoside
  modified_base 18: mod_base = OTHER; note = 2' fluoro-modified nucleoside
  modified_base 19: mod_base = OTHER; note = 2' O-methyl modified nucleoside
  modified_base 19..20: mod_base = OTHER; note = Phosphorothioate linkage
  modified_base 20: mod_base = OTHER; note = 2' O-methyl modified nucleoside
  modified_base 20..21: mod_base = OTHER; note = Phosphorothioate linkage
  modified_base 21: mod_base = OTHER; note = 2' O-methyl modified nucleoside
  source 1..21: mol_type = other RNA
ttttcgtctctggatgatgtt

SEQ ID NO: 11254 - RNA, 21 nt, synthetic construct
  misc_feature 1..21: note = Description of Artificial Sequence: Synthetic oligonucleotide
  modified_base 1: mod_base = OTHER; note = 2' O-methyl modified nucleoside
  modified_base 1..2: mod_base = OTHER; note = Phosphorothioate linkage
  modified_base 2: mod_base = OTHER; note = 2' fluoro-modified nucleoside
  modified_base 2..3: mod_base = OTHER; note = Phosphorothioate linkage
  modified_base 3: mod_base = OTHER; note = 2' O-methyl modified nucleoside
  modified_base 4: mod_base = OTHER; note = 2' fluoro-modified nucleoside
  modified_base 5: mod_base = OTHER; note = 2' O-methyl modified nucleoside
  modified_base 6: mod_base = OTHER; note = 2' fluoro-modified nucleoside
  modified_base 7: mod_base = OTHER; note = 2' O-methyl modified nucleoside
  modified_base 8: mod_base = OTHER; note = 2' fluoro-modified nucleoside
  modified_base 9: mod_base = OTHER; note = 2' O-methyl modified nucleoside
  modified_base 10: mod_base = OTHER; note = 2' fluoro-modified nucleoside
  modified_base 11: mod_base = OTHER; note = 2' O-methyl modified nucleoside
  modified_base 12: mod_base = OTHER; note = 2' O-methyl modified nucleoside
  modified_base 13: mod_base = OTHER; note = 2' O-methyl modified nucleoside
  modified_base 14: mod_base = OTHER; note = 2' fluoro-modified nucleoside
  modified_base 15: mod_base = OTHER; note = 2' O-methyl modified nucleoside
  modified_base 16: mod_base = OTHER; note = 2' fluoro-modified nucleoside
  modified_base 17: mod_base = OTHER; note = 2' O-methyl modified nucleoside
  modified_base 18: mod_base = OTHER; note = 2' fluoro-modified nucleoside
  modified_base 19: mod_base = OTHER; note = 2' O-methyl modified nucleoside
  modified_base 19..20: mod_base = OTHER; note = Phosphorothioate linkage
  modified_base 20: mod_base = OTHER; note = 2' O-methyl modified nucleoside
  modified_base 20..21: mod_base = OTHER; note = Phosphorothioate linkage
  modified_base 21: mod_base = OTHER; note = 2' O-methyl modified nucleoside
  source 1..21: mol_type = other RNA
tttttcgtctctggatgattt

SEQ ID NO: 11255 - RNA, 21 nt, synthetic construct
  misc_feature 1..21: note = Description of Artificial Sequence: Synthetic oligonucleotide
  modified_base 1: mod_base = OTHER; note = 2' O-methyl modified nucleoside
  modified_base 1..2: mod_base = OTHER; note = Phosphorothioate linkage
  modified_base 2: mod_base = OTHER; note = 2' fluoro-modified nucleoside
  modified_base 2..3: mod_base = OTHER; note = Phosphorothioate linkage
  modified_base 3: mod_base = OTHER; note = 2' O-methyl modified nucleoside
  modified_base 4: mod_base = OTHER; note = 2' fluoro-modified nucleoside
  modified_base 5: mod_base = OTHER; note = 2' O-methyl modified nucleoside
  modified_base 6: mod_base = OTHER; note = 2' fluoro-modified nucleoside
  modified_base 7: mod_base = OTHER; note = 2' O-methyl modified nucleoside
  modified_base 8: mod_base = OTHER; note = 2' fluoro-modified nucleoside
  modified_base 9: mod_base = OTHER; note = 2' O-methyl modified nucleoside
  modified_base 10: mod_base = OTHER; note = 2' fluoro-modified nucleoside
  modified_base 11: mod_base = OTHER; note = 2' O-methyl modified nucleoside
  modified_base 12: mod_base = OTHER; note = 2' O-methyl modified nucleoside
  modified_base 13: mod_base = OTHER; note = 2' O-methyl modified nucleoside
  modified_base 14: mod_base = OTHER; note = 2' fluoro-modified nucleoside
  modified_base 15: mod_base = OTHER; note = 2' O-methyl modified nucleoside
  modified_base 16: mod_base = OTHER; note = 2' fluoro-modified nucleoside
  modified_base 17: mod_base = OTHER; note = 2' O-methyl modified nucleoside
  modified_base 18: mod_base = OTHER; note = 2' fluoro-modified nucleoside
  modified_base 19: mod_base = OTHER; note = 2' O-methyl modified nucleoside
  modified_base 19..20: mod_base = OTHER; note = Phosphorothioate linkage
  modified_base 20: mod_base = OTHER; note = 2' O-methyl modified nucleoside
  modified_base 20..21: mod_base = OTHER; note = Phosphorothioate linkage
  modified_base 21: mod_base = OTHER; note = 2' O-methyl modified nucleoside
  source 1..21: mol_type = other RNA
ttttttcgtctctggatgatt

SEQ ID NO: 11256 - RNA, 21 nt, synthetic construct
  misc_feature 1..21: note = Description of Artificial Sequence: Synthetic oligonucleotide
  modified_base 1: mod_base = OTHER; note = 2' O-methyl modified nucleoside
  modified_base 1..2: mod_base = OTHER; note = Phosphorothioate linkage
  modified_base 2: mod_base = OTHER; note = 2' fluoro-modified nucleoside
  modified_base 2..3: mod_base = OTHER; note = Phosphorothioate linkage
  modified_base 3: mod_base = OTHER; note = 2' O-methyl modified nucleoside
  modified_base 4: mod_base = OTHER; note = 2' fluoro-modified nucleoside
  modified_base 5: mod_base = OTHER; note = 2' O-methyl modified nucleoside
  modified_base 6: mod_base = OTHER; note = 2' fluoro-modified nucleoside
  modified_base 7: mod_base = OTHER; note = 2' O-methyl modified nucleoside
  modified_base 8: mod_base = OTHER; note = 2' fluoro-modified nucleoside
  modified_base 9: mod_base = OTHER; note = 2' O-methyl modified nucleoside
  modified_base 10: mod_base = OTHER; note = 2' fluoro-modified nucleoside
  modified_base 11: mod_base = OTHER; note = 2' O-methyl modified nucleoside
  modified_base 12: mod_base = OTHER; note = 2' O-methyl modified nucleoside
  modified_base 13: mod_base = OTHER; note = 2' O-methyl modified nucleoside
  modified_base 14: mod_base = OTHER; note = 2' fluoro-modified nucleoside
  modified_base 15: mod_base = OTHER; note = 2' O-methyl modified nucleoside
  modified_base 16: mod_base = OTHER; note = 2' fluoro-modified nucleoside
  modified_base 17: mod_base = OTHER; note = 2' O-methyl modified nucleoside
  modified_base 18: mod_base = OTHER; note = 2' fluoro-modified nucleoside
  modified_base 19: mod_base = OTHER; note = 2' O-methyl modified nucleoside
  modified_base 19..20: mod_base = OTHER; note = Phosphorothioate linkage
  modified_base 20: mod_base = OTHER; note = 2' O-methyl modified nucleoside
  modified_base 20..21: mod_base = OTHER; note = Phosphorothioate linkage
  modified_base 21: mod_base = OTHER; note = 2' O-methyl modified nucleoside
  source 1..21: mol_type = other RNA
taagtccccacggatgctgtt

SEQ ID NO: 11257 - RNA, 21 nt, synthetic construct
  misc_feature 1..21: note = Description of Artificial Sequence: Synthetic oligonucleotide
  modified_base 1: mod_base = OTHER; note = 2' O-methyl modified nucleoside
  modified_base 1..2: mod_base = OTHER; note = Phosphorothioate linkage
  modified_base 2: mod_base = OTHER; note = 2' fluoro-modified nucleoside
  modified_base 2..3: mod_base = OTHER; note = Phosphorothioate linkage
  modified_base 3: mod_base = OTHER; note = 2' O-methyl modified nucleoside
  modified_base 4: mod_base = OTHER; note = 2' fluoro-modified nucleoside
  modified_base 5: mod_base = OTHER; note = 2' O-methyl modified nucleoside
  modified_base 6: mod_base = OTHER; note = 2' fluoro-modified nucleoside
  modified_base 7: mod_base = OTHER; note = 2' O-methyl modified nucleoside
  modified_base 8: mod_base = OTHER; note = 2' fluoro-modified nucleoside
  modified_base 9: mod_base = OTHER; note = 2' O-methyl modified nucleoside
  modified_base 10: mod_base = OTHER; note = 2' fluoro-modified nucleoside
  modified_base 11: mod_base = OTHER; note = 2' O-methyl modified nucleoside
  modified_base 12: mod_base = OTHER; note = 2' O-methyl modified nucleoside
  modified_base 13: mod_base = OTHER; note = 2' O-methyl modified nucleoside
  modified_base 14: mod_base = OTHER; note = 2' fluoro-modified nucleoside
  modified_base 15: mod_base = OTHER; note = 2' O-methyl modified nucleoside
  modified_base 16: mod_base = OTHER; note = 2' fluoro-modified nucleoside
  modified_base 17: mod_base = OTHER; note = 2' O-methyl modified nucleoside
  modified_base 18: mod_base = OTHER; note = 2' fluoro-modified nucleoside
  modified_base 19: mod_base = OTHER; note = 2' O-methyl modified nucleoside
  modified_base 19..20: mod_base = OTHER; note = Phosphorothioate linkage
  modified_base 20: mod_base = OTHER; note = 2' O-methyl modified nucleoside
  modified_base 20..21: mod_base = OTHER; note = Phosphorothioate linkage
  modified_base 21: mod_base = OTHER; note = 2' O-methyl modified nucleoside
  source 1..21: mol_type = other RNA
tagagccggtggatgtgtttt

SEQ ID NO: 11258 - RNA, 21 nt, synthetic construct
  misc_feature 1..21: note = Description of Artificial Sequence: Synthetic oligonucleotide
  modified_base 1: mod_base = OTHER; note = 2' O-methyl modified nucleoside
  modified_base 1..2: mod_base = OTHER; note = Phosphorothioate linkage
  modified_base 2: mod_base = OTHER; note = 2' fluoro-modified nucleoside
  modified_base 2..3: mod_base = OTHER; note = Phosphorothioate linkage
  modified_base 3: mod_base = OTHER; note = 2' O-methyl modified nucleoside
  modified_base 4: mod_base = OTHER; note = 2' fluoro-modified nucleoside
  modified_base 5: mod_base = OTHER; note = 2' O-methyl modified nucleoside
  modified_base 6: mod_base = OTHER; note = 2' fluoro-modified nucleoside
  modified_base 7: mod_base = OTHER; note = 2' O-methyl modified nucleoside
  modified_base 8: mod_base = OTHER; note = 2' fluoro-modified nucleoside
  modified_base 9: mod_base = OTHER; note = 2' O-methyl modified nucleoside
  modified_base 10: mod_base = OTHER; note = 2' fluoro-modified nucleoside
  modified_base 11: mod_base = OTHER; note = 2' O-methyl modified nucleoside
  modified_base 12: mod_base = OTHER; note = 2' O-methyl modified nucleoside
  modified_base 13: mod_base = OTHER; note = 2' O-methyl modified nucleoside
  modified_base 14: mod_base = OTHER; note = 2' fluoro-modified nucleoside
  modified_base 15: mod_base = OTHER; note = 2' O-methyl modified nucleoside
  modified_base 16: mod_base = OTHER; note = 2' fluoro-modified nucleoside
  modified_base 17: mod_base = OTHER; note = 2' O-methyl modified nucleoside
  modified_base 18: mod_base = OTHER; note = 2' fluoro-modified nucleoside
  modified_base 19: mod_base = OTHER; note = 2' O-methyl modified nucleoside
  modified_base 19..20: mod_base = OTHER; note = Phosphorothioate linkage
  modified_base 20: mod_base = OTHER; note = 2' O-methyl modified nucleoside
  modified_base 20..21: mod_base = OTHER; note = Phosphorothioate linkage
  modified_base 21: mod_base = OTHER; note = 2' O-methyl modified nucleoside
  source 1..21: mol_type = other RNA
tctggagagccggtggatgtt

SEQ ID NO: 11259 - RNA, 21 nt, synthetic construct
  misc_feature 1..21: note = Description of Artificial Sequence: Synthetic oligonucleotide
  modified_base 1: mod_base = OTHER; note = 2' O-methyl modified nucleoside
  modified_base 1..2: mod_base = OTHER; note = Phosphorothioate linkage
  modified_base 2: mod_base = OTHER; note = 2' fluoro-modified nucleoside
  modified_base 2..3: mod_base = OTHER; note = Phosphorothioate linkage
  modified_base 3: mod_base = OTHER; note = 2' O-methyl modified nucleoside
  modified_base 4: mod_base = OTHER; note = 2' fluoro-modified nucleoside
  modified_base 5: mod_base = OTHER; note = 2' O-methyl modified nucleoside
  modified_base 6: mod_base = OTHER; note = 2' fluoro-modified nucleoside
  modified_base 7: mod_base = OTHER; note = 2' O-methyl modified nucleoside
  modified_base 8: mod_base = OTHER; note = 2' fluoro-modified nucleoside
  modified_base 9: mod_base = OTHER; note = 2' O-methyl modified nucleoside
  modified_base 10: mod_base = OTHER; note = 2' fluoro-modified nucleoside
  modified_base 11: mod_base = OTHER; note = 2' O-methyl modified nucleoside
  modified_base 12: mod_base = OTHER; note = 2' O-methyl modified nucleoside
  modified_base 13: mod_base = OTHER; note = 2' O-methyl modified nucleoside
  modified_base 14: mod_base = OTHER; note = 2' fluoro-modified nucleoside
  modified_base 15: mod_base = OTHER; note = 2' O-methyl modified nucleoside
  modified_base 16: mod_base = OTHER; note = 2' fluoro-modified nucleoside
  modified_base 17: mod_base = OTHER; note = 2' O-methyl modified nucleoside
  modified_base 18: mod_base = OTHER; note = 2' fluoro-modified nucleoside
  modified_base 19: mod_base = OTHER; note = 2' O-methyl modified nucleoside
  modified_base 19..20: mod_base = OTHER; note = Phosphorothioate linkage
  modified_base 20: mod_base = OTHER; note = 2' O-methyl modified nucleoside
  modified_base 20..21: mod_base = OTHER; note = Phosphorothioate linkage
  modified_base 21: mod_base = OTHER; note = 2' O-methyl modified nucleoside
  source 1..21: mol_type = other RNA
ttacacgcagccgggttggtt

SEQ ID NO: 11260 - RNA, 21 nt, synthetic construct
  misc_feature 1..21: note = Description of Artificial Sequence: Synthetic oligonucleotide
  modified_base 1: mod_base = OTHER; note = 2' O-methyl modified nucleoside
  modified_base 1..2: mod_base = OTHER; note = Phosphorothioate linkage
  modified_base 2: mod_base = OTHER; note = 2' fluoro-modified nucleoside
  modified_base 2..3: mod_base = OTHER; note = Phosphorothioate linkage
  modified_base 3: mod_base = OTHER; note = 2' O-methyl modified nucleoside
  modified_base 4: mod_base = OTHER; note = 2' fluoro-modified nucleoside
  modified_base 5: mod_base = OTHER; note = 2' O-methyl modified nucleoside
  modified_base 6: mod_base = OTHER; note = 2' fluoro-modified nucleoside
  modified_base 7: mod_base = OTHER; note = 2' O-methyl modified nucleoside
  modified_base 8: mod_base = OTHER; note = 2' fluoro-modified nucleoside
  modified_base 9: mod_base = OTHER; note = 2' O-methyl modified nucleoside
  modified_base 10: mod_base = OTHER; note = 2' fluoro-modified nucleoside
  modified_base 11: mod_base = OTHER; note = 2' O-methyl modified nucleoside
  modified_base 12: mod_base = OTHER; note = 2' O-methyl modified nucleoside
  modified_base 13: mod_base = OTHER; note = 2' O-methyl modified nucleoside
  modified_base 14: mod_base = OTHER; note = 2' fluoro-modified nucleoside
  modified_base 15: mod_base = OTHER; note = 2' O-methyl modified nucleoside
  modified_base 16: mod_base = OTHER; note = 2' fluoro-modified nucleoside
  modified_base 17: mod_base = OTHER; note = 2' O-methyl modified nucleoside
  modified_base 18: mod_base = OTHER; note = 2' fluoro-modified nucleoside
  modified_base 19: mod_base = OTHER; note = 2' O-methyl modified nucleoside
  modified_base 19..20: mod_base = OTHER; note = Phosphorothioate linkage
  modified_base 20: mod_base = OTHER; note = 2' O-methyl modified nucleoside
  modified_base 20..21: mod_base = OTHER; note = Phosphorothioate linkage
  modified_base 21: mod_base = OTHER; note = 2' O-methyl modified nucleoside
  source 1..21: mol_type = other RNA
tctacacgcagccgggttgtt

SEQ ID NO: 11261 - RNA, 21 nt, synthetic construct
  misc_feature 1..21: note = Description of Artificial Sequence: Synthetic oligonucleotide
  modified_base 1: mod_base = OTHER; note = 2' O-methyl modified nucleoside
  modified_base 1..2: mod_base = OTHER; note = Phosphorothioate linkage
  modified_base 2: mod_base = OTHER; note = 2' fluoro-modified nucleoside
  modified_base 2..3: mod_base = OTHER; note = Phosphorothioate linkage
  modified_base 3: mod_base = OTHER; note = 2' O-methyl modified nucleoside
  modified_base 4: mod_base = OTHER; note = 2' fluoro-modified nucleoside
  modified_base 5: mod_base = OTHER; note = 2' O-methyl modified nucleoside
  modified_base 6: mod_base = OTHER; note = 2' fluoro-modified nucleoside
  modified_base 7: mod_base = OTHER; note = 2' O-methyl modified nucleoside
  modified_base 8: mod_base = OTHER; note = 2' fluoro-modified nucleoside
  modified_base 9: mod_base = OTHER; note = 2' O-methyl modified nucleoside
  modified_base 10: mod_base = OTHER; note = 2' fluoro-modified nucleoside
  modified_base 11: mod_base = OTHER; note = 2' O-methyl modified nucleoside
  modified_base 12: mod_base = OTHER; note = 2' O-methyl modified nucleoside
  modified_base 13: mod_base = OTHER; note = 2' O-methyl modified nucleoside
  modified_base 14: mod_base = OTHER; note = 2' fluoro-modified nucleoside
  modified_base 15: mod_base = OTHER; note = 2' O-methyl modified nucleoside
  modified_base 16: mod_base = OTHER; note = 2' fluoro-modified nucleoside
  modified_base 17: mod_base = OTHER; note = 2' O-methyl modified nucleoside
  modified_base 18: mod_base = OTHER; note = 2' fluoro-modified nucleoside
  modified_base 19: mod_base = OTHER; note = 2' O-methyl modified nucleoside
  modified_base 19..20: mod_base = OTHER; note = Phosphorothioate linkage
  modified_base 20: mod_base = OTHER; note = 2' O-methyl modified nucleoside
  modified_base 20..21: mod_base = OTHER; note = Phosphorothioate linkage
  modified_base 21: mod_base = OTHER; note = 2' O-methyl modified nucleoside
  source 1..21: mol_type = other RNA
ttctacacgcagccgggtttt

SEQ ID NO: 11262 - RNA, 21 nt, synthetic construct
  misc_feature 1..21: note = Description of Artificial Sequence: Synthetic oligonucleotide
  modified_base 1: mod_base = OTHER; note = 2' O-methyl modified nucleoside
  modified_base 1..2: mod_base = OTHER; note = Phosphorothioate linkage
  modified_base 2: mod_base = OTHER; note = 2' fluoro-modified nucleoside
  modified_base 2..3: mod_base = OTHER; note = Phosphorothioate linkage
  modified_base 3: mod_base = OTHER; note = 2' O-methyl modified nucleoside
  modified_base 4: mod_base = OTHER; note = 2' fluoro-modified nucleoside
  modified_base 5: mod_base = OTHER; note = 2' O-methyl modified nucleoside
  modified_base 6: mod_base = OTHER; note = 2' fluoro-modified nucleoside
  modified_base 7: mod_base = OTHER; note = 2' O-methyl modified nucleoside
  modified_base 8: mod_base = OTHER; note = 2' fluoro-modified nucleoside
  modified_base 9: mod_base = OTHER; note = 2' O-methyl modified nucleoside
  modified_base 10: mod_base = OTHER; note = 2' fluoro-modified nucleoside
  modified_base 11: mod_base = OTHER; note = 2' O-methyl modified nucleoside
  modified_base 12: mod_base = OTHER; note = 2' O-methyl modified nucleoside
  modified_base 13: mod_base = OTHER; note = 2' O-methyl modified nucleoside
  modified_base 14: mod_base = OTHER; note = 2' fluoro-modified nucleoside
  modified_base 15: mod_base = OTHER; note = 2' O-methyl modified nucleoside
  modified_base 16: mod_base = OTHER; note = 2' fluoro-modified nucleoside
  modified_base 17: mod_base = OTHER; note = 2' O-methyl modified nucleoside
  modified_base 18: mod_base = OTHER; note = 2' fluoro-modified nucleoside
  modified_base 19: mod_base = OTHER; note = 2' O-methyl modified nucleoside
  modified_base 19..20: mod_base = OTHER; note = Phosphorothioate linkage
  modified_base 20: mod_base = OTHER; note = 2' O-methyl modified nucleoside
  modified_base 20..21: mod_base = OTHER; note = Phosphorothioate linkage
  modified_base 21: mod_base = OTHER; note = 2' O-methyl modified nucleoside
  source 1..21: mol_type = other RNA
tccatctctacacgcagcctt

SEQ ID NO: 11263 - RNA, 21 nt, synthetic construct
  misc_feature 1..21: note = Description of Artificial Sequence: Synthetic oligonucleotide
  modified_base 1: mod_base = OTHER; note = 2' O-methyl modified nucleoside
  modified_base 1..2: mod_base = OTHER; note = Phosphorothioate linkage
  modified_base 2: mod_base = OTHER; note = 2' fluoro-modified nucleoside
  modified_base 2..3: mod_base = OTHER; note = Phosphorothioate linkage
  modified_base 3: mod_base = OTHER; note = 2' O-methyl modified nucleoside
  modified_base 4: mod_base = OTHER; note = 2' fluoro-modified nucleoside
  modified_base 5: mod_base = OTHER; note = 2' O-methyl modified nucleoside
  modified_base 6: mod_base = OTHER; note = 2' fluoro-modified nucleoside
  modified_base 7: mod_base = OTHER; note = 2' O-methyl modified nucleoside
  modified_base 8: mod_base = OTHER; note = 2' fluoro-modified nucleoside
  modified_base 9: mod_base = OTHER; note = 2' O-methyl modified nucleoside
  modified_base 10: mod_base = OTHER; note = 2' fluoro-modified nucleoside
  modified_base 11: mod_base = OTHER; note = 2' O-methyl modified nucleoside
  modified_base 12: mod_base = OTHER; note = 2' O-methyl modified nucleoside
  modified_base 13: mod_base = OTHER; note = 2' O-methyl modified nucleoside
  modified_base 14: mod_base = OTHER; note = 2' fluoro-modified nucleoside
  modified_base 15: mod_base = OTHER; note = 2' O-methyl modified nucleoside
  modified_base 16: mod_base = OTHER; note = 2' fluoro-modified nucleoside
  modified_base 17: mod_base = OTHER; note = 2' O-methyl modified nucleoside
  modified_base 18: mod_base = OTHER; note = 2' fluoro-modified nucleoside
  modified_base 19: mod_base = OTHER; note = 2' O-methyl modified nucleoside
  modified_base 19..20: mod_base = OTHER; note = Phosphorothioate linkage
  modified_base 20: mod_base = OTHER; note = 2' O-methyl modified nucleoside
  modified_base 20..21: mod_base = OTHER; note = Phosphorothioate linkage
  modified_base 21: mod_base = OTHER; note = 2' O-methyl modified nucleoside
  source 1..21: mol_type = other RNA
ttccatctctacacgcagctt

SEQ ID NO: 11264 - RNA, 21 nt, synthetic construct
  misc_feature 1..21: note = Description of Artificial Sequence: Synthetic oligonucleotide
  modified_base 1: mod_base = OTHER; note = 2' O-methyl modified nucleoside
  modified_base 1..2: mod_base = OTHER; note = Phosphorothioate linkage
  modified_base 2: mod_base = OTHER; note = 2' fluoro-modified nucleoside
  modified_base 2..3: mod_base = OTHER; note = Phosphorothioate linkage
  modified_base 3: mod_base = OTHER; note = 2' O-methyl modified nucleoside
  modified_base 4: mod_base = OTHER; note = 2' fluoro-modified nucleoside
  modified_base 5: mod_base = OTHER; note = 2' O-methyl modified nucleoside
  modified_base 6: mod_base = OTHER; note = 2' fluoro-modified nucleoside
  modified_base 7: mod_base = OTHER; note = 2' O-methyl modified nucleoside
  modified_base 8: mod_base = OTHER; note = 2' fluoro-modified nucleoside
  modified_base 9: mod_base = OTHER; note = 2' O-methyl modified nucleoside
  modified_base 10: mod_base = OTHER; note = 2' fluoro-modified nucleoside
  modified_base 11: mod_base = OTHER; note = 2' O-methyl modified nucleoside
  modified_base 12: mod_base = OTHER; note = 2' O-methyl modified nucleoside
  modified_base 13: mod_base = OTHER; note = 2' O-methyl modified nucleoside
  modified_base 14: mod_base = OTHER; note = 2' fluoro-modified nucleoside
  modified_base 15: mod_base = OTHER; note = 2' O-methyl modified nucleoside
  modified_base 16: mod_base = OTHER; note = 2' fluoro-modified nucleoside
  modified_base 17: mod_base = OTHER; note = 2' O-methyl modified nucleoside
  modified_base 18: mod_base = OTHER; note = 2' fluoro-modified nucleoside
  modified_base 19: mod_base = OTHER; note = 2' O-methyl modified nucleoside
  modified_base 19..20: mod_base = OTHER; note = Phosphorothioate linkage
  modified_base 20: mod_base = OTHER; note = 2' O-methyl modified nucleoside
  modified_base 20..21: mod_base = OTHER; note = Phosphorothioate linkage
  modified_base 21: mod_base = OTHER; note = 2' O-methyl modified nucleoside
  source 1..21: mol_type = other RNA
tcctccatctctacacgcatt

SEQ ID NO: 11265 - RNA, 21 nt, synthetic construct
  misc_feature 1..21: note = Description of Artificial Sequence: Synthetic oligonucleotide
  modified_base 1: mod_base = OTHER; note = 2' O-methyl modified nucleoside
  modified_base 1..2: mod_base = OTHER; note = Phosphorothioate linkage
  modified_base 2: mod_base = OTHER; note = 2' fluoro-modified nucleoside
  modified_base 2..3: mod_base = OTHER; note = Phosphorothioate linkage
  modified_base 3: mod_base = OTHER; note = 2' O-methyl modified nucleoside
  modified_base 4: mod_base = OTHER; note = 2' fluoro-modified nucleoside
  modified_base 5: mod_base = OTHER; note = 2' O-methyl modified nucleoside
  modified_base 6: mod_base = OTHER; note = 2' fluoro-modified nucleoside
  modified_base 7: mod_base = OTHER; note = 2' O-methyl modified nucleoside
  modified_base 8: mod_base = OTHER; note = 2' fluoro-modified nucleoside
  modified_base 9: mod_base = OTHER; note = 2' O-methyl modified nucleoside
  modified_base 10: mod_base = OTHER; note = 2' fluoro-modified nucleoside
  modified_base 11: mod_base = OTHER; note = 2' O-methyl modified nucleoside
  modified_base 12: mod_base = OTHER; note = 2' O-methyl modified nucleoside
  modified_base 13: mod_base = OTHER; note = 2' O-methyl modified nucleoside
  modified_base 14: mod_base = OTHER; note = 2' fluoro-modified nucleoside
  modified_base 15: mod_base = OTHER; note = 2' O-methyl modified nucleoside
  modified_base 16: mod_base = OTHER; note = 2' fluoro-modified nucleoside
  modified_base 17: mod_base = OTHER; note = 2' O-methyl modified nucleoside
  modified_base 18: mod_base = OTHER; note = 2' fluoro-modified nucleoside
  modified_base 19: mod_base = OTHER; note = 2' O-methyl modified nucleoside
  modified_base 19..20: mod_base = OTHER; note = Phosphorothioate linkage
  modified_base 20: mod_base = OTHER; note = 2' O-methyl modified nucleoside
  modified_base 20..21: mod_base = OTHER; note = Phosphorothioate linkage
  modified_base 21: mod_base = OTHER; note = 2' O-methyl modified nucleoside
  source 1..21: mol_type = other RNA
tcgtagcgcaggttgcccttt

SEQ ID NO: 11266 - RNA, 21 nt, synthetic construct
  misc_feature 1..21: note = Description of Artificial Sequence: Synthetic oligonucleotide
  modified_base 1: mod_base = OTHER; note = 2' O-methyl modified nucleoside
  modified_base 1..2: mod_base = OTHER; note = Phosphorothioate linkage
  modified_base 2: mod_base = OTHER; note = 2' fluoro-modified nucleoside
  modified_base 2..3: mod_base = OTHER; note = Phosphorothioate linkage
  modified_base 3: mod_base = OTHER; note = 2' O-methyl modified nucleoside
  modified_base 4: mod_base = OTHER; note = 2' fluoro-modified nucleoside
  modified_base 5: mod_base = OTHER; note = 2' O-methyl modified nucleoside
  modified_base 6: mod_base = OTHER; note = 2' fluoro-modified nucleoside
  modified_base 7: mod_base = OTHER; note = 2' O-methyl modified nucleoside
  modified_base 8: mod_base = OTHER; note = 2' fluoro-modified nucleoside
  modified_base 9: mod_base = OTHER; note = 2' O-methyl modified nucleoside
  modified_base 10: mod_base = OTHER; note = 2' fluoro-modified nucleoside
  modified_base 11: mod_base = OTHER; note = 2' O-methyl modified nucleoside
  modified_base 12: mod_base = OTHER; note = 2' O-methyl modified nucleoside
  modified_base 13: mod_base = OTHER; note = 2' O-methyl modified nucleoside
  modified_base 14: mod_base = OTHER; note = 2' fluoro-modified nucleoside
  modified_base 15: mod_base = OTHER; note = 2' O-methyl modified nucleoside
  modified_base 16: mod_base = OTHER; note = 2' fluoro-modified nucleoside
  modified_base 17: mod_base = OTHER; note = 2' O-methyl modified nucleoside
  modified_base 18: mod_base = OTHER; note = 2' fluoro-modified nucleoside
  modified_base 19: mod_base = OTHER; note = 2' O-methyl modified nucleoside
  modified_base 19..20: mod_base = OTHER; note = Phosphorothioate linkage
  modified_base 20: mod_base = OTHER; note = 2' O-methyl modified nucleoside
  modified_base 20..21: mod_base = OTHER; note = Phosphorothioate linkage
  modified_base 21: mod_base = OTHER; note = 2' O-methyl modified nucleoside
  source 1..21: mol_type = other RNA
tgcgtagcgcaggttgccctt

SEQ ID NO: 11267 - RNA, 21 nt, synthetic construct
  misc_feature 1..21: note = Description of Artificial Sequence: Synthetic oligonucleotide
  modified_base 1: mod_base = OTHER; note = 2' O-methyl modified nucleoside
  modified_base 1..2: mod_base = OTHER; note = Phosphorothioate linkage
  modified_base 2: mod_base = OTHER; note = 2' fluoro-modified nucleoside
  modified_base 2..3: mod_base = OTHER; note = Phosphorothioate linkage
  modified_base 3: mod_base = OTHER; note = 2' O-methyl modified nucleoside
  modified_base 4: mod_base = OTHER; note = 2' fluoro-modified nucleoside
  modified_base 5: mod_base = OTHER; note = 2' O-methyl modified nucleoside
  modified_base 6: mod_base = OTHER; note = 2' fluoro-modified nucleoside
  modified_base 7: mod_base = OTHER; note = 2' O-methyl modified nucleoside
  modified_base 8: mod_base = OTHER; note = 2' fluoro-modified nucleoside
  modified_base 9: mod_base = OTHER; note = 2' O-methyl modified nucleoside
  modified_base 10: mod_base = OTHER; note = 2' fluoro-modified nucleoside
  modified_base 11: mod_base = OTHER; note = 2' O-methyl modified nucleoside
  modified_base 12: mod_base = OTHER; note = 2' O-methyl modified nucleoside
  modified_base 13: mod_base = OTHER; note = 2' O-methyl modified nucleoside
  modified_base 14: mod_base = OTHER; note = 2' fluoro-modified nucleoside
  modified_base 15: mod_base = OTHER; note = 2' O-methyl modified nucleoside
  modified_base 16: mod_base = OTHER; note = 2' fluoro-modified nucleoside
  modified_base 17: mod_base = OTHER; note = 2' O-methyl modified nucleoside
  modified_base 18: mod_base = OTHER; note = 2' fluoro-modified nucleoside
  modified_base 19: mod_base = OTHER; note = 2' O-methyl modified nucleoside
  modified_base 19..20: mod_base = OTHER; note = Phosphorothioate linkage
  modified_base 20: mod_base = OTHER; note = 2' O-methyl modified nucleoside
  modified_base 20..21: mod_base = OTHER; note = Phosphorothioate linkage
  modified_base 21: mod_base = OTHER; note = 2' O-methyl modified nucleoside
  source 1..21: mol_type = other RNA
tagcgtagcgcaggttgcctt

SEQ ID NO: 11268 - RNA, 21 nt, synthetic construct
  misc_feature 1..21: note = Description of Artificial Sequence: Synthetic oligonucleotide
  modified_base 1: mod_base = OTHER; note = 2' O-methyl modified nucleoside
  modified_base 1..2: mod_base = OTHER; note = Phosphorothioate linkage
  modified_base 2: mod_base = OTHER; note = 2' fluoro-modified nucleoside
  modified_base 2..3: mod_base = OTHER; note = Phosphorothioate linkage
  modified_base 3: mod_base = OTHER; note = 2' O-methyl modified nucleoside
  modified_base 4: mod_base = OTHER; note = 2' fluoro-modified nucleoside
  modified_base 5: mod_base = OTHER; note = 2' O-methyl modified nucleoside
  modified_base 6: mod_base = OTHER; note = 2' fluoro-modified nucleoside
  modified_base 7: mod_base = OTHER; note = 2' O-methyl modified nucleoside
  modified_base 8: mod_base = OTHER; note = 2' fluoro-modified nucleoside
  modified_base 9: mod_base = OTHER; note = 2' O-methyl modified nucleoside
  modified_base 10: mod_base = OTHER; note = 2' fluoro-modified nucleoside
  modified_base 11: mod_base = OTHER; note = 2' O-methyl modified nucleoside
  modified_base 12: mod_base = OTHER; note = 2' O-methyl modified nucleoside
  modified_base 13: mod_base = OTHER; note = 2' O-methyl modified nucleoside
  modified_base 14: mod_base = OTHER; note = 2' fluoro-modified nucleoside
  modified_base 15: mod_base = OTHER; note = 2' O-methyl modified nucleoside
  modified_base 16: mod_base = OTHER; note = 2' fluoro-modified nucleoside
  modified_base 17: mod_base = OTHER; note = 2' O-methyl modified nucleoside
  modified_base 18: mod_base = OTHER; note = 2' fluoro-modified nucleoside
  modified_base 19: mod_base = OTHER; note = 2' O-methyl modified nucleoside
  modified_base 19..20: mod_base = OTHER; note = Phosphorothioate linkage
  modified_base 20: mod_base = OTHER; note = 2' O-methyl modified nucleoside
  modified_base 20..21: mod_base = OTHER; note = Phosphorothioate linkage
  modified_base 21: mod_base = OTHER; note = 2' O-methyl modified nucleoside
  source 1..21: mol_type = other RNA
tcagcgtagcgcaggttgctt

SEQ ID NO: 11269 - RNA, 21 nt, synthetic construct
  misc_feature 1..21: note = Description of Artificial Sequence: Synthetic oligonucleotide
  modified_base 1: mod_base = OTHER; note = 2' O-methyl modified nucleoside
  modified_base 1..2: mod_base = OTHER; note = Phosphorothioate linkage
  modified_base 2: mod_base = OTHER; note = 2' fluoro-modified nucleoside
  modified_base 2..3: mod_base = OTHER; note = Phosphorothioate linkage
  modified_base 3: mod_base = OTHER; note = 2' O-methyl modified nucleoside
  modified_base 4: mod_base = OTHER; note = 2' fluoro-modified nucleoside
  modified_base 5: mod_base = OTHER; note = 2' O-methyl modified nucleoside
  modified_base 6: mod_base = OTHER; note = 2' fluoro-modified nucleoside
  modified_base 7: mod_base = OTHER; note = 2' O-methyl modified nucleoside
  modified_base 8: mod_base = OTHER; note = 2' fluoro-modified nucleoside
  modified_base 9: mod_base = OTHER; note = 2' O-methyl modified nucleoside
  modified_base 10: mod_base = OTHER; note = 2' fluoro-modified nucleoside
  modified_base 11: mod_base = OTHER; note = 2' O-methyl modified nucleoside
  modified_base 12: mod_base = OTHER; note = 2' O-methyl modified nucleoside
  modified_base 13: mod_base = OTHER; note = 2' O-methyl modified nucleoside
  modified_base 14: mod_base = OTHER; note = 2' fluoro-modified nucleoside
  modified_base 15: mod_base = OTHER; note = 2' O-methyl modified nucleoside
  modified_base 16: mod_base = OTHER; note = 2' fluoro-modified nucleoside
  modified_base 17: mod_base = OTHER; note = 2' O-methyl modified nucleoside
  modified_base 18: mod_base = OTHER; note = 2' fluoro-modified nucleoside
  modified_base 19: mod_base = OTHER; note = 2' O-methyl modified nucleoside
  modified_base 19..20: mod_base = OTHER; note = Phosphorothioate linkage
  modified_base 20: mod_base = OTHER; note = 2' O-methyl modified nucleoside
  modified_base 20..21: mod_base = OTHER; note = Phosphorothioate linkage
  modified_base 21: mod_base = OTHER; note = 2' O-methyl modified nucleoside
  source 1..21: mol_type = other RNA
tgctatactcagcgtagcgtt

SEQ ID NO: 11270 - RNA, 21 nt, synthetic construct
  misc_feature 1..21: note = Description of Artificial Sequence: Synthetic oligonucleotide
  modified_base 1: mod_base = OTHER; note = 2' O-methyl modified nucleoside
  modified_base 1..2: mod_base = OTHER; note = Phosphorothioate linkage
  modified_base 2: mod_base = OTHER; note = 2' fluoro-modified nucleoside
  modified_base 2..3: mod_base = OTHER; note = Phosphorothioate linkage
  modified_base 3: mod_base = OTHER; note = 2' O-methyl modified nucleoside
  modified_base 4: mod_base = OTHER; note = 2' fluoro-modified nucleoside
  modified_base 5: mod_base = OTHER; note = 2' O-methyl modified nucleoside
  modified_base 6: mod_base = OTHER; note = 2' fluoro-modified nucleoside
  modified_base 7: mod_base = OTHER; note = 2' O-methyl modified nucleoside
  modified_base 8: mod_base = OTHER; note = 2' fluoro-modified nucleoside
  modified_base 9: mod_base = OTHER; note = 2' O-methyl modified nucleoside
  modified_base 10: mod_base = OTHER; note = 2' fluoro-modified nucleoside
  modified_base 11: mod_base = OTHER; note = 2' O-methyl modified nucleoside
  modified_base 12: mod_base = OTHER; note = 2' O-methyl modified nucleoside
  modified_base 13: mod_base = OTHER; note = 2' O-methyl modified nucleoside
  modified_base 14: mod_base = OTHER; note = 2' fluoro-modified nucleoside
  modified_base 15: mod_base = OTHER; note = 2' O-methyl modified nucleoside
  modified_base 16: mod_base = OTHER; note = 2' fluoro-modified nucleoside
  modified_base 17: mod_base = OTHER; note = 2' O-methyl modified nucleoside
  modified_base 18: mod_base = OTHER; note = 2' fluoro-modified nucleoside
  modified_base 19: mod_base = OTHER; note = 2' O-methyl modified nucleoside
  modified_base 19..20: mod_base = OTHER; note = Phosphorothioate linkage
  modified_base 20: mod_base = OTHER; note = 2' O-methyl modified nucleoside
  modified_base 20..21: mod_base = OTHER; note = Phosphorothioate linkage
  modified_base 21: mod_base = OTHER; note = 2' O-methyl modified nucleoside
  source 1..21: mol_type = other RNA
tggctatactcagcgtagctt

SEQ ID NO: 11271 - RNA, 21 nt, synthetic construct
  misc_feature 1..21: note = Description of Artificial Sequence: Synthetic oligonucleotide
  modified_base 1: mod_base = OTHER; note = 2' O-methyl modified nucleoside
  modified_base 1..2: mod_base = OTHER; note = Phosphorothioate linkage
  modified_base 2: mod_base = OTHER; note = 2' fluoro-modified nucleoside
  modified_base 2..3: mod_base = OTHER; note = Phosphorothioate linkage
  modified_base 3: mod_base = OTHER; note = 2' O-methyl modified nucleoside
  modified_base 4: mod_base = OTHER; note = 2' fluoro-modified nucleoside
  modified_base 5: mod_base = OTHER; note = 2' O-methyl modified nucleoside
  modified_base 6: mod_base = OTHER; note = 2' fluoro-modified nucleoside
  modified_base 7: mod_base = OTHER; note = 2' O-methyl modified nucleoside
  modified_base 8: mod_base = OTHER; note = 2' fluoro-modified nucleoside
  modified_base 9: mod_base = OTHER; note = 2' O-methyl modified nucleoside
  modified_base 10: mod_base = OTHER; note = 2' fluoro-modified nucleoside
  modified_base 11: mod_base = OTHER; note = 2' O-methyl modified nucleoside
  modified_base 12: mod_base = OTHER; note = 2' O-methyl modified nucleoside
  modified_base 13: mod_base = OTHER; note = 2' O-methyl modified nucleoside
  modified_base 14: mod_base = OTHER; note = 2' fluoro-modified nucleoside
  modified_base 15: mod_base = OTHER; note = 2' O-methyl modified nucleoside
  modified_base 16: mod_base = OTHER; note = 2' fluoro-modified nucleoside
  modified_base 17: mod_base = OTHER; note = 2' O-methyl modified nucleoside
  modified_base 18: mod_base = OTHER; note = 2' fluoro-modified nucleoside
  modified_base 19: mod_base = OTHER; note = 2' O-methyl modified nucleoside
  modified_base 19..20: mod_base = OTHER; note = Phosphorothioate linkage
  modified_base 20: mod_base = OTHER; note = 2' O-methyl modified nucleoside
  modified_base 20..21: mod_base = OTHER; note = Phosphorothioate linkage
  modified_base 21: mod_base = OTHER; note = 2' O-methyl modified nucleoside
  source 1..21: mol_type = other RNA
ttggctatactcagcgtagtt

SEQ ID NO: 11272 - RNA, 21 nt, synthetic construct
  misc_feature 1..21: note = Description of Artificial Sequence: Synthetic oligonucleotide
  modified_base 1: mod_base = OTHER; note = 2' O-methyl modified nucleoside
  modified_base 1..2: mod_base = OTHER; note = Phosphorothioate linkage
  modified_base 2: mod_base = OTHER; note = 2' fluoro-modified nucleoside
  modified_base 2..3: mod_base = OTHER; note = Phosphorothioate linkage
  modified_base 3: mod_base = OTHER; note = 2' O-methyl modified nucleoside
  modified_base 4: mod_base = OTHER; note = 2' fluoro-modified nucleoside
  modified_base 5: mod_base = OTHER; note = 2' O-methyl modified nucleoside
  modified_base 6: mod_base = OTHER; note = 2' fluoro-modified nucleoside
  modified_base 7: mod_base = OTHER; note = 2' O-methyl modified nucleoside
  modified_base 8: mod_base = OTHER; note = 2' fluoro-modified nucleoside
  modified_base 9: mod_base = OTHER; note = 2' O-methyl modified nucleoside
  modified_base 10: mod_base = OTHER; note = 2' fluoro-modified nucleoside
  modified_base 11: mod_base = OTHER; note = 2' O-methyl modified nucleoside
  modified_base 12: mod_base = OTHER; note = 2' O-methyl modified nucleoside
  modified_base 13: mod_base = OTHER; note = 2' O-methyl modified nucleoside
  modified_base 14: mod_base = OTHER; note = 2' fluoro-modified nucleoside
  modified_base 15: mod_base = OTHER; note = 2' O-methyl modified nucleoside
  modified_base 16: mod_base = OTHER; note = 2' fluoro-modified nucleoside
  modified_base 17: mod_base = OTHER; note = 2' O-methyl modified nucleoside
  modified_base 18: mod_base = OTHER; note = 2' fluoro-modified nucleoside
  modified_base 19: mod_base = OTHER; note = 2' O-methyl modified nucleoside
  modified_base 19..20: mod_base = OTHER; note = Phosphorothioate linkage
  modified_base 20: mod_base = OTHER; note = 2' O-methyl modified nucleoside
  modified_base 20..21: mod_base = OTHER; note = Phosphorothioate linkage
  modified_base 21: mod_base = OTHER; note = 2' O-methyl modified nucleoside
  source 1..21: mol_type = other RNA
tgtggctatactcagcgtatt

SEQ ID NO: 11273 - RNA, 21 nt, synthetic construct
  misc_feature 1..21: note = Description of Artificial Sequence: Synthetic oligonucleotide
  modified_base 1: mod_base = OTHER; note = 2' O-methyl modified nucleoside
  modified_base 1..2: mod_base = OTHER; note = Phosphorothioate linkage
  modified_base 2: mod_base = OTHER; note = 2' fluoro-modified nucleoside
  modified_base 2..3: mod_base = OTHER; note = Phosphorothioate linkage
  modified_base 3: mod_base = OTHER; note = 2' O-methyl modified nucleoside
  modified_base 4: mod_base = OTHER; note = 2' fluoro-modified nucleoside
  modified_base 5: mod_base = OTHER; note = 2' O-methyl modified nucleoside
  modified_base 6: mod_base = OTHER; note = 2' fluoro-modified nucleoside
  modified_base 7: mod_base = OTHER; note = 2' O-methyl modified nucleoside
  modified_base 8: mod_base = OTHER; note = 2' fluoro-modified nucleoside
  modified_base 9: mod_base = OTHER; note = 2' O-methyl modified nucleoside
  modified_base 10: mod_base = OTHER; note = 2' fluoro-modified nucleoside
  modified_base 11: mod_base = OTHER; note = 2' O-methyl modified nucleoside
  modified_base 12: mod_base = OTHER; note = 2' O-methyl modified nucleoside
  modified_base 13: mod_base = OTHER; note = 2' O-methyl modified nucleoside
  modified_base 14: mod_base = OTHER; note = 2' fluoro-modified nucleoside
  modified_base 15: mod_base = OTHER; note = 2' O-methyl modified nucleoside
  modified_base 16: mod_base = OTHER; note = 2' fluoro-modified nucleoside
  modified_base 17: mod_base = OTHER; note = 2' O-methyl modified nucleoside
  modified_base 18: mod_base = OTHER; note = 2' fluoro-modified nucleoside
  modified_base 19: mod_base = OTHER; note = 2' O-methyl modified nucleoside
  modified_base 19..20: mod_base = OTHER; note = Phosphorothioate linkage
  modified_base 20: mod_base = OTHER; note = 2' O-methyl modified nucleoside
  modified_base 20..21: mod_base = OTHER; note = Phosphorothioate linkage
  modified_base 21: mod_base = OTHER; note = 2' O-methyl modified nucleoside
  source 1..21: mol_type = other RNA
tgcgatagctgttgagttctt

SEQ ID NO: 11274 - RNA, 21 nt, synthetic construct
  misc_feature 1..21: note = Description of Artificial Sequence: Synthetic oligonucleotide
  modified_base 1: mod_base = OTHER; note = 2' O-methyl modified nucleoside
  modified_base 1..2: mod_base = OTHER; note = Phosphorothioate linkage
  modified_base 2: mod_base = OTHER; note = 2' fluoro-modified nucleoside
  modified_base 2..3: mod_base = OTHER; note = Phosphorothioate linkage
  modified_base 3: mod_base = OTHER; note = 2' O-methyl modified nucleoside
  modified_base 4: mod_base = OTHER; note = 2' fluoro-modified nucleoside
  modified_base 5: mod_base = OTHER; note = 2' O-methyl modified nucleoside
  modified_base 6: mod_base = OTHER; note = 2' fluoro-modified nucleoside
  modified_base 7: mod_base = OTHER; note = 2' O-methyl modified nucleoside
  modified_base 8: mod_base = OTHER; note = 2' fluoro-modified nucleoside
  modified_base 9: mod_base = OTHER; note = 2' O-methyl modified nucleoside
  modified_base 10: mod_base = OTHER; note = 2' fluoro-modified nucleoside
  modified_base 11: mod_base = OTHER; note = 2' O-methyl modified nucleoside
  modified_base 12: mod_base = OTHER; note = 2' O-methyl modified nucleoside
  modified_base 13: mod_base = OTHER; note = 2' O-methyl modified nucleoside
  modified_base 14: mod_base = OTHER; note = 2' fluoro-modified nucleoside
  modified_base 15: mod_base = OTHER; note = 2' O-methyl modified nucleoside
  modified_base 16: mod_base = OTHER; note = 2' fluoro-modified nucleoside
  modified_base 17: mod_base = OTHER; note = 2' O-methyl modified nucleoside
  modified_base 18: mod_base = OTHER; note = 2' fluoro-modified nucleoside
  modified_base 19: mod_base = OTHER; note = 2' O-methyl modified nucleoside
  modified_base 19..20: mod_base = OTHER; note = Phosphorothioate linkage
  modified_base 20: mod_base = OTHER; note = 2' O-methyl modified nucleoside
  modified_base 20..21: mod_base = OTHER; note = Phosphorothioate linkage
  modified_base 21: mod_base = OTHER; note = 2' O-methyl modified nucleoside
  source 1..21: mol_type = other RNA
tgaagaggcgatagctgtttt

SEQ ID NO: 11275 - RNA, 21 nt, synthetic construct
  misc_feature 1..21: note = Description of Artificial Sequence: Synthetic oligonucleotide
  modified_base 1: mod_base = OTHER; note = 2' O-methyl modified nucleoside
  modified_base 1..2: mod_base = OTHER; note = Phosphorothioate linkage
  modified_base 2: mod_base = OTHER; note = 2' fluoro-modified nucleoside
  modified_base 2..3: mod_base = OTHER; note = Phosphorothioate linkage
  modified_base 3: mod_base = OTHER; note = 2' O-methyl modified nucleoside
  modified_base 4: mod_base = OTHER; note = 2' fluoro-modified nucleoside
  modified_base 5: mod_base = OTHER; note = 2' O-methyl modified nucleoside
  modified_base 6: mod_base = OTHER; note = 2' fluoro-modified nucleoside
  modified_base 7: mod_base = OTHER; note = 2' O-methyl modified nucleoside
  modified_base 8: mod_base = OTHER; note = 2' fluoro-modified nucleoside
  modified_base 9: mod_base = OTHER; note = 2' O-methyl modified nucleoside
  modified_base 10: mod_base = OTHER; note = 2' fluoro-modified nucleoside
  modified_base 11: mod_base = OTHER; note = 2' O-methyl modified nucleoside
  modified_base 12: mod_base = OTHER; note = 2' O-methyl modified nucleoside
  modified_base 13: mod_base = OTHER; note = 2' O-methyl modified nucleoside
  modified_base 14: mod_base = OTHER; note = 2' fluoro-modified nucleoside
  modified_base 15: mod_base = OTHER; note = 2' O-methyl modified nucleoside
  modified_base 16: mod_base = OTHER; note = 2' fluoro-modified nucleoside
  modified_base 17: mod_base = OTHER; note = 2' O-methyl modified nucleoside
  modified_base 18: mod_base = OTHER; note = 2' fluoro-modified nucleoside
  modified_base 19: mod_base = OTHER; note = 2' O-methyl modified nucleoside
  modified_base 19..20: mod_base = OTHER; note = Phosphorothioate linkage
  modified_base 20: mod_base = OTHER; note = 2' O-methyl modified nucleoside
  modified_base 20..21: mod_base = OTHER; note = Phosphorothioate linkage
  modified_base 21: mod_base = OTHER; note = 2' O-methyl modified nucleoside
  source 1..21: mol_type = other RNA
tgccagtgtagttccccagtt

SEQ ID NO: 11276 - RNA, 21 nt, synthetic construct
  misc_feature 1..21: note = Description of Artificial Sequence: Synthetic oligonucleotide
  modified_base 1: mod_base = OTHER; note = 2' O-methyl modified nucleoside
  modified_base 1..2: mod_base = OTHER; note = Phosphorothioate linkage
  modified_base 2: mod_base = OTHER; note = 2' fluoro-modified nucleoside
  modified_base 2..3: mod_base = OTHER; note = Phosphorothioate linkage
  modified_base 3: mod_base = OTHER; note = 2' O-methyl modified nucleoside
  modified_base 4: mod_base = OTHER; note = 2' fluoro-modified nucleoside
  modified_base 5: mod_base = OTHER; note = 2' O-methyl modified nucleoside
  modified_base 6: mod_base = OTHER; note = 2' fluoro-modified nucleoside
  modified_base 7: mod_base = OTHER; note = 2' O-methyl modified nucleoside
  modified_base 8: mod_base = OTHER; note = 2' fluoro-modified nucleoside
  modified_base 9: mod_base = OTHER; note = 2' O-methyl modified nucleoside
  modified_base 10: mod_base = OTHER; note = 2' fluoro-modified nucleoside
  modified_base 11: mod_base = OTHER; note = 2' O-methyl modified nucleoside
  modified_base 12: mod_base = OTHER; note = 2' O-methyl modified nucleoside
  modified_base 13: mod_base = OTHER; note = 2' O-methyl modified nucleoside
  modified_base 14: mod_base = OTHER; note = 2' fluoro-modified nucleoside
  modified_base 15: mod_base = OTHER; note = 2' O-methyl modified nucleoside
  modified_base 16: mod_base = OTHER; note = 2' fluoro-modified nucleoside
  modified_base 17: mod_base = OTHER; note = 2' O-methyl modified nucleoside
  modified_base 18: mod_base = OTHER; note = 2' fluoro-modified nucleoside
  modified_base 19: mod_base = OTHER; note = 2' O-methyl modified nucleoside
  modified_base 19..20: mod_base = OTHER; note = Phosphorothioate linkage
  modified_base 20: mod_base = OTHER; note = 2' O-methyl modified nucleoside
  modified_base 20..21: mod_base = OTHER; note = Phosphorothioate linkage
  modified_base 21: mod_base = OTHER; note = 2' O-methyl modified nucleoside
  source 1..21: mol_type = other RNA
tattgccagtgtagttccctt

SEQ ID NO: 11277 - RNA, 21 nt, synthetic construct
  misc_feature 1..21: note = Description of Artificial Sequence: Synthetic oligonucleotide
  modified_base 1: mod_base = OTHER; note = 2' O-methyl modified nucleoside
  modified_base 1..2: mod_base = OTHER; note = Phosphorothioate linkage
  modified_base 2: mod_base = OTHER; note = 2' fluoro-modified nucleoside
  modified_base 2..3: mod_base = OTHER; note = Phosphorothioate linkage
  modified_base 3: mod_base = OTHER; note = 2' O-methyl modified nucleoside
  modified_base 4: mod_base = OTHER; note = 2' fluoro-modified nucleoside
  modified_base 5: mod_base = OTHER; note = 2' O-methyl modified nucleoside
  modified_base 6: mod_base = OTHER; note = 2' fluoro-modified nucleoside
  modified_base 7: mod_base = OTHER; note = 2' O-methyl modified nucleoside
  modified_base 8: mod_base = OTHER; note = 2' fluoro-modified nucleoside
  modified_base 9: mod_base = OTHER; note = 2' O-methyl modified nucleoside
  modified_base 10: mod_base = OTHER; note = 2' fluoro-modified nucleoside
  modified_base 11: mod_base = OTHER; note = 2' O-methyl modified nucleoside
  modified_base 12: mod_base = OTHER; note = 2' O-methyl modified nucleoside
  modified_base 13: mod_base = OTHER; note = 2' O-methyl modified nucleoside
  modified_base 14: mod_base = OTHER; note = 2' fluoro-modified nucleoside
  modified_base 15: mod_base = OTHER; note = 2' O-methyl modified nucleoside
  modified_base 16: mod_base = OTHER; note = 2' fluoro-modified nucleoside
  modified_base 17: mod_base = OTHER; note = 2' O-methyl modified nucleoside
  modified_base 18: mod_base = OTHER; note = 2' fluoro-modified nucleoside
  modified_base 19: mod_base = OTHER; note = 2' O-methyl modified nucleoside
  modified_base 19..20: mod_base = OTHER; note = Phosphorothioate linkage
  modified_base 20: mod_base = OTHER; note = 2' O-methyl modified nucleoside
  modified_base 20..21: mod_base = OTHER; note = Phosphorothioate linkage
  modified_base 21: mod_base = OTHER; note = 2' O-methyl modified nucleoside
  source 1..21: mol_type = other RNA
tcacattgccagtgtagtttt

SEQ ID NO: 11278 - RNA, 21 nt, synthetic construct
  misc_feature 1..21: note = Description of Artificial Sequence: Synthetic oligonucleotide
  modified_base 1: mod_base = OTHER; note = 2' O-methyl modified nucleoside
  modified_base 1..2: mod_base = OTHER; note = Phosphorothioate linkage
  modified_base 2: mod_base = OTHER; note = 2' fluoro-modified nucleoside
  modified_base 2..3: mod_base = OTHER; note = Phosphorothioate linkage
  modified_base 3: mod_base = OTHER; note = 2' O-methyl modified nucleoside
  modified_base 4: mod_base = OTHER; note = 2' fluoro-modified nucleoside
  modified_base 5: mod_base = OTHER; note = 2' O-methyl modified nucleoside
  modified_base 6: mod_base = OTHER; note = 2' fluoro-modified nucleoside
  modified_base 7: mod_base = OTHER; note = 2' O-methyl modified nucleoside
  modified_base 8: mod_base = OTHER; note = 2' fluoro-modified nucleoside
  modified_base 9: mod_base = OTHER; note = 2' O-methyl modified nucleoside
  modified_base 10: mod_base = OTHER; note = 2' fluoro-modified nucleoside
  modified_base 11: mod_base = OTHER; note = 2' O-methyl modified nucleoside
  modified_base 12: mod_base = OTHER; note = 2' O-methyl modified nucleoside
  modified_base 13: mod_base = OTHER; note = 2' O-methyl modified nucleoside
  modified_base 14: mod_base = OTHER; note = 2' fluoro-modified nucleoside
  modified_base 15: mod_base = OTHER; note = 2' O-methyl modified nucleoside
  modified_base 16: mod_base = OTHER; note = 2' fluoro-modified nucleoside
  modified_base 17: mod_base = OTHER; note = 2' O-methyl modified nucleoside
  modified_base 18: mod_base = OTHER; note = 2' fluoro-modified nucleoside
  modified_base 19: mod_base = OTHER; note = 2' O-methyl modified nucleoside
  modified_base 19..20: mod_base = OTHER; note = Phosphorothioate linkage
  modified_base 20: mod_base = OTHER; note = 2' O-methyl modified nucleoside
  modified_base 20..21: mod_base = OTHER; note = Phosphorothioate linkage
  modified_base 21: mod_base = OTHER; note = 2' O-methyl modified nucleoside
  source 1..21: mol_type = other RNA
tcccacattgccagtgtagtt

SEQ ID NO: 11279 - RNA, 21 nt, synthetic construct
  misc_feature 1..21: note = Description of Artificial Sequence: Synthetic oligonucleotide
  modified_base 1: mod_base = OTHER; note = 2' O-methyl modified nucleoside
  modified_base 1..2: mod_base = OTHER; note = Phosphorothioate linkage
  modified_base 2: mod_base = OTHER; note = 2' fluoro-modified nucleoside
  modified_base 2..3: mod_base = OTHER; note = Phosphorothioate linkage
  modified_base 3: mod_base = OTHER; note = 2' O-methyl modified nucleoside
  modified_base 4: mod_base = OTHER; note = 2' fluoro-modified nucleoside
  modified_base 5: mod_base = OTHER; note = 2' O-methyl modified nucleoside
  modified_base 6: mod_base = OTHER; note = 2' fluoro-modified nucleoside
  modified_base 7: mod_base = OTHER; note = 2' O-methyl modified nucleoside
  modified_base 8: mod_base = OTHER; note = 2' fluoro-modified nucleoside
  modified_base 9: mod_base = OTHER; note = 2' O-methyl modified nucleoside
  modified_base 10: mod_base = OTHER; note = 2' fluoro-modified nucleoside
  modified_base 11: mod_base = OTHER; note = 2' O-methyl modified nucleoside
  modified_base 12: mod_base = OTHER; note = 2' O-methyl modified nucleoside
  modified_base 13: mod_base = OTHER; note = 2' O-methyl modified nucleoside
  modified_base 14: mod_base = OTHER; note = 2' fluoro-modified nucleoside
  modified_base 15: mod_base = OTHER; note = 2' O-methyl modified nucleoside
  modified_base 16: mod_base = OTHER; note = 2' fluoro-modified nucleoside
  modified_base 17: mod_base = OTHER; note = 2' O-methyl modified nucleoside
  modified_base 18: mod_base = OTHER; note = 2' fluoro-modified nucleoside
  modified_base 19: mod_base = OTHER; note = 2' O-methyl modified nucleoside
  modified_base 19..20: mod_base = OTHER; note = Phosphorothioate linkage
  modified_base 20: mod_base = OTHER; note = 2' O-methyl modified nucleoside
  modified_base 20..21: mod_base = OTHER; note = Phosphorothioate linkage
  modified_base 21: mod_base = OTHER; note = 2' O-methyl modified nucleoside
  source 1..21: mol_type = other RNA
tcgttccccacattgccagtt

SEQ ID NO: 11280 - RNA, 21 nt, synthetic construct
  misc_feature 1..21: note = Description of Artificial Sequence: Synthetic oligonucleotide
  modified_base 1: mod_base = OTHER; note = 2' O-methyl modified nucleoside
  modified_base 1..2: mod_base = OTHER; note = Phosphorothioate linkage
  modified_base 2: mod_base = OTHER; note = 2' fluoro-modified nucleoside
  modified_base 2..3: mod_base = OTHER; note = Phosphorothioate linkage
  modified_base 3: mod_base = OTHER; note = 2' O-methyl modified nucleoside
  modified_base 4: mod_base = OTHER; note = 2' fluoro-modified nucleoside
  modified_base 5: mod_base = OTHER; note = 2' O-methyl modified nucleoside
  modified_base 6: mod_base = OTHER; note = 2' fluoro-modified nucleoside
  modified_base 7: mod_base = OTHER; note = 2' O-methyl modified nucleoside
  modified_base 8: mod_base = OTHER; note = 2' fluoro-modified nucleoside
  modified_base 9: mod_base = OTHER; note = 2' O-methyl modified nucleoside
  modified_base 10: mod_base = OTHER; note = 2' fluoro-modified nucleoside
  modified_base 11: mod_base = OTHER; note = 2' O-methyl modified nucleoside
  modified_base 12: mod_base = OTHER; note = 2' O-methyl modified nucleoside
  modified_base 13: mod_base = OTHER; note = 2' O-methyl modified nucleoside
  modified_base 14: mod_base = OTHER; note = 2' fluoro-modified nucleoside
  modified_base 15: mod_base = OTHER; note = 2' O-methyl modified nucleoside
  modified_base 16: mod_base = OTHER; note = 2' fluoro-modified nucleoside
  modified_base 17: mod_base = OTHER; note = 2' O-methyl modified nucleoside
  modified_base 18: mod_base = OTHER; note = 2' fluoro-modified nucleoside
  modified_base 19: mod_base = OTHER; note = 2' O-methyl modified nucleoside
  modified_base 19..20: mod_base = OTHER; note = Phosphorothioate linkage
  modified_base 20: mod_base = OTHER; note = 2' O-methyl modified nucleoside
  modified_base 20..21: mod_base = OTHER; note = Phosphorothioate linkage
  modified_base 21: mod_base = OTHER; note = 2' O-methyl modified nucleoside
  source 1..21: mol_type = other RNA
ttcgttccccacattgccatt

SEQ ID NO: 11281 - RNA, 21 nt, synthetic construct
  misc_feature 1..21: note = Description of Artificial Sequence: Synthetic oligonucleotide
  modified_base 1: mod_base = OTHER; note = 2' O-methyl modified nucleoside
  modified_base 1..2: mod_base = OTHER; note = Phosphorothioate linkage
  modified_base 2: mod_base = OTHER; note = 2' fluoro-modified nucleoside
  modified_base 2..3: mod_base = OTHER; note = Phosphorothioate linkage
  modified_base 3: mod_base = OTHER; note = 2' O-methyl modified nucleoside
  modified_base 4: mod_base = OTHER; note = 2' fluoro-modified nucleoside
  modified_base 5: mod_base = OTHER; note = 2' O-methyl modified nucleoside
  modified_base 6: mod_base = OTHER; note = 2' fluoro-modified nucleoside
  modified_base 7: mod_base = OTHER; note = 2' O-methyl modified nucleoside
  modified_base 8: mod_base = OTHER; note = 2' fluoro-modified nucleoside
  modified_base 9: mod_base = OTHER; note = 2' O-methyl modified nucleoside
  modified_base 10: mod_base = OTHER; note = 2' fluoro-modified nucleoside
  modified_base 11: mod_base = OTHER; note = 2' O-methyl modified nucleoside
  modified_base 12: mod_base = OTHER; note = 2' O-methyl modified nucleoside
  modified_base 13: mod_base = OTHER; note = 2' O-methyl modified nucleoside
  modified_base 14: mod_base = OTHER; note = 2' fluoro-modified nucleoside
  modified_base 15: mod_base = OTHER; note = 2' O-methyl modified nucleoside
  modified_base 16: mod_base = OTHER; note = 2' fluoro-modified nucleoside
  modified_base 17: mod_base = OTHER; note = 2' O-methyl modified nucleoside
  modified_base 18: mod_base = OTHER; note = 2' fluoro-modified nucleoside
  modified_base 19: mod_base = OTHER; note = 2' O-methyl modified nucleoside
  modified_base 19..20: mod_base = OTHER; note = Phosphorothioate linkage
  modified_base 20: mod_base = OTHER; note = 2' O-methyl modified nucleoside
  modified_base 20..21: mod_base = OTHER; note = Phosphorothioate linkage
  modified_base 21: mod_base = OTHER; note = 2' O-methyl modified nucleoside
  source 1..21: mol_type = other RNA
tgtcgttccccacattgcctt

SEQ ID NO: 11282 - RNA, 21 nt, synthetic construct
  misc_feature 1..21: note = Description of Artificial Sequence: Synthetic oligonucleotide
  modified_base 1: mod_base = OTHER; note = 2' O-methyl modified nucleoside
  modified_base 1..2: mod_base = OTHER; note = Phosphorothioate linkage
  modified_base 2: mod_base = OTHER; note = 2' fluoro-modified nucleoside
  modified_base 2..3: mod_base = OTHER; note = Phosphorothioate linkage
  modified_base 3: mod_base = OTHER; note = 2' O-methyl modified nucleoside
  modified_base 4: mod_base = OTHER; note = 2' fluoro-modified nucleoside
  modified_base 5: mod_base = OTHER; note = 2' O-methyl modified nucleoside
  modified_base 6: mod_base = OTHER; note = 2' fluoro-modified nucleoside
  modified_base 7: mod_base = OTHER; note = 2' O-methyl modified nucleoside
  modified_base 8: mod_base = OTHER; note = 2' fluoro-modified nucleoside
  modified_base 9: mod_base = OTHER; note = 2' O-methyl modified nucleoside
  modified_base 10: mod_base = OTHER; note = 2' fluoro-modified nucleoside
  modified_base 11: mod_base = OTHER; note = 2' O-methyl modified nucleoside
  modified_base 12: mod_base = OTHER; note = 2' O-methyl modified nucleoside
  modified_base 13: mod_base = OTHER; note = 2' O-methyl modified nucleoside
  modified_base 14: mod_base = OTHER; note = 2' fluoro-modified nucleoside
  modified_base 15: mod_base = OTHER; note = 2' O-methyl modified nucleoside
  modified_base 16: mod_base = OTHER; note = 2' fluoro-modified nucleoside
  modified_base 17: mod_base = OTHER; note = 2' O-methyl modified nucleoside
  modified_base 18: mod_base = OTHER; note = 2' fluoro-modified nucleoside
  modified_base 19: mod_base = OTHER; note = 2' O-methyl modified nucleoside
  modified_base 19..20: mod_base = OTHER; note = Phosphorothioate linkage
  modified_base 20: mod_base = OTHER; note = 2' O-methyl modified nucleoside
  modified_base 20..21: mod_base = OTHER; note = Phosphorothioate linkage
  modified_base 21: mod_base = OTHER; note = 2' O-methyl modified nucleoside
  source 1..21: mol_type = other RNA
tcgtcgttccccacattgctt

SEQ ID NO: 11283 - RNA, 21 nt, synthetic construct
  misc_feature 1..21: note = Description of Artificial Sequence: Synthetic oligonucleotide
  modified_base 1: mod_base = OTHER; note = 2' O-methyl modified nucleoside
  modified_base 1..2: mod_base = OTHER; note = Phosphorothioate linkage
  modified_base 2: mod_base = OTHER; note = 2' fluoro-modified nucleoside
  modified_base 2..3: mod_base = OTHER; note = Phosphorothioate linkage
  modified_base 3: mod_base = OTHER; note = 2' O-methyl modified nucleoside
  modified_base 4: mod_base = OTHER; note = 2' fluoro-modified nucleoside
  modified_base 5: mod_base = OTHER; note = 2' O-methyl modified nucleoside
  modified_base 6: mod_base = OTHER; note = 2' fluoro-modified nucleoside
  modified_base 7: mod_base = OTHER; note = 2' O-methyl modified nucleoside
  modified_base 8: mod_base = OTHER; note = 2' fluoro-modified nucleoside
  modified_base 9: mod_base = OTHER; note = 2' O-methyl modified nucleoside
  modified_base 10: mod_base = OTHER; note = 2' fluoro-modified nucleoside
  modified_base 11: mod_base = OTHER; note = 2' O-methyl modified nucleoside
  modified_base 12: mod_base = OTHER; note = 2' O-methyl modified nucleoside
  modified_base 13: mod_base = OTHER; note = 2' O-methyl modified nucleoside
  modified_base 14: mod_base = OTHER; note = 2' fluoro-modified nucleoside
  modified_base 15: mod_base = OTHER; note = 2' O-methyl modified nucleoside
  modified_base 16: mod_base = OTHER; note = 2' fluoro-modified nucleoside
  modified_base 17: mod_base = OTHER; note = 2' O-methyl modified nucleoside
  modified_base 18: mod_base = OTHER; note = 2' fluoro-modified nucleoside
  modified_base 19: mod_base = OTHER; note = 2' O-methyl modified nucleoside
  modified_base 19..20: mod_base = OTHER; note = Phosphorothioate linkage
  modified_base 20: mod_base = OTHER; note = 2' O-methyl modified nucleoside
  modified_base 20..21: mod_base = OTHER; note = Phosphorothioate linkage
  modified_base 21: mod_base = OTHER; note = 2' O-methyl modified nucleoside
  source 1..21: mol_type = other RNA
tgcgtcgttccccacattgtt

SEQ ID NO: 11284 - RNA, 21 nt, synthetic construct
  misc_feature 1..21: note = Description of Artificial Sequence: Synthetic oligonucleotide
  modified_base 1: mod_base = OTHER; note = 2' O-methyl modified nucleoside
  modified_base 1..2: mod_base = OTHER; note = Phosphorothioate linkage
  modified_base 2: mod_base = OTHER; note = 2' fluoro-modified nucleoside
  modified_base 2..3: mod_base = OTHER; note = Phosphorothioate linkage
  modified_base 3: mod_base = OTHER; note = 2' O-methyl modified nucleoside
  modified_base 4: mod_base = OTHER; note = 2' fluoro-modified nucleoside
  modified_base 5: mod_base = OTHER; note = 2' O-methyl modified nucleoside
  modified_base 6: mod_base = OTHER; note = 2' fluoro-modified nucleoside
  modified_base 7: mod_base = OTHER; note = 2' O-methyl modified nucleoside
  modified_base 8: mod_base = OTHER; note = 2' fluoro-modified nucleoside
  modified_base 9: mod_base = OTHER; note = 2' O-methyl modified nucleoside
  modified_base 10: mod_base = OTHER; note = 2' fluoro-modified nucleoside
  modified_base 11: mod_base = OTHER; note = 2' O-methyl modified nucleoside
  modified_base 12: mod_base = OTHER; note = 2' O-methyl modified nucleoside
  modified_base 13: mod_base = OTHER; note = 2' O-methyl modified nucleoside
  modified_base 14: mod_base = OTHER; note = 2' fluoro-modified nucleoside
  modified_base 15: mod_base = OTHER; note = 2' O-methyl modified nucleoside
  modified_base 16: mod_base = OTHER; note = 2' fluoro-modified nucleoside
  modified_base 17: mod_base = OTHER; note = 2' O-methyl modified nucleoside
  modified_base 18: mod_base = OTHER; note = 2' fluoro-modified nucleoside
  modified_base 19: mod_base = OTHER; note = 2' O-methyl modified nucleoside
  modified_base 19..20: mod_base = OTHER; note = Phosphorothioate linkage
  modified_base 20: mod_base = OTHER; note = 2' O-methyl modified nucleoside
  modified_base 20..21: mod_base = OTHER; note = Phosphorothioate linkage
  modified_base 21: mod_base = OTHER; note = 2' O-methyl modified nucleoside
  source 1..21: mol_type = other RNA
tctggagggcgtcgttccctt

SEQ ID NO: 11285 - RNA, 21 nt, synthetic construct
  misc_feature 1..21: note = Description of Artificial Sequence: Synthetic oligonucleotide
  modified_base 1: mod_base = OTHER; note = 2' O-methyl modified nucleoside
  modified_base 1..2: mod_base = OTHER; note = Phosphorothioate linkage
  modified_base 2: mod_base = OTHER; note = 2' fluoro-modified nucleoside
  modified_base 2..3: mod_base = OTHER; note = Phosphorothioate linkage
  modified_base 3: mod_base = OTHER; note = 2' O-methyl modified nucleoside
  modified_base 4: mod_base = OTHER; note = 2' fluoro-modified nucleoside
  modified_base 5: mod_base = OTHER; note = 2' O-methyl modified nucleoside
  modified_base 6: mod_base = OTHER; note = 2' fluoro-modified nucleoside
  modified_base 7: mod_base = OTHER; note = 2' O-methyl modified nucleoside
  modified_base 8: mod_base = OTHER; note = 2' fluoro-modified nucleoside
  modified_base 9: mod_base = OTHER; note = 2' O-methyl modified nucleoside
  modified_base 10: mod_base = OTHER; note = 2' fluoro-modified nucleoside
  modified_base 11: mod_base = OTHER; note = 2' O-methyl modified nucleoside
  modified_base 12: mod_base = OTHER; note = 2' O-methyl modified nucleoside
  modified_base 13: mod_base = OTHER; note = 2' O-methyl modified nucleoside
  modified_base 14: mod_base = OTHER; note = 2' fluoro-modified nucleoside
  modified_base 15: mod_base = OTHER; note = 2' O-methyl modified nucleoside
  modified_base 16: mod_base = OTHER; note = 2' fluoro-modified nucleoside
  modified_base 17: mod_base = OTHER; note = 2' O-methyl modified nucleoside
  modified_base 18: mod_base = OTHER; note = 2' fluoro-modified nucleoside
  modified_base 19: mod_base = OTHER; note = 2' O-methyl modified nucleoside
  modified_base 19..20: mod_base = OTHER; note = Phosphorothioate linkage
  modified_base 20: mod_base = OTHER; note = 2' O-methyl modified nucleoside
  modified_base 20..21: mod_base = OTHER; note = Phosphorothioate linkage
  modified_base 21: mod_base = OTHER; note = 2' O-methyl modified nucleoside
  source 1..21: mol_type = other RNA
ttactggagggcgtcgttctt

SEQ ID NO: 11286 - RNA, 21 nt, synthetic construct
  misc_feature 1..21: note = Description of Artificial Sequence: Synthetic oligonucleotide
  modified_base 1: mod_base = OTHER; note = 2' O-methyl modified nucleoside
  modified_base 1..2: mod_base = OTHER; note = Phosphorothioate linkage
  modified_base 2: mod_base = OTHER; note = 2' fluoro-modified nucleoside
  modified_base 2..3: mod_base = OTHER; note = Phosphorothioate linkage
  modified_base 3: mod_base = OTHER; note = 2' O-methyl modified nucleoside
  modified_base 4: mod_base = OTHER; note = 2' fluoro-modified nucleoside
  modified_base 5: mod_base = OTHER; note = 2' O-methyl modified nucleoside
  modified_base 6: mod_base = OTHER; note = 2' fluoro-modified nucleoside
  modified_base 7: mod_base = OTHER; note = 2' O-methyl modified nucleoside
  modified_base 8: mod_base = OTHER; note = 2' fluoro-modified nucleoside
  modified_base 9: mod_base = OTHER; note = 2' O-methyl modified nucleoside
  modified_base 10: mod_base = OTHER; note = 2' fluoro-modified nucleoside
  modified_base 11: mod_base = OTHER; note = 2' O-methyl modified nucleoside
  modified_base 12: mod_base = OTHER; note = 2' O-methyl modified nucleoside
  modified_base 13: mod_base = OTHER; note = 2' O-methyl modified nucleoside
  modified_base 14: mod_base = OTHER; note = 2' fluoro-modified nucleoside
  modified_base 15: mod_base = OTHER; note = 2' O-methyl modified nucleoside
  modified_base 16: mod_base = OTHER; note = 2' fluoro-modified nucleoside
  modified_base 17: mod_base = OTHER; note = 2' O-methyl modified nucleoside
  modified_base 18: mod_base = OTHER; note = 2' fluoro-modified nucleoside
  modified_base 19: mod_base = OTHER; note = 2' O-methyl modified nucleoside
  modified_base 19..20: mod_base = OTHER; note = Phosphorothioate linkage
  modified_base 20: mod_base = OTHER; note = 2' O-methyl modified nucleoside
  modified_base 20..21: mod_base = OTHER; note = Phosphorothioate linkage
  modified_base 21: mod_base = OTHER; note = 2' O-methyl modified nucleoside
  source 1..21: mol_type = other RNA
tatactggagggcgtcgtttt

SEQ ID NO: 11287 - RNA, 21 nt, synthetic construct
  misc_feature 1..21: note = Description of Artificial Sequence: Synthetic oligonucleotide
  modified_base 1: mod_base = OTHER; note = 2' O-methyl modified nucleoside
  modified_base 1..2: mod_base = OTHER; note = Phosphorothioate linkage
  modified_base 2: mod_base = OTHER; note = 2' fluoro-modified nucleoside
  modified_base 2..3: mod_base = OTHER; note = Phosphorothioate linkage
  modified_base 3: mod_base = OTHER; note = 2' O-methyl modified nucleoside
  modified_base 4: mod_base = OTHER; note = 2' fluoro-modified nucleoside
  modified_base 5: mod_base = OTHER; note = 2' O-methyl modified nucleoside
  modified_base 6: mod_base = OTHER; note = 2' fluoro-modified nucleoside
  modified_base 7: mod_base = OTHER; note = 2' O-methyl modified nucleoside
  modified_base 8: mod_base = OTHER; note = 2' fluoro-modified nucleoside
  modified_base 9: mod_base = OTHER; note = 2' O-methyl modified nucleoside
  modified_base 10: mod_base = OTHER; note = 2' fluoro-modified nucleoside
  modified_base 11: mod_base = OTHER; note = 2' O-methyl modified nucleoside
  modified_base 12: mod_base = OTHER; note = 2' O-methyl modified nucleoside
  modified_base 13: mod_base = OTHER; note = 2' O-methyl modified nucleoside
  modified_base 14: mod_base = OTHER; note = 2' fluoro-modified nucleoside
  modified_base 15: mod_base = OTHER; note = 2' O-methyl modified nucleoside
  modified_base 16: mod_base = OTHER; note = 2' fluoro-modified nucleoside
  modified_base 17: mod_base = OTHER; note = 2' O-methyl modified nucleoside
  modified_base 18: mod_base = OTHER; note = 2' fluoro-modified nucleoside
  modified_base 19: mod_base = OTHER; note = 2' O-methyl modified nucleoside
  modified_base 19..20: mod_base = OTHER; note = Phosphorothioate linkage
  modified_base 20: mod_base = OTHER; note = 2' O-methyl modified nucleoside
  modified_base 20..21: mod_base = OTHER; note = Phosphorothioate linkage
  modified_base 21: mod_base = OTHER; note = 2' O-methyl modified nucleoside
  source 1..21: mol_type = other RNA
tgatactggagggcgtcgttt

SEQ ID NO: 11288 - RNA, 21 nt, synthetic construct
  misc_feature 1..21: note = Description of Artificial Sequence: Synthetic oligonucleotide
  modified_base 1: mod_base = OTHER; note = 2' O-methyl modified nucleoside
  modified_base 1..2: mod_base = OTHER; note = Phosphorothioate linkage
  modified_base 2: mod_base = OTHER; note = 2' fluoro-modified nucleoside
  modified_base 2..3: mod_base = OTHER; note = Phosphorothioate linkage
  modified_base 3: mod_base = OTHER; note = 2' O-methyl modified nucleoside
  modified_base 4: mod_base = OTHER; note = 2' fluoro-modified nucleoside
  modified_base 5: mod_base = OTHER; note = 2' O-methyl modified nucleoside
  modified_base 6: mod_base = OTHER; note = 2' fluoro-modified nucleoside
  modified_base 7: mod_base = OTHER; note = 2' O-methyl modified nucleoside
  modified_base 8: mod_base = OTHER; note = 2' fluoro-modified nucleoside
  modified_base 9: mod_base = OTHER; note = 2' O-methyl modified nucleoside
  modified_base 10: mod_base = OTHER; note = 2' fluoro-modified nucleoside
  modified_base 11: mod_base = OTHER; note = 2' O-methyl modified nucleoside
  modified_base 12: mod_base = OTHER; note = 2' O-methyl modified nucleoside
  modified_base 13: mod_base = OTHER; note = 2' O-methyl modified nucleoside
  modified_base 14: mod_base = OTHER; note = 2' fluoro-modified nucleoside
  modified_base 15: mod_base = OTHER; note = 2' O-methyl modified nucleoside
  modified_base 16: mod_base = OTHER; note = 2' fluoro-modified nucleoside
  modified_base 17: mod_base = OTHER; note = 2' O-methyl modified nucleoside
  modified_base 18: mod_base = OTHER; note = 2' fluoro-modified nucleoside
  modified_base 19: mod_base = OTHER; note = 2' O-methyl modified nucleoside
  modified_base 19..20: mod_base = OTHER; note = Phosphorothioate linkage
  modified_base 20: mod_base = OTHER; note = 2' O-methyl modified nucleoside
  modified_base 20..21: mod_base = OTHER; note = Phosphorothioate linkage
  modified_base 21: mod_base = OTHER; note = 2' O-methyl modified nucleoside
  source 1..21: mol_type = other RNA
tgttatgatactggagggctt

SEQ ID NO: 11289 - RNA, 21 nt, synthetic construct
  misc_feature 1..21: note = Description of Artificial Sequence: Synthetic oligonucleotide
  modified_base 1: mod_base = OTHER; note = 2' O-methyl modified nucleoside
  modified_base 1..2: mod_base = OTHER; note = Phosphorothioate linkage
  modified_base 2: mod_base = OTHER; note = 2' fluoro-modified nucleoside
  modified_base 2..3: mod_base = OTHER; note = Phosphorothioate linkage
  modified_base 3: mod_base = OTHER; note = 2' O-methyl modified nucleoside
  modified_base 4: mod_base = OTHER; note = 2' fluoro-modified nucleoside
  modified_base 5: mod_base = OTHER; note = 2' O-methyl modified nucleoside
  modified_base 6: mod_base = OTHER; note = 2' fluoro-modified nucleoside
  modified_base 7: mod_base = OTHER; note = 2' O-methyl modified nucleoside
  modified_base 8: mod_base = OTHER; note = 2' fluoro-modified nucleoside
  modified_base 9: mod_base = OTHER; note = 2' O-methyl modified nucleoside
  modified_base 10: mod_base = OTHER; note = 2' fluoro-modified nucleoside
  modified_base 11: mod_base = OTHER; note = 2' O-methyl modified nucleoside
  modified_base 12: mod_base = OTHER; note = 2' O-methyl modified nucleoside
  modified_base 13: mod_base = OTHER; note = 2' O-methyl modified nucleoside
  modified_base 14: mod_base = OTHER; note = 2' fluoro-modified nucleoside
  modified_base 15: mod_base = OTHER; note = 2' O-methyl modified nucleoside
  modified_base 16: mod_base = OTHER; note = 2' fluoro-modified nucleoside
  modified_base 17: mod_base = OTHER; note = 2' O-methyl modified nucleoside
  modified_base 18: mod_base = OTHER; note = 2' fluoro-modified nucleoside
  modified_base 19: mod_base = OTHER; note = 2' O-methyl modified nucleoside
  modified_base 19..20: mod_base = OTHER; note = Phosphorothioate linkage
  modified_base 20: mod_base = OTHER; note = 2' O-methyl modified nucleoside
  modified_base 20..21: mod_base = OTHER; note = Phosphorothioate linkage
  modified_base 21: mod_base = OTHER; note = 2' O-methyl modified nucleoside
  source 1..21: mol_type = other RNA
tctgtgttgttatgatacttt

SEQ ID NO: 11290 - RNA, 21 nt, synthetic construct
  misc_feature 1..21: note = Description of Artificial Sequence: Synthetic oligonucleotide
  modified_base 1: mod_base = OTHER; note = 2' O-methyl modified nucleoside
  modified_base 1..2: mod_base = OTHER; note = Phosphorothioate linkage
  modified_base 2: mod_base = OTHER; note = 2' fluoro-modified nucleoside
  modified_base 2..3: mod_base = OTHER; note = Phosphorothioate linkage
  modified_base 3: mod_base = OTHER; note = 2' O-methyl modified nucleoside
  modified_base 4: mod_base = OTHER; note = 2' fluoro-modified nucleoside
  modified_base 5: mod_base = OTHER; note = 2' O-methyl modified nucleoside
  modified_base 6: mod_base = OTHER; note = 2' fluoro-modified nucleoside
  modified_base 7: mod_base = OTHER; note = 2' O-methyl modified nucleoside
  modified_base 8: mod_base = OTHER; note = 2' fluoro-modified nucleoside
  modified_base 9: mod_base = OTHER; note = 2' O-methyl modified nucleoside
  modified_base 10: mod_base = OTHER; note = 2' fluoro-modified nucleoside
  modified_base 11: mod_base = OTHER; note = 2' O-methyl modified nucleoside
  modified_base 12: mod_base = OTHER; note = 2' O-methyl modified nucleoside
  modified_base 13: mod_base = OTHER; note = 2' O-methyl modified nucleoside
  modified_base 14: mod_base = OTHER; note = 2' fluoro-modified nucleoside
  modified_base 15: mod_base = OTHER; note = 2' O-methyl modified nucleoside
  modified_base 16: mod_base = OTHER; note = 2' fluoro-modified nucleoside
  modified_base 17: mod_base = OTHER; note = 2' O-methyl modified nucleoside
  modified_base 18: mod_base = OTHER; note = 2' fluoro-modified nucleoside
  modified_base 19: mod_base = OTHER; note = 2' O-methyl modified nucleoside
  modified_base 19..20: mod_base = OTHER; note = Phosphorothioate linkage
  modified_base 20: mod_base = OTHER; note = 2' O-methyl modified nucleoside
  modified_base 20..21: mod_base = OTHER; note = Phosphorothioate linkage
  modified_base 21: mod_base = OTHER; note = 2' O-methyl modified nucleoside
  source 1..21: mol_type = other RNA
tgtagccacctttgcggagtt

SEQ ID NO: 11291 - RNA, 21 nt, synthetic construct
  misc_feature 1..21: note = Description of Artificial Sequence: Synthetic oligonucleotide
  modified_base 1: mod_base = OTHER; note = 2' O-methyl modified nucleoside
  modified_base 1..2: mod_base = OTHER; note = Phosphorothioate linkage
  modified_base 2: mod_base = OTHER; note = 2' fluoro-modified nucleoside
  modified_base 2..3: mod_base = OTHER; note = Phosphorothioate linkage
  modified_base 3: mod_base = OTHER; note = 2' O-methyl modified nucleoside
  modified_base 4: mod_base = OTHER; note = 2' fluoro-modified nucleoside
  modified_base 5: mod_base = OTHER; note = 2' O-methyl modified nucleoside
  modified_base 6: mod_base = OTHER; note = 2' fluoro-modified nucleoside
  modified_base 7: mod_base = OTHER; note = 2' O-methyl modified nucleoside
  modified_base 8: mod_base = OTHER; note = 2' fluoro-modified nucleoside
  modified_base 9: mod_base = OTHER; note = 2' O-methyl modified nucleoside
  modified_base 10: mod_base = OTHER; note = 2' fluoro-modified nucleoside
  modified_base 11: mod_base = OTHER; note = 2' O-methyl modified nucleoside
  modified_base 12: mod_base = OTHER; note = 2' O-methyl modified nucleoside
  modified_base 13: mod_base = OTHER; note = 2' O-methyl modified nucleoside
  modified_base 14: mod_base = OTHER; note = 2' fluoro-modified nucleoside
  modified_base 15: mod_base = OTHER; note = 2' O-methyl modified nucleoside
  modified_base 16: mod_base = OTHER; note = 2' fluoro-modified nucleoside
  modified_base 17: mod_base = OTHER; note = 2' O-methyl modified nucleoside
  modified_base 18: mod_base = OTHER; note = 2' fluoro-modified nucleoside
  modified_base 19: mod_base = OTHER; note = 2' O-methyl modified nucleoside
  modified_base 19..20: mod_base = OTHER; note = Phosphorothioate linkage
  modified_base 20: mod_base = OTHER; note = 2' O-methyl modified nucleoside
  modified_base 20..21: mod_base = OTHER; note = Phosphorothioate linkage
  modified_base 21: mod_base = OTHER; note = 2' O-methyl modified nucleoside
  source 1..21: mol_type = other RNA
tagtagccacctttgcggatt

SEQ ID NO: 11292 - RNA, 21 nt, synthetic construct
  misc_feature 1..21: note = Description of Artificial Sequence: Synthetic oligonucleotide
  modified_base 1: mod_base = OTHER; note = 2' O-methyl modified nucleoside
  modified_base 1..2: mod_base = OTHER; note = Phosphorothioate linkage
  modified_base 2: mod_base = OTHER; note = 2' fluoro-modified nucleoside
  modified_base 2..3: mod_base = OTHER; note = Phosphorothioate linkage
  modified_base 3: mod_base = OTHER; note = 2' O-methyl modified nucleoside
  modified_base 4: mod_base = OTHER; note = 2' fluoro-modified nucleoside
  modified_base 5: mod_base = OTHER; note = 2' O-methyl modified nucleoside
  modified_base 6: mod_base = OTHER; note = 2' fluoro-modified nucleoside
  modified_base 7: mod_base = OTHER; note = 2' O-methyl modified nucleoside
  modified_base 8: mod_base = OTHER; note = 2' fluoro-modified nucleoside
  modified_base 9: mod_base = OTHER; note = 2' O-methyl modified nucleoside
  modified_base 10: mod_base = OTHER; note = 2' fluoro-modified nucleoside
  modified_base 11: mod_base = OTHER; note = 2' O-methyl modified nucleoside
  modified_base 12: mod_base = OTHER; note = 2' O-methyl modified nucleoside
  modified_base 13: mod_base = OTHER; note = 2' O-methyl modified nucleoside
  modified_base 14: mod_base = OTHER; note = 2' fluoro-modified nucleoside
  modified_base 15: mod_base = OTHER; note = 2' O-methyl modified nucleoside
  modified_base 16: mod_base = OTHER; note = 2' fluoro-modified nucleoside
  modified_base 17: mod_base = OTHER; note = 2' O-methyl modified nucleoside
  modified_base 18: mod_base = OTHER; note = 2' fluoro-modified nucleoside
  modified_base 19: mod_base = OTHER; note = 2' O-methyl modified nucleoside
  modified_base 19..20: mod_base = OTHER; note = Phosphorothioate linkage
  modified_base 20: mod_base = OTHER; note = 2' O-methyl modified nucleoside
  modified_base 20..21: mod_base = OTHER; note = Phosphorothioate linkage
  modified_base 21: mod_base = OTHER; note = 2' O-methyl modified nucleoside
  source 1..21: mol_type = other RNA
ttaccagtagccacctttgtt

SEQ ID NO: 11293 - RNA, 21 nt, synthetic construct
  misc_feature 1..21: note = Description of Artificial Sequence: Synthetic oligonucleotide
  modified_base 1: mod_base = OTHER; note = 2' O-methyl modified nucleoside
  modified_base 1..2: mod_base = OTHER; note = Phosphorothioate linkage
  modified_base 2: mod_base = OTHER; note = 2' fluoro-modified nucleoside
  modified_base 2..3: mod_base = OTHER; note = Phosphorothioate linkage
  modified_base 3: mod_base = OTHER; note = 2' O-methyl modified nucleoside
  modified_base 4: mod_base = OTHER; note = 2' fluoro-modified nucleoside
  modified_base 5: mod_base = OTHER; note = 2' O-methyl modified nucleoside
  modified_base 6: mod_base = OTHER; note = 2' fluoro-modified nucleoside
  modified_base 7: mod_base = OTHER; note = 2' O-methyl modified nucleoside
  modified_base 8: mod_base = OTHER; note = 2' fluoro-modified nucleoside
  modified_base 9: mod_base = OTHER; note = 2' O-methyl modified nucleoside
  modified_base 10: mod_base = OTHER; note = 2' fluoro-modified nucleoside
  modified_base 11: mod_base = OTHER; note = 2' O-methyl modified nucleoside
  modified_base 12: mod_base = OTHER; note = 2' O-methyl modified nucleoside
  modified_base 13: mod_base = OTHER; note = 2' O-methyl modified nucleoside
  modified_base 14: mod_base = OTHER; note = 2' fluoro-modified nucleoside
  modified_base 15: mod_base = OTHER; note = 2' O-methyl modified nucleoside
  modified_base 16: mod_base = OTHER; note = 2' fluoro-modified nucleoside
  modified_base 17: mod_base = OTHER; note = 2' O-methyl modified nucleoside
  modified_base 18: mod_base = OTHER; note = 2' fluoro-modified nucleoside
  modified_base 19: mod_base = OTHER; note = 2' O-methyl modified nucleoside
  modified_base 19..20: mod_base = OTHER; note = Phosphorothioate linkage
  modified_base 20: mod_base = OTHER; note = 2' O-methyl modified nucleoside
  modified_base 20..21: mod_base = OTHER; note = Phosphorothioate linkage
  modified_base 21: mod_base = OTHER; note = 2' O-methyl modified nucleoside
  source 1..21: mol_type = other RNA
ttgtaccagtagccacctttt

SEQ ID NO: 11294 - RNA, 21 nt, synthetic construct
  misc_feature 1..21: note = Description of Artificial Sequence: Synthetic oligonucleotide
  modified_base 1: mod_base = OTHER; note = 2' O-methyl modified nucleoside
  modified_base 1..2: mod_base = OTHER; note = Phosphorothioate linkage
  modified_base 2: mod_base = OTHER; note = 2' fluoro-modified nucleoside
  modified_base 2..3: mod_base = OTHER; note = Phosphorothioate linkage
  modified_base 3: mod_base = OTHER; note = 2' O-methyl modified nucleoside
  modified_base 4: mod_base = OTHER; note = 2' fluoro-modified nucleoside
  modified_base 5: mod_base = OTHER; note = 2' O-methyl modified nucleoside
  modified_base 6: mod_base = OTHER; note = 2' fluoro-modified nucleoside
  modified_base 7: mod_base = OTHER; note = 2' O-methyl modified nucleoside
  modified_base 8: mod_base = OTHER; note = 2' fluoro-modified nucleoside
  modified_base 9: mod_base = OTHER; note = 2' O-methyl modified nucleoside
  modified_base 10: mod_base = OTHER; note = 2' fluoro-modified nucleoside
  modified_base 11: mod_base = OTHER; note = 2' O-methyl modified nucleoside
  modified_base 12: mod_base = OTHER; note = 2' O-methyl modified nucleoside
  modified_base 13: mod_base = OTHER; note = 2' O-methyl modified nucleoside
  modified_base 14: mod_base = OTHER; note = 2' fluoro-modified nucleoside
  modified_base 15: mod_base = OTHER; note = 2' O-methyl modified nucleoside
  modified_base 16: mod_base = OTHER; note = 2' fluoro-modified nucleoside
  modified_base 17: mod_base = OTHER; note = 2' O-methyl modified nucleoside
  modified_base 18: mod_base = OTHER; note = 2' fluoro-modified nucleoside
  modified_base 19: mod_base = OTHER; note = 2' O-methyl modified nucleoside
  modified_base 19..20: mod_base = OTHER; note = Phosphorothioate linkage
  modified_base 20: mod_base = OTHER; note = 2' O-methyl modified nucleoside
  modified_base 20..21: mod_base = OTHER; note = Phosphorothioate linkage
  modified_base 21: mod_base = OTHER; note = 2' O-methyl modified nucleoside
  source 1..21: mol_type = other RNA
tagttgtaccagtagccactt

SEQ ID NO: 11295 - RNA, 21 nt, synthetic construct
  misc_feature 1..21: note = Description of Artificial Sequence: Synthetic oligonucleotide
  modified_base 1: mod_base = OTHER; note = 2' O-methyl modified nucleoside
  modified_base 1..2: mod_base = OTHER; note = Phosphorothioate linkage
  modified_base 2: mod_base = OTHER; note = 2' fluoro-modified nucleoside
  modified_base 2..3: mod_base = OTHER; note = Phosphorothioate linkage
  modified_base 3: mod_base = OTHER; note = 2' O-methyl modified nucleoside
  modified_base 4: mod_base = OTHER; note = 2' fluoro-modified nucleoside
  modified_base 5: mod_base = OTHER; note = 2' O-methyl modified nucleoside
  modified_base 6: mod_base = OTHER; note = 2' fluoro-modified nucleoside
  modified_base 7: mod_base = OTHER; note = 2' O-methyl modified nucleoside
  modified_base 8: mod_base = OTHER; note = 2' fluoro-modified nucleoside
  modified_base 9: mod_base = OTHER; note = 2' O-methyl modified nucleoside
  modified_base 10: mod_base = OTHER; note = 2' fluoro-modified nucleoside
  modified_base 11: mod_base = OTHER; note = 2' O-methyl modified nucleoside
  modified_base 12: mod_base = OTHER; note = 2' O-methyl modified nucleoside
  modified_base 13: mod_base = OTHER; note = 2' O-methyl modified nucleoside
  modified_base 14: mod_base = OTHER; note = 2' fluoro-modified nucleoside
  modified_base 15: mod_base = OTHER; note = 2' O-methyl modified nucleoside
  modified_base 16: mod_base = OTHER; note = 2' fluoro-modified nucleoside
  modified_base 17: mod_base = OTHER; note = 2' O-methyl modified nucleoside
  modified_base 18: mod_base = OTHER; note = 2' fluoro-modified nucleoside
  modified_base 19: mod_base = OTHER; note = 2' O-methyl modified nucleoside
  modified_base 19..20: mod_base = OTHER; note = Phosphorothioate linkage
  modified_base 20: mod_base = OTHER; note = 2' O-methyl modified nucleoside
  modified_base 20..21: mod_base = OTHER; note = Phosphorothioate linkage
  modified_base 21: mod_base = OTHER; note = 2' O-methyl modified nucleoside
  source 1..21: mol_type = other RNA
ttgtgcagcagttgtaccatt

SEQ ID NO: 11296 - RNA, 21 nt, synthetic construct
  misc_feature 1..21: note = Description of Artificial Sequence: Synthetic oligonucleotide
  modified_base 1: mod_base = OTHER; note = 2' O-methyl modified nucleoside
  modified_base 1..2: mod_base = OTHER; note = Phosphorothioate linkage
  modified_base 2: mod_base = OTHER; note = 2' fluoro-modified nucleoside
  modified_base 2..3: mod_base = OTHER; note = Phosphorothioate linkage
  modified_base 3: mod_base = OTHER; note = 2' O-methyl modified nucleoside
  modified_base 4: mod_base = OTHER; note = 2' fluoro-modified nucleoside
  modified_base 5: mod_base = OTHER; note = 2' O-methyl modified nucleoside
  modified_base 6: mod_base = OTHER; note = 2' fluoro-modified nucleoside
  modified_base 7: mod_base = OTHER; note = 2' O-methyl modified nucleoside
  modified_base 8: mod_base = OTHER; note = 2' fluoro-modified nucleoside
  modified_base 9: mod_base = OTHER; note = 2' O-methyl modified nucleoside
  modified_base 10: mod_base = OTHER; note = 2' fluoro-modified nucleoside
  modified_base 11: mod_base = OTHER; note = 2' O-methyl modified nucleoside
  modified_base 12: mod_base = OTHER; note = 2' O-methyl modified nucleoside
  modified_base 13: mod_base = OTHER; note = 2' O-methyl modified nucleoside
  modified_base 14: mod_base = OTHER; note = 2' fluoro-modified nucleoside
  modified_base 15: mod_base = OTHER; note = 2' O-methyl modified nucleoside
  modified_base 16: mod_base = OTHER; note = 2' fluoro-modified nucleoside
  modified_base 17: mod_base = OTHER; note = 2' O-methyl modified nucleoside
  modified_base 18: mod_base = OTHER; note = 2' fluoro-modified nucleoside
  modified_base 19: mod_base = OTHER; note = 2' O-methyl modified nucleoside
  modified_base 19..20: mod_base = OTHER; note = Phosphorothioate linkage
  modified_base 20: mod_base = OTHER; note = 2' O-methyl modified nucleoside
  modified_base 20..21: mod_base = OTHER; note = Phosphorothioate linkage
  modified_base 21: mod_base = OTHER; note = 2' O-methyl modified nucleoside
  source 1..21: mol_type = other RNA
ttctgtgcagcagttgtactt

SEQ ID NO: 11297 - RNA, 21 nt, synthetic construct
  misc_feature 1..21: note = Description of Artificial Sequence: Synthetic oligonucleotide
  modified_base 1: mod_base = OTHER; note = 2' O-methyl modified nucleoside
  modified_base 1..2: mod_base = OTHER; note = Phosphorothioate linkage
  modified_base 2: mod_base = OTHER; note = 2' fluoro-modified nucleoside
  modified_base 2..3: mod_base = OTHER; note = Phosphorothioate linkage
  modified_base 3: mod_base = OTHER; note = 2' O-methyl modified nucleoside
  modified_base 4: mod_base = OTHER; note = 2' fluoro-modified nucleoside
  modified_base 5: mod_base = OTHER; note = 2' O-methyl modified nucleoside
  modified_base 6: mod_base = OTHER; note = 2' fluoro-modified nucleoside
  modified_base 7: mod_base = OTHER; note = 2' O-methyl modified nucleoside
  modified_base 8: mod_base = OTHER; note = 2' fluoro-modified nucleoside
  modified_base 9: mod_base = OTHER; note = 2' O-methyl modified nucleoside
  modified_base 10: mod_base = OTHER; note = 2' fluoro-modified nucleoside
  modified_base 11: mod_base = OTHER; note = 2' O-methyl modified nucleoside
  modified_base 12: mod_base = OTHER; note = 2' O-methyl modified nucleoside
  modified_base 13: mod_base = OTHER; note = 2' O-methyl modified nucleoside
  modified_base 14: mod_base = OTHER; note = 2' fluoro-modified nucleoside
  modified_base 15: mod_base = OTHER; note = 2' O-methyl modified nucleoside
  modified_base 16: mod_base = OTHER; note = 2' fluoro-modified nucleoside
  modified_base 17: mod_base = OTHER; note = 2' O-methyl modified nucleoside
  modified_base 18: mod_base = OTHER; note = 2' fluoro-modified nucleoside
  modified_base 19: mod_base = OTHER; note = 2' O-methyl modified nucleoside
  modified_base 19..20: mod_base = OTHER; note = Phosphorothioate linkage
  modified_base 20: mod_base = OTHER; note = 2' O-methyl modified nucleoside
  modified_base 20..21: mod_base = OTHER; note = Phosphorothioate linkage
  modified_base 21: mod_base = OTHER; note = 2' O-methyl modified nucleoside
  source 1..21: mol_type = other RNA
ttagtacactccattgaggtt

SEQ ID NO: 11298 - RNA, 21 nt, synthetic construct
  misc_feature 1..21: note = Description of Artificial Sequence: Synthetic oligonucleotide
  modified_base 1: mod_base = OTHER; note = 2' O-methyl modified nucleoside
  modified_base 1..2: mod_base = OTHER; note = Phosphorothioate linkage
  modified_base 2: mod_base = OTHER; note = 2' fluoro-modified nucleoside
  modified_base 2..3: mod_base = OTHER; note = Phosphorothioate linkage
  modified_base 3: mod_base = OTHER; note = 2' O-methyl modified nucleoside
  modified_base 4: mod_base = OTHER; note = 2' fluoro-modified nucleoside
  modified_base 5: mod_base = OTHER; note = 2' O-methyl modified nucleoside
  modified_base 6: mod_base = OTHER; note = 2' fluoro-modified nucleoside
  modified_base 7: mod_base = OTHER; note = 2' O-methyl modified nucleoside
  modified_base 8: mod_base = OTHER; note = 2' fluoro-modified nucleoside
  modified_base 9: mod_base = OTHER; note = 2' O-methyl modified nucleoside
  modified_base 10: mod_base = OTHER; note = 2' fluoro-modified nucleoside
  modified_base 11: mod_base = OTHER; note = 2' O-methyl modified nucleoside
  modified_base 12: mod_base = OTHER; note = 2' O-methyl modified nucleoside
  modified_base 13: mod_base = OTHER; note = 2' O-methyl modified nucleoside
  modified_base 14: mod_base = OTHER; note = 2' fluoro-modified nucleoside
  modified_base 15: mod_base = OTHER; note = 2' O-methyl modified nucleoside
  modified_base 16: mod_base = OTHER; note = 2' fluoro-modified nucleoside
  modified_base 17: mod_base = OTHER; note = 2' O-methyl modified nucleoside
  modified_base 18: mod_base = OTHER; note = 2' fluoro-modified nucleoside
  modified_base 19: mod_base = OTHER; note = 2' O-methyl modified nucleoside
  modified_base 19..20: mod_base = OTHER; note = Phosphorothioate linkage
  modified_base 20: mod_base = OTHER; note = 2' O-methyl modified nucleoside
  modified_base 20..21: mod_base = OTHER; note = Phosphorothioate linkage
  modified_base 21: mod_base = OTHER; note = 2' O-methyl modified nucleoside
  source 1..21: mol_type = other RNA
tgtagtacactccattgagtt

SEQ ID NO: 11299 - RNA, 21 nt, synthetic construct
  misc_feature 1..21: note = Description of Artificial Sequence: Synthetic oligonucleotide
  modified_base 1: mod_base = OTHER; note = 2' O-methyl modified nucleoside
  modified_base 1..2: mod_base = OTHER; note = Phosphorothioate linkage
  modified_base 2: mod_base = OTHER; note = 2' fluoro-modified nucleoside
  modified_base 2..3: mod_base = OTHER; note = Phosphorothioate linkage
  modified_base 3: mod_base = OTHER; note = 2' O-methyl modified nucleoside
  modified_base 4: mod_base = OTHER; note = 2' fluoro-modified nucleoside
  modified_base 5: mod_base = OTHER; note = 2' O-methyl modified nucleoside
  modified_base 6: mod_base = OTHER; note = 2' fluoro-modified nucleoside
  modified_base 7: mod_base = OTHER; note = 2' O-methyl modified nucleoside
  modified_base 8: mod_base = OTHER; note = 2' fluoro-modified nucleoside
  modified_base 9: mod_base = OTHER; note = 2' O-methyl modified nucleoside
  modified_base 10: mod_base = OTHER; note = 2' fluoro-modified nucleoside
  modified_base 11: mod_base = OTHER; note = 2' O-methyl modified nucleoside
  modified_base 12: mod_base = OTHER; note = 2' O-methyl modified nucleoside
  modified_base 13: mod_base = OTHER; note = 2' O-methyl modified nucleoside
  modified_base 14: mod_base = OTHER; note = 2' fluoro-modified nucleoside
  modified_base 15: mod_base = OTHER; note = 2' O-methyl modified nucleoside
  modified_base 16: mod_base = OTHER; note = 2' fluoro-modified nucleoside
  modified_base 17: mod_base = OTHER; note = 2' O-methyl modified nucleoside
  modified_base 18: mod_base = OTHER; note = 2' fluoro-modified nucleoside
  modified_base 19: mod_base = OTHER; note = 2' O-methyl modified nucleoside
  modified_base 19..20: mod_base = OTHER; note = Phosphorothioate linkage
  modified_base 20: mod_base = OTHER; note = 2' O-methyl modified nucleoside
  modified_base 20..21: mod_base = OTHER; note = Phosphorothioate linkage
  modified_base 21: mod_base = OTHER; note = 2' O-methyl modified nucleoside
  source 1..21: mol_type = other RNA
tggtagtacactccattgatt

SEQ ID NO: 11300 - RNA, 21 nt, synthetic construct
  misc_feature 1..21: note = Description of Artificial Sequence: Synthetic oligonucleotide
  modified_base 1: mod_base = OTHER; note = 2' O-methyl modified nucleoside
  modified_base 1..2: mod_base = OTHER; note = Phosphorothioate linkage
  modified_base 2: mod_base = OTHER; note = 2' fluoro-modified nucleoside
  modified_base 2..3: mod_base = OTHER; note = Phosphorothioate linkage
  modified_base 3: mod_base = OTHER; note = 2' O-methyl modified nucleoside
  modified_base 4: mod_base = OTHER; note = 2' fluoro-modified nucleoside
  modified_base 5: mod_base = OTHER; note = 2' O-methyl modified nucleoside
  modified_base 6: mod_base = OTHER; note = 2' fluoro-modified nucleoside
  modified_base 7: mod_base = OTHER; note = 2' O-methyl modified nucleoside
  modified_base 8: mod_base = OTHER; note = 2' fluoro-modified nucleoside
  modified_base 9: mod_base = OTHER; note = 2' O-methyl modified nucleoside
  modified_base 10: mod_base = OTHER; note = 2' fluoro-modified nucleoside
  modified_base 11: mod_base = OTHER; note = 2' O-methyl modified nucleoside
  modified_base 12: mod_base = OTHER; note = 2' O-methyl modified nucleoside
  modified_base 13: mod_base = OTHER; note = 2' O-methyl modified nucleoside
  modified_base 14: mod_base = OTHER; note = 2' fluoro-modified nucleoside
  modified_base 15: mod_base = OTHER; note = 2' O-methyl modified nucleoside
  modified_base 16: mod_base = OTHER; note = 2' fluoro-modified nucleoside
  modified_base 17: mod_base = OTHER; note = 2' O-methyl modified nucleoside
  modified_base 18: mod_base = OTHER; note = 2' fluoro-modified nucleoside
  modified_base 19: mod_base = OTHER; note = 2' O-methyl modified nucleoside
  modified_base 19..20: mod_base = OTHER; note = Phosphorothioate linkage
  modified_base 20: mod_base = OTHER; note = 2' O-methyl modified nucleoside
  modified_base 20..21: mod_base = OTHER; note = Phosphorothioate linkage
  modified_base 21: mod_base = OTHER; note = 2' O-methyl modified nucleoside
  source 1..21: mol_type = other RNA
tcggtagtacactccattgtt

SEQ ID NO: 11301 - RNA, 21 nt, synthetic construct
  misc_feature 1..21: note = Description of Artificial Sequence: Synthetic oligonucleotide
  modified_base 1: mod_base = OTHER; note = 2' O-methyl modified nucleoside
  modified_base 1..2: mod_base = OTHER; note = Phosphorothioate linkage
  modified_base 2: mod_base = OTHER; note = 2' fluoro-modified nucleoside
  modified_base 2..3: mod_base = OTHER; note = Phosphorothioate linkage
  modified_base 3: mod_base = OTHER; note = 2' O-methyl modified nucleoside
  modified_base 4: mod_base = OTHER; note = 2' fluoro-modified nucleoside
  modified_base 5: mod_base = OTHER; note = 2' O-methyl modified nucleoside
  modified_base 6: mod_base = OTHER; note = 2' fluoro-modified nucleoside
  modified_base 7: mod_base = OTHER; note = 2' O-methyl modified nucleoside
  modified_base 8: mod_base = OTHER; note = 2' fluoro-modified nucleoside
  modified_base 9: mod_base = OTHER; note = 2' O-methyl modified nucleoside
  modified_base 10: mod_base = OTHER; note = 2' fluoro-modified nucleoside
  modified_base 11: mod_base = OTHER; note = 2' O-methyl modified nucleoside
  modified_base 12: mod_base = OTHER; note = 2' O-methyl modified nucleoside
  modified_base 13: mod_base = OTHER; note = 2' O-methyl modified nucleoside
  modified_base 14: mod_base = OTHER; note = 2' fluoro-modified nucleoside
  modified_base 15: mod_base = OTHER; note = 2' O-methyl modified nucleoside
  modified_base 16: mod_base = OTHER; note = 2' fluoro-modified nucleoside
  modified_base 17: mod_base = OTHER; note = 2' O-methyl modified nucleoside
  modified_base 18: mod_base = OTHER; note = 2' fluoro-modified nucleoside
  modified_base 19: mod_base = OTHER; note = 2' O-methyl modified nucleoside
  modified_base 19..20: mod_base = OTHER; note = Phosphorothioate linkage
  modified_base 20: mod_base = OTHER; note = 2' O-methyl modified nucleoside
  modified_base 20..21: mod_base = OTHER; note = Phosphorothioate linkage
  modified_base 21: mod_base = OTHER; note = 2' O-methyl modified nucleoside
  source 1..21: mol_type = other RNA
tgtaggtagatccatgccatt

SEQ ID NO: 11302 - RNA, 21 nt, synthetic construct
  misc_feature 1..21: note = Description of Artificial Sequence: Synthetic oligonucleotide
  modified_base 1: mod_base = OTHER; note = 2' O-methyl modified nucleoside
  modified_base 1..2: mod_base = OTHER; note = Phosphorothioate linkage
  modified_base 2: mod_base = OTHER; note = 2' fluoro-modified nucleoside
  modified_base 2..3: mod_base = OTHER; note = Phosphorothioate linkage
  modified_base 3: mod_base = OTHER; note = 2' O-methyl modified nucleoside
  modified_base 4: mod_base = OTHER; note = 2' fluoro-modified nucleoside
  modified_base 5: mod_base = OTHER; note = 2' O-methyl modified nucleoside
  modified_base 6: mod_base = OTHER; note = 2' fluoro-modified nucleoside
  modified_base 7: mod_base = OTHER; note = 2' O-methyl modified nucleoside
  modified_base 8: mod_base = OTHER; note = 2' fluoro-modified nucleoside
  modified_base 9: mod_base = OTHER; note = 2' O-methyl modified nucleoside
  modified_base 10: mod_base = OTHER; note = 2' fluoro-modified nucleoside
  modified_base 11: mod_base = OTHER; note = 2' O-methyl modified nucleoside
  modified_base 12: mod_base = OTHER; note = 2' O-methyl modified nucleoside
  modified_base 13: mod_base = OTHER; note = 2' O-methyl modified nucleoside
  modified_base 14: mod_base = OTHER; note = 2' fluoro-modified nucleoside
  modified_base 15: mod_base = OTHER; note = 2' O-methyl modified nucleoside
  modified_base 16: mod_base = OTHER; note = 2' fluoro-modified nucleoside
  modified_base 17: mod_base = OTHER; note = 2' O-methyl modified nucleoside
  modified_base 18: mod_base = OTHER; note = 2' fluoro-modified nucleoside
  modified_base 19: mod_base = OTHER; note = 2' O-methyl modified nucleoside
  modified_base 19..20: mod_base = OTHER; note = Phosphorothioate linkage
  modified_base 20: mod_base = OTHER; note = 2' O-methyl modified nucleoside
  modified_base 20..21: mod_base = OTHER; note = Phosphorothioate linkage
  modified_base 21: mod_base = OTHER; note = 2' O-methyl modified nucleoside
  source 1..21: mol_type = other RNA
tagtaggtagatccatgcctt

SEQ ID NO: 11303 - RNA, 21 nt, synthetic construct
  misc_feature 1..21: note = Description of Artificial Sequence: Synthetic oligonucleotide
  modified_base 1: mod_base = OTHER; note = 2' O-methyl modified nucleoside
  modified_base 1..2: mod_base = OTHER; note = Phosphorothioate linkage
  modified_base 2: mod_base = OTHER; note = 2' fluoro-modified nucleoside
  modified_base 2..3: mod_base = OTHER; note = Phosphorothioate linkage
  modified_base 3: mod_base = OTHER; note = 2' O-methyl modified nucleoside
  modified_base 4: mod_base = OTHER; note = 2' fluoro-modified nucleoside
  modified_base 5: mod_base = OTHER; note = 2' O-methyl modified nucleoside
  modified_base 6: mod_base = OTHER; note = 2' fluoro-modified nucleoside
  modified_base 7: mod_base = OTHER; note = 2' O-methyl modified nucleoside
  modified_base 8: mod_base = OTHER; note = 2' fluoro-modified nucleoside
  modified_base 9: mod_base = OTHER; note = 2' O-methyl modified nucleoside
  modified_base 10: mod_base = OTHER; note = 2' fluoro-modified nucleoside
  modified_base 11: mod_base = OTHER; note = 2' O-methyl modified nucleoside
  modified_base 12: mod_base = OTHER; note = 2' O-methyl modified nucleoside
  modified_base 13: mod_base = OTHER; note = 2' O-methyl modified nucleoside
  modified_base 14: mod_base = OTHER; note = 2' fluoro-modified nucleoside
  modified_base 15: mod_base = OTHER; note = 2' O-methyl modified nucleoside
  modified_base 16: mod_base = OTHER; note = 2' fluoro-modified nucleoside
  modified_base 17: mod_base = OTHER; note = 2' O-methyl modified nucleoside
  modified_base 18: mod_base = OTHER; note = 2' fluoro-modified nucleoside
  modified_base 19: mod_base = OTHER; note = 2' O-methyl modified nucleoside
  modified_base 19..20: mod_base = OTHER; note = Phosphorothioate linkage
  modified_base 20: mod_base = OTHER; note = 2' O-methyl modified nucleoside
  modified_base 20..21: mod_base = OTHER; note = Phosphorothioate linkage
  modified_base 21: mod_base = OTHER; note = 2' O-methyl modified nucleoside
  source 1..21: mol_type = other RNA
tggagtaggtagatccatgtt

SEQ ID NO: 11304 - RNA, 21 nt, synthetic construct
  misc_feature 1..21: note = Description of Artificial Sequence: Synthetic oligonucleotide
  modified_base 1: mod_base = OTHER; note = 2' O-methyl modified nucleoside
  modified_base 1..2: mod_base = OTHER; note = Phosphorothioate linkage
  modified_base 2: mod_base = OTHER; note = 2' fluoro-modified nucleoside
  modified_base 2..3: mod_base = OTHER; note = Phosphorothioate linkage
  modified_base 3: mod_base = OTHER; note = 2' O-methyl modified nucleoside
  modified_base 4: mod_base = OTHER; note = 2' fluoro-modified nucleoside
  modified_base 5: mod_base = OTHER; note = 2' O-methyl modified nucleoside
  modified_base 6: mod_base = OTHER; note = 2' fluoro-modified nucleoside
  modified_base 7: mod_base = OTHER; note = 2' O-methyl modified nucleoside
  modified_base 8: mod_base = OTHER; note = 2' fluoro-modified nucleoside
  modified_base 9: mod_base = OTHER; note = 2' O-methyl modified nucleoside
  modified_base 10: mod_base = OTHER; note = 2' fluoro-modified nucleoside
  modified_base 11: mod_base = OTHER; note = 2' O-methyl modified nucleoside
  modified_base 12: mod_base = OTHER; note = 2' O-methyl modified nucleoside
  modified_base 13: mod_base = OTHER; note = 2' O-methyl modified nucleoside
  modified_base 14: mod_base = OTHER; note = 2' fluoro-modified nucleoside
  modified_base 15: mod_base = OTHER; note = 2' O-methyl modified nucleoside
  modified_base 16: mod_base = OTHER; note = 2' fluoro-modified nucleoside
  modified_base 17: mod_base = OTHER; note = 2' O-methyl modified nucleoside
  modified_base 18: mod_base = OTHER; note = 2' fluoro-modified nucleoside
  modified_base 19: mod_base = OTHER; note = 2' O-methyl modified nucleoside
  modified_base 19..20: mod_base = OTHER; note = Phosphorothioate linkage
  modified_base 20: mod_base = OTHER; note = 2' O-methyl modified nucleoside
  modified_base 20..21: mod_base = OTHER; note = Phosphorothioate linkage
  modified_base 21: mod_base = OTHER; note = 2' O-methyl modified nucleoside
  source 1..21: mol_type = other RNA
tgggagtaggtagatccattt

SEQ ID NO: 11305 - RNA, 21 nt, synthetic construct
  misc_feature 1..21: note = Description of Artificial Sequence: Synthetic oligonucleotide
  modified_base 1: mod_base = OTHER; note = 2' O-methyl modified nucleoside
  modified_base 1..2: mod_base = OTHER; note = Phosphorothioate linkage
  modified_base 2: mod_base = OTHER; note = 2' fluoro-modified nucleoside
  modified_base 2..3: mod_base = OTHER; note = Phosphorothioate linkage
  modified_base 3: mod_base = OTHER; note = 2' O-methyl modified nucleoside
  modified_base 4: mod_base = OTHER; note = 2' fluoro-modified nucleoside
  modified_base 5: mod_base = OTHER; note = 2' O-methyl modified nucleoside
  modified_base 6: mod_base = OTHER; note = 2' fluoro-modified nucleoside
  modified_base 7: mod_base = OTHER; note = 2' O-methyl modified nucleoside
  modified_base 8: mod_base = OTHER; note = 2' fluoro-modified nucleoside
  modified_base 9: mod_base = OTHER; note = 2' O-methyl modified nucleoside
  modified_base 10: mod_base = OTHER; note = 2' fluoro-modified nucleoside
  modified_base 11: mod_base = OTHER; note = 2' O-methyl modified nucleoside
  modified_base 12: mod_base = OTHER; note = 2' O-methyl modified nucleoside
  modified_base 13: mod_base = OTHER; note = 2' O-methyl modified nucleoside
  modified_base 14: mod_base = OTHER; note = 2' fluoro-modified nucleoside
  modified_base 15: mod_base = OTHER; note = 2' O-methyl modified nucleoside
  modified_base 16: mod_base = OTHER; note = 2' fluoro-modified nucleoside
  modified_base 17: mod_base = OTHER; note = 2' O-methyl modified nucleoside
  modified_base 18: mod_base = OTHER; note = 2' fluoro-modified nucleoside
  modified_base 19: mod_base = OTHER; note = 2' O-methyl modified nucleoside
  modified_base 19..20: mod_base = OTHER; note = Phosphorothioate linkage
  modified_base 20: mod_base = OTHER; note = 2' O-methyl modified nucleoside
  modified_base 20..21: mod_base = OTHER; note = Phosphorothioate linkage
  modified_base 21: mod_base = OTHER; note = 2' O-methyl modified nucleoside
  source 1..21: mol_type = other RNA
tcggcagcctccttttaagtt

SEQ ID NO: 11306 - RNA, 21 nt, synthetic construct
  misc_feature 1..21: note = Description of Artificial Sequence: Synthetic oligonucleotide
  modified_base 1: mod_base = OTHER; note = 2' O-methyl modified nucleoside
  modified_base 1..2: mod_base = OTHER; note = Phosphorothioate linkage
  modified_base 2: mod_base = OTHER; note = 2' fluoro-modified nucleoside
  modified_base 2..3: mod_base = OTHER; note = Phosphorothioate linkage
  modified_base 3: mod_base = OTHER; note = 2' O-methyl modified nucleoside
  modified_base 4: mod_base = OTHER; note = 2' fluoro-modified nucleoside
  modified_base 5: mod_base = OTHER; note = 2' O-methyl modified nucleoside
  modified_base 6: mod_base = OTHER; note = 2' fluoro-modified nucleoside
  modified_base 7: mod_base = OTHER; note = 2' O-methyl modified nucleoside
  modified_base 8: mod_base = OTHER; note = 2' fluoro-modified nucleoside
  modified_base 9: mod_base = OTHER; note = 2' O-methyl modified nucleoside
  modified_base 10: mod_base = OTHER; note = 2' fluoro-modified nucleoside
  modified_base 11: mod_base = OTHER; note = 2' O-methyl modified nucleoside
  modified_base 12: mod_base = OTHER; note = 2' O-methyl modified nucleoside
  modified_base 13: mod_base = OTHER; note = 2' O-methyl modified nucleoside
  modified_base 14: mod_base = OTHER; note = 2' fluoro-modified nucleoside
  modified_base 15: mod_base = OTHER; note = 2' O-methyl modified nucleoside
  modified_base 16: mod_base = OTHER; note = 2' fluoro-modified nucleoside
  modified_base 17: mod_base = OTHER; note = 2' O-methyl modified nucleoside
  modified_base 18: mod_base = OTHER; note = 2' fluoro-modified nucleoside
  modified_base 19: mod_base = OTHER; note = 2' O-methyl modified nucleoside
  modified_base 19..20: mod_base = OTHER; note = Phosphorothioate linkage
  modified_base 20: mod_base = OTHER; note = 2' O-methyl modified nucleoside
  modified_base 20..21: mod_base = OTHER; note = Phosphorothioate linkage
  modified_base 21: mod_base = OTHER; note = 2' O-methyl modified nucleoside
  source 1..21: mol_type = other RNA
taacatccttggtacatattt

SEQ ID NO: 11307 - RNA, 21 nt, synthetic construct
  misc_feature 1..21: note = Description of Artificial Sequence: Synthetic oligonucleotide
  modified_base 1: mod_base = OTHER; note = 2' O-methyl modified nucleoside
  modified_base 1..2: mod_base = OTHER; note = Phosphorothioate linkage
  modified_base 2: mod_base = OTHER; note = 2' fluoro-modified nucleoside
  modified_base 2..3: mod_base = OTHER; note = Phosphorothioate linkage
  modified_base 3: mod_base = OTHER; note = 2' O-methyl modified nucleoside
  modified_base 4: mod_base = OTHER; note = 2' fluoro-modified nucleoside
  modified_base 5: mod_base = OTHER; note = 2' O-methyl modified nucleoside
  modified_base 6: mod_base = OTHER; note = 2' fluoro-modified nucleoside
  modified_base 7: mod_base = OTHER; note = 2' O-methyl modified nucleoside
  modified_base 8: mod_base = OTHER; note = 2' fluoro-modified nucleoside
  modified_base 9: mod_base = OTHER; note = 2' O-methyl modified nucleoside
  modified_base 10: mod_base = OTHER; note = 2' fluoro-modified nucleoside
  modified_base 11: mod_base = OTHER; note = 2' O-methyl modified nucleoside
  modified_base 12: mod_base = OTHER; note = 2' O-methyl modified nucleoside
  modified_base 13: mod_base = OTHER; note = 2' O-methyl modified nucleoside
  modified_base 14: mod_base = OTHER; note = 2' fluoro-modified nucleoside
  modified_base 15: mod_base = OTHER; note = 2' O-methyl modified nucleoside
  modified_base 16: mod_base = OTHER; note = 2' fluoro-modified nucleoside
  modified_base 17: mod_base = OTHER; note = 2' O-methyl modified nucleoside
  modified_base 18: mod_base = OTHER; note = 2' fluoro-modified nucleoside
  modified_base 19: mod_base = OTHER; note = 2' O-methyl modified nucleoside
  modified_base 19..20: mod_base = OTHER; note = Phosphorothioate linkage
  modified_base 20: mod_base = OTHER; note = 2' O-methyl modified nucleoside
  modified_base 20..21: mod_base = OTHER; note = Phosphorothioate linkage
  modified_base 21: mod_base = OTHER; note = 2' O-methyl modified nucleoside
  source 1..21: mol_type = other RNA
ttgtaacatccttggtacatt

SEQ ID NO: 11308 - RNA, 21 nt, synthetic construct
  misc_feature 1..21: note = Description of Artificial Sequence: Synthetic oligonucleotide
  modified_base 1: mod_base = OTHER; note = 2' O-methyl modified nucleoside
  modified_base 1..2: mod_base = OTHER; note = Phosphorothioate linkage
  modified_base 2: mod_base = OTHER; note = 2' fluoro-modified nucleoside
  modified_base 2..3: mod_base = OTHER; note = Phosphorothioate linkage
  modified_base 3: mod_base = OTHER; note = 2' O-methyl modified nucleoside
  modified_base 4: mod_base = OTHER; note = 2' fluoro-modified nucleoside
  modified_base 5: mod_base = OTHER; note = 2' O-methyl modified nucleoside
  modified_base 6: mod_base = OTHER; note = 2' fluoro-modified nucleoside
  modified_base 7: mod_base = OTHER; note = 2' O-methyl modified nucleoside
  modified_base 8: mod_base = OTHER; note = 2' fluoro-modified nucleoside
  modified_base 9: mod_base = OTHER; note = 2' O-methyl modified nucleoside
  modified_base 10: mod_base = OTHER; note = 2' fluoro-modified nucleoside
  modified_base 11: mod_base = OTHER; note = 2' O-methyl modified nucleoside
  modified_base 12: mod_base = OTHER; note = 2' O-methyl modified nucleoside
  modified_base 13: mod_base = OTHER; note = 2' O-methyl modified nucleoside
  modified_base 14: mod_base = OTHER; note = 2' fluoro-modified nucleoside
  modified_base 15: mod_base = OTHER; note = 2' O-methyl modified nucleoside
  modified_base 16: mod_base = OTHER; note = 2' fluoro-modified nucleoside
  modified_base 17: mod_base = OTHER; note = 2' O-methyl modified nucleoside
  modified_base 18: mod_base = OTHER; note = 2' fluoro-modified nucleoside
  modified_base 19: mod_base = OTHER; note = 2' O-methyl modified nucleoside
  modified_base 19..20: mod_base = OTHER; note = Phosphorothioate linkage
  modified_base 20: mod_base = OTHER; note = 2' O-methyl modified nucleoside
  modified_base 20..21: mod_base = OTHER; note = Phosphorothioate linkage
  modified_base 21: mod_base = OTHER; note = 2' O-methyl modified nucleoside
  source 1..21: mol_type = other RNA
ttgtttactgtaacatccttt

SEQ ID NO: 11309 - RNA, 21 nt, synthetic construct
  misc_feature 1..21: note = Description of Artificial Sequence: Synthetic oligonucleotide
  modified_base 1: mod_base = OTHER; note = 2' O-methyl modified nucleoside
  modified_base 1..2: mod_base = OTHER; note = Phosphorothioate linkage
  modified_base 2: mod_base = OTHER; note = 2' fluoro-modified nucleoside
  modified_base 2..3: mod_base = OTHER; note = Phosphorothioate linkage
  modified_base 3: mod_base = OTHER; note = 2' O-methyl modified nucleoside
  modified_base 4: mod_base = OTHER; note = 2' fluoro-modified nucleoside
  modified_base 5: mod_base = OTHER; note = 2' O-methyl modified nucleoside
  modified_base 6: mod_base = OTHER; note = 2' fluoro-modified nucleoside
  modified_base 7: mod_base = OTHER; note = 2' O-methyl modified nucleoside
  modified_base 8: mod_base = OTHER; note = 2' fluoro-modified nucleoside
  modified_base 9: mod_base = OTHER; note = 2' O-methyl modified nucleoside
  modified_base 10: mod_base = OTHER; note = 2' fluoro-modified nucleoside
  modified_base 11: mod_base = OTHER; note = 2' O-methyl modified nucleoside
  modified_base 12: mod_base = OTHER; note = 2' O-methyl modified nucleoside
  modified_base 13: mod_base = OTHER; note = 2' O-methyl modified nucleoside
  modified_base 14: mod_base = OTHER; note = 2' fluoro-modified nucleoside
  modified_base 15: mod_base = OTHER; note = 2' O-methyl modified nucleoside
  modified_base 16: mod_base = OTHER; note = 2' fluoro-modified nucleoside
  modified_base 17: mod_base = OTHER; note = 2' O-methyl modified nucleoside
  modified_base 18: mod_base = OTHER; note = 2' fluoro-modified nucleoside
  modified_base 19: mod_base = OTHER; note = 2' O-methyl modified nucleoside
  modified_base 19..20: mod_base = OTHER; note = Phosphorothioate linkage
  modified_base 20: mod_base = OTHER; note = 2' O-methyl modified nucleoside
  modified_base 20..21: mod_base = OTHER; note = Phosphorothioate linkage
  modified_base 21: mod_base = OTHER; note = 2' O-methyl modified nucleoside
  source 1..21: mol_type = other RNA
tctgtttactgtaacatcctt

SEQ ID NO: 11310 - RNA, 21 nt, synthetic construct
  misc_feature 1..21: note = Description of Artificial Sequence: Synthetic oligonucleotide
  modified_base 1: mod_base = OTHER; note = 2' O-methyl modified nucleoside
  modified_base 1..2: mod_base = OTHER; note = Phosphorothioate linkage
  modified_base 2: mod_base = OTHER; note = 2' fluoro-modified nucleoside
  modified_base 2..3: mod_base = OTHER; note = Phosphorothioate linkage
  modified_base 3: mod_base = OTHER; note = 2' O-methyl modified nucleoside
  modified_base 4: mod_base = OTHER; note = 2' fluoro-modified nucleoside
  modified_base 5: mod_base = OTHER; note = 2' O-methyl modified nucleoside
  modified_base 6: mod_base = OTHER; note = 2' fluoro-modified nucleoside
  modified_base 7: mod_base = OTHER; note = 2' O-methyl modified nucleoside
  modified_base 8: mod_base = OTHER; note = 2' fluoro-modified nucleoside
  modified_base 9: mod_base = OTHER; note = 2' O-methyl modified nucleoside
  modified_base 10: mod_base = OTHER; note = 2' fluoro-modified nucleoside
  modified_base 11: mod_base = OTHER; note = 2' O-methyl modified nucleoside
  modified_base 12: mod_base = OTHER; note = 2' O-methyl modified nucleoside
  modified_base 13: mod_base = OTHER; note = 2' O-methyl modified nucleoside
  modified_base 14: mod_base = OTHER; note = 2' fluoro-modified nucleoside
  modified_base 15: mod_base = OTHER; note = 2' O-methyl modified nucleoside
  modified_base 16: mod_base = OTHER; note = 2' fluoro-modified nucleoside
  modified_base 17: mod_base = OTHER; note = 2' O-methyl modified nucleoside
  modified_base 18: mod_base = OTHER; note = 2' fluoro-modified nucleoside
  modified_base 19: mod_base = OTHER; note = 2' O-methyl modified nucleoside
  modified_base 19..20: mod_base = OTHER; note = Phosphorothioate linkage
  modified_base 20: mod_base = OTHER; note = 2' O-methyl modified nucleoside
  modified_base 20..21: mod_base = OTHER; note = Phosphorothioate linkage
  modified_base 21: mod_base = OTHER; note = 2' O-methyl modified nucleoside
  source 1..21: mol_type = other RNA
taggacccagtgggtttaatt

SEQ ID NO: 11311 - RNA, 21 nt, synthetic construct
  misc_feature 1..21: note = Description of Artificial Sequence: Synthetic oligonucleotide
  modified_base 1: mod_base = OTHER; note = 2' O-methyl modified nucleoside
  modified_base 1..2: mod_base = OTHER; note = Phosphorothioate linkage
  modified_base 2: mod_base = OTHER; note = 2' fluoro-modified nucleoside
  modified_base 2..3: mod_base = OTHER; note = Phosphorothioate linkage
  modified_base 3: mod_base = OTHER; note = 2' O-methyl modified nucleoside
  modified_base 4: mod_base = OTHER; note = 2' fluoro-modified nucleoside
  modified_base 5: mod_base = OTHER; note = 2' O-methyl modified nucleoside
  modified_base 6: mod_base = OTHER; note = 2' fluoro-modified nucleoside
  modified_base 7: mod_base = OTHER; note = 2' O-methyl modified nucleoside
  modified_base 8: mod_base = OTHER; note = 2' fluoro-modified nucleoside
  modified_base 9: mod_base = OTHER; note = 2' O-methyl modified nucleoside
  modified_base 10: mod_base = OTHER; note = 2' fluoro-modified nucleoside
  modified_base 11: mod_base = OTHER; note = 2' O-methyl modified nucleoside
  modified_base 12: mod_base = OTHER; note = 2' O-methyl modified nucleoside
  modified_base 13: mod_base = OTHER; note = 2' O-methyl modified nucleoside
  modified_base 14: mod_base = OTHER; note = 2' fluoro-modified nucleoside
  modified_base 15: mod_base = OTHER; note = 2' O-methyl modified nucleoside
  modified_base 16: mod_base = OTHER; note = 2' fluoro-modified nucleoside
  modified_base 17: mod_base = OTHER; note = 2' O-methyl modified nucleoside
  modified_base 18: mod_base = OTHER; note = 2' fluoro-modified nucleoside
  modified_base 19: mod_base = OTHER; note = 2' O-methyl modified nucleoside
  modified_base 19..20: mod_base = OTHER; note = Phosphorothioate linkage
  modified_base 20: mod_base = OTHER; note = 2' O-methyl modified nucleoside
  modified_base 20..21: mod_base = OTHER; note = Phosphorothioate linkage
  modified_base 21: mod_base = OTHER; note = 2' O-methyl modified nucleoside
  source 1..21: mol_type = other RNA
ttatgtcagggatcttgggtt

SEQ ID NO: 11312 - RNA, 21 nt, synthetic construct
  misc_feature 1..21: note = Description of Artificial Sequence: Synthetic oligonucleotide
  modified_base 1: mod_base = OTHER; note = 2' O-methyl modified nucleoside
  modified_base 1..2: mod_base = OTHER; note = Phosphorothioate linkage
  modified_base 2: mod_base = OTHER; note = 2' fluoro-modified nucleoside
  modified_base 2..3: mod_base = OTHER; note = Phosphorothioate linkage
  modified_base 3: mod_base = OTHER; note = 2' O-methyl modified nucleoside
  modified_base 4: mod_base = OTHER; note = 2' fluoro-modified nucleoside
  modified_base 5: mod_base = OTHER; note = 2' O-methyl modified nucleoside
  modified_base 6: mod_base = OTHER; note = 2' fluoro-modified nucleoside
  modified_base 7: mod_base = OTHER; note = 2' O-methyl modified nucleoside
  modified_base 8: mod_base = OTHER; note = 2' fluoro-modified nucleoside
  modified_base 9: mod_base = OTHER; note = 2' O-methyl modified nucleoside
  modified_base 10: mod_base = OTHER; note = 2' fluoro-modified nucleoside
  modified_base 11: mod_base = OTHER; note = 2' O-methyl modified nucleoside
  modified_base 12: mod_base = OTHER; note = 2' O-methyl modified nucleoside
  modified_base 13: mod_base = OTHER; note = 2' O-methyl modified nucleoside
  modified_base 14: mod_base = OTHER; note = 2' fluoro-modified nucleoside
  modified_base 15: mod_base = OTHER; note = 2' O-methyl modified nucleoside
  modified_base 16: mod_base = OTHER; note = 2' fluoro-modified nucleoside
  modified_base 17: mod_base = OTHER; note = 2' O-methyl modified nucleoside
  modified_base 18: mod_base = OTHER; note = 2' fluoro-modified nucleoside
  modified_base 19: mod_base = OTHER; note = 2' O-methyl modified nucleoside
  modified_base 19..20: mod_base = OTHER; note = Phosphorothioate linkage
  modified_base 20: mod_base = OTHER; note = 2' O-methyl modified nucleoside
  modified_base 20..21: mod_base = OTHER; note = Phosphorothioate linkage
  modified_base 21: mod_base = OTHER; note = 2' O-methyl modified nucleoside
  source 1..21: mol_type = other RNA
tctatgtcagggatcttggtt

SEQ ID NO: 11313 - RNA, 21 nt, synthetic construct
  misc_feature 1..21: note = Description of Artificial Sequence: Synthetic oligonucleotide
  modified_base 1: mod_base = OTHER; note = 2' O-methyl modified nucleoside
  modified_base 1..2: mod_base = OTHER; note = Phosphorothioate linkage
  modified_base 2: mod_base = OTHER; note = 2' fluoro-modified nucleoside
  modified_base 2..3: mod_base = OTHER; note = Phosphorothioate linkage
  modified_base 3: mod_base = OTHER; note = 2' O-methyl modified nucleoside
  modified_base 4: mod_base = OTHER; note = 2' fluoro-modified nucleoside
  modified_base 5: mod_base = OTHER; note = 2' O-methyl modified nucleoside
  modified_base 6: mod_base = OTHER; note = 2' fluoro-modified nucleoside
  modified_base 7: mod_base = OTHER; note = 2' O-methyl modified nucleoside
  modified_base 8: mod_base = OTHER; note = 2' fluoro-modified nucleoside
  modified_base 9: mod_base = OTHER; note = 2' O-methyl modified nucleoside
  modified_base 10: mod_base = OTHER; note = 2' fluoro-modified nucleoside
  modified_base 11: mod_base = OTHER; note = 2' O-methyl modified nucleoside
  modified_base 12: mod_base = OTHER; note = 2' O-methyl modified nucleoside
  modified_base 13: mod_base = OTHER; note = 2' O-methyl modified nucleoside
  modified_base 14: mod_base = OTHER; note = 2' fluoro-modified nucleoside
  modified_base 15: mod_base = OTHER; note = 2' O-methyl modified nucleoside
  modified_base 16: mod_base = OTHER; note = 2' fluoro-modified nucleoside
  modified_base 17: mod_base = OTHER; note = 2' O-methyl modified nucleoside
  modified_base 18: mod_base = OTHER; note = 2' fluoro-modified nucleoside
  modified_base 19: mod_base = OTHER; note = 2' O-methyl modified nucleoside
  modified_base 19..20: mod_base = OTHER; note = Phosphorothioate linkage
  modified_base 20: mod_base = OTHER; note = 2' O-methyl modified nucleoside
  modified_base 20..21: mod_base = OTHER; note = Phosphorothioate linkage
  modified_base 21: mod_base = OTHER; note = 2' O-methyl modified nucleoside
  source 1..21: mol_type = other RNA
ttgctatgtcagggatctttt

SEQ ID NO: 11314 - RNA, 21 nt, synthetic construct
  misc_feature 1..21: note = Description of Artificial Sequence: Synthetic oligonucleotide
  modified_base 1: mod_base = OTHER; note = 2' O-methyl modified nucleoside
  modified_base 1..2: mod_base = OTHER; note = Phosphorothioate linkage
  modified_base 2: mod_base = OTHER; note = 2' fluoro-modified nucleoside
  modified_base 2..3: mod_base = OTHER; note = Phosphorothioate linkage
  modified_base 3: mod_base = OTHER; note = 2' O-methyl modified nucleoside
  modified_base 4: mod_base = OTHER; note = 2' fluoro-modified nucleoside
  modified_base 5: mod_base = OTHER; note = 2' O-methyl modified nucleoside
  modified_base 6: mod_base = OTHER; note = 2' fluoro-modified nucleoside
  modified_base 7: mod_base = OTHER; note = 2' O-methyl modified nucleoside
  modified_base 8: mod_base = OTHER; note = 2' fluoro-modified nucleoside
  modified_base 9: mod_base = OTHER; note = 2' O-methyl modified nucleoside
  modified_base 10: mod_base = OTHER; note = 2' fluoro-modified nucleoside
  modified_base 11: mod_base = OTHER; note = 2' O-methyl modified nucleoside
  modified_base 12: mod_base = OTHER; note = 2' O-methyl modified nucleoside
  modified_base 13: mod_base = OTHER; note = 2' O-methyl modified nucleoside
  modified_base 14: mod_base = OTHER; note = 2' fluoro-modified nucleoside
  modified_base 15: mod_base = OTHER; note = 2' O-methyl modified nucleoside
  modified_base 16: mod_base = OTHER; note = 2' fluoro-modified nucleoside
  modified_base 17: mod_base = OTHER; note = 2' O-methyl modified nucleoside
  modified_base 18: mod_base = OTHER; note = 2' fluoro-modified nucleoside
  modified_base 19: mod_base = OTHER; note = 2' O-methyl modified nucleoside
  modified_base 19..20: mod_base = OTHER; note = Phosphorothioate linkage
  modified_base 20: mod_base = OTHER; note = 2' O-methyl modified nucleoside
  modified_base 20..21: mod_base = OTHER; note = Phosphorothioate linkage
  modified_base 21: mod_base = OTHER; note = 2' O-methyl modified nucleoside
  source 1..21: mol_type = other RNA
tctgctatgtcagggatcttt

SEQ ID NO: 11315 - RNA, 21 nt, synthetic construct
  misc_feature 1..21: note = Description of Artificial Sequence: Synthetic oligonucleotide
  modified_base 1: mod_base = OTHER; note = 2' O-methyl modified nucleoside
  modified_base 1..2: mod_base = OTHER; note = Phosphorothioate linkage
  modified_base 2: mod_base = OTHER; note = 2' fluoro-modified nucleoside
  modified_base 2..3: mod_base = OTHER; note = Phosphorothioate linkage
  modified_base 3: mod_base = OTHER; note = 2' O-methyl modified nucleoside
  modified_base 4: mod_base = OTHER; note = 2' fluoro-modified nucleoside
  modified_base 5: mod_base = OTHER; note = 2' O-methyl modified nucleoside
  modified_base 6: mod_base = OTHER; note = 2' fluoro-modified nucleoside
  modified_base 7: mod_base = OTHER; note = 2' O-methyl modified nucleoside
  modified_base 8: mod_base = OTHER; note = 2' fluoro-modified nucleoside
  modified_base 9: mod_base = OTHER; note = 2' O-methyl modified nucleoside
  modified_base 10: mod_base = OTHER; note = 2' fluoro-modified nucleoside
  modified_base 11: mod_base = OTHER; note = 2' O-methyl modified nucleoside
  modified_base 12: mod_base = OTHER; note = 2' O-methyl modified nucleoside
  modified_base 13: mod_base = OTHER; note = 2' O-methyl modified nucleoside
  modified_base 14: mod_base = OTHER; note = 2' fluoro-modified nucleoside
  modified_base 15: mod_base = OTHER; note = 2' O-methyl modified nucleoside
  modified_base 16: mod_base = OTHER; note = 2' fluoro-modified nucleoside
  modified_base 17: mod_base = OTHER; note = 2' O-methyl modified nucleoside
  modified_base 18: mod_base = OTHER; note = 2' fluoro-modified nucleoside
  modified_base 19: mod_base = OTHER; note = 2' O-methyl modified nucleoside
  modified_base 19..20: mod_base = OTHER; note = Phosphorothioate linkage
  modified_base 20: mod_base = OTHER; note = 2' O-methyl modified nucleoside
  modified_base 20..21: mod_base = OTHER; note = Phosphorothioate linkage
  modified_base 21: mod_base = OTHER; note = 2' O-methyl modified nucleoside
  source 1..21: mol_type = other RNA
ttactgctatgtcagggattt

SEQ ID NO: 11316 - RNA, 21 nt, synthetic construct
  misc_feature 1..21: note = Description of Artificial Sequence: Synthetic oligonucleotide
  modified_base 1: mod_base = OTHER; note = 2' O-methyl modified nucleoside
  modified_base 1..2: mod_base = OTHER; note = Phosphorothioate linkage
  modified_base 2: mod_base = OTHER; note = 2' fluoro-modified nucleoside
  modified_base 2..3: mod_base = OTHER; note = Phosphorothioate linkage
  modified_base 3: mod_base = OTHER; note = 2' O-methyl modified nucleoside
  modified_base 4: mod_base = OTHER; note = 2' fluoro-modified nucleoside
  modified_base 5: mod_base = OTHER; note = 2' O-methyl modified nucleoside
  modified_base 6: mod_base = OTHER; note = 2' fluoro-modified nucleoside
  modified_base 7: mod_base = OTHER; note = 2' O-methyl modified nucleoside
  modified_base 8: mod_base = OTHER; note = 2' fluoro-modified nucleoside
  modified_base 9: mod_base = OTHER; note = 2' O-methyl modified nucleoside
  modified_base 10: mod_base = OTHER; note = 2' fluoro-modified nucleoside
  modified_base 11: mod_base = OTHER; note = 2' O-methyl modified nucleoside
  modified_base 12: mod_base = OTHER; note = 2' O-methyl modified nucleoside
  modified_base 13: mod_base = OTHER; note = 2' O-methyl modified nucleoside
  modified_base 14: mod_base = OTHER; note = 2' fluoro-modified nucleoside
  modified_base 15: mod_base = OTHER; note = 2' O-methyl modified nucleoside
  modified_base 16: mod_base = OTHER; note = 2' fluoro-modified nucleoside
  modified_base 17: mod_base = OTHER; note = 2' O-methyl modified nucleoside
  modified_base 18: mod_base = OTHER; note = 2' fluoro-modified nucleoside
  modified_base 19: mod_base = OTHER; note = 2' O-methyl modified nucleoside
  modified_base 19..20: mod_base = OTHER; note = Phosphorothioate linkage
  modified_base 20: mod_base = OTHER; note = 2' O-methyl modified nucleoside
  modified_base 20..21: mod_base = OTHER; note = Phosphorothioate linkage
  modified_base 21: mod_base = OTHER; note = 2' O-methyl modified nucleoside
  source 1..21: mol_type = other RNA
tgctactgctatgtcagggtt

SEQ ID NO: 11317 - RNA, 21 nt, synthetic construct
  misc_feature 1..21: note = Description of Artificial Sequence: Synthetic oligonucleotide
  modified_base 1: mod_base = OTHER; note = 2' O-methyl modified nucleoside
  modified_base 1..2: mod_base = OTHER; note = Phosphorothioate linkage
  modified_base 2: mod_base = OTHER; note = 2' fluoro-modified nucleoside
  modified_base 2..3: mod_base = OTHER; note = Phosphorothioate linkage
  modified_base 3: mod_base = OTHER; note = 2' O-methyl modified nucleoside
  modified_base 4: mod_base = OTHER; note = 2' fluoro-modified nucleoside
  modified_base 5: mod_base = OTHER; note = 2' O-methyl modified nucleoside
  modified_base 6: mod_base = OTHER; note = 2' fluoro-modified nucleoside
  modified_base 7: mod_base = OTHER; note = 2' O-methyl modified nucleoside
  modified_base 8: mod_base = OTHER; note = 2' fluoro-modified nucleoside
  modified_base 9: mod_base = OTHER; note = 2' O-methyl modified nucleoside
  modified_base 10: mod_base = OTHER; note = 2' fluoro-modified nucleoside
  modified_base 11: mod_base = OTHER; note = 2' O-methyl modified nucleoside
  modified_base 12: mod_base = OTHER; note = 2' O-methyl modified nucleoside
  modified_base 13: mod_base = OTHER; note = 2' O-methyl modified nucleoside
  modified_base 14: mod_base = OTHER; note = 2' fluoro-modified nucleoside
  modified_base 15: mod_base = OTHER; note = 2' O-methyl modified nucleoside
  modified_base 16: mod_base = OTHER; note = 2' fluoro-modified nucleoside
  modified_base 17: mod_base = OTHER; note = 2' O-methyl modified nucleoside
  modified_base 18: mod_base = OTHER; note = 2' fluoro-modified nucleoside
  modified_base 19: mod_base = OTHER; note = 2' O-methyl modified nucleoside
  modified_base 19..20: mod_base = OTHER; note = Phosphorothioate linkage
  modified_base 20: mod_base = OTHER; note = 2' O-methyl modified nucleoside
  modified_base 20..21: mod_base = OTHER; note = Phosphorothioate linkage
  modified_base 21: mod_base = OTHER; note = 2' O-methyl modified nucleoside
  source 1..21: mol_type = other RNA
tagctactgctatgtcaggtt

SEQ ID NO: 11318 - RNA, 21 nt, synthetic construct
  misc_feature 1..21: note = Description of Artificial Sequence: Synthetic oligonucleotide
  modified_base 1: mod_base = OTHER; note = 2' O-methyl modified nucleoside
  modified_base 1..2: mod_base = OTHER; note = Phosphorothioate linkage
  modified_base 2: mod_base = OTHER; note = 2' fluoro-modified nucleoside
  modified_base 2..3: mod_base = OTHER; note = Phosphorothioate linkage
  modified_base 3: mod_base = OTHER; note = 2' O-methyl modified nucleoside
  modified_base 4: mod_base = OTHER; note = 2' fluoro-modified nucleoside
  modified_base 5: mod_base = OTHER; note = 2' O-methyl modified nucleoside
  modified_base 6: mod_base = OTHER; note = 2' fluoro-modified nucleoside
  modified_base 7: mod_base = OTHER; note = 2' O-methyl modified nucleoside
  modified_base 8: mod_base = OTHER; note = 2' fluoro-modified nucleoside
  modified_base 9: mod_base = OTHER; note = 2' O-methyl modified nucleoside
  modified_base 10: mod_base = OTHER; note = 2' fluoro-modified nucleoside
  modified_base 11: mod_base = OTHER; note = 2' O-methyl modified nucleoside
  modified_base 12: mod_base = OTHER; note = 2' O-methyl modified nucleoside
  modified_base 13: mod_base = OTHER; note = 2' O-methyl modified nucleoside
  modified_base 14: mod_base = OTHER; note = 2' fluoro-modified nucleoside
  modified_base 15: mod_base = OTHER; note = 2' O-methyl modified nucleoside
  modified_base 16: mod_base = OTHER; note = 2' fluoro-modified nucleoside
  modified_base 17: mod_base = OTHER; note = 2' O-methyl modified nucleoside
  modified_base 18: mod_base = OTHER; note = 2' fluoro-modified nucleoside
  modified_base 19: mod_base = OTHER; note = 2' O-methyl modified nucleoside
  modified_base 19..20: mod_base = OTHER; note = Phosphorothioate linkage
  modified_base 20: mod_base = OTHER; note = 2' O-methyl modified nucleoside
  modified_base 20..21: mod_base = OTHER; note = Phosphorothioate linkage
  modified_base 21: mod_base = OTHER; note = 2' O-methyl modified nucleoside
  source 1..21: mol_type = other RNA
tgacaagctactgctatgttt

SEQ ID NO: 11319 - RNA, 21 nt, synthetic construct
  misc_feature 1..21: note = Description of Artificial Sequence: Synthetic oligonucleotide
  modified_base 1: mod_base = OTHER; note = 2' O-methyl modified nucleoside
  modified_base 1..2: mod_base = OTHER; note = Phosphorothioate linkage
  modified_base 2: mod_base = OTHER; note = 2' fluoro-modified nucleoside
  modified_base 2..3: mod_base = OTHER; note = Phosphorothioate linkage
  modified_base 3: mod_base = OTHER; note = 2' O-methyl modified nucleoside
  modified_base 4: mod_base = OTHER; note = 2' fluoro-modified nucleoside
  modified_base 5: mod_base = OTHER; note = 2' O-methyl modified nucleoside
  modified_base 6: mod_base = OTHER; note = 2' fluoro-modified nucleoside
  modified_base 7: mod_base = OTHER; note = 2' O-methyl modified nucleoside
  modified_base 8: mod_base = OTHER; note = 2' fluoro-modified nucleoside
  modified_base 9: mod_base = OTHER; note = 2' O-methyl modified nucleoside
  modified_base 10: mod_base = OTHER; note = 2' fluoro-modified nucleoside
  modified_base 11: mod_base = OTHER; note = 2' O-methyl modified nucleoside
  modified_base 12: mod_base = OTHER; note = 2' O-methyl modified nucleoside
  modified_base 13: mod_base = OTHER; note = 2' O-methyl modified nucleoside
  modified_base 14: mod_base = OTHER; note = 2' fluoro-modified nucleoside
  modified_base 15: mod_base = OTHER; note = 2' O-methyl modified nucleoside
  modified_base 16: mod_base = OTHER; note = 2' fluoro-modified nucleoside
  modified_base 17: mod_base = OTHER; note = 2' O-methyl modified nucleoside
  modified_base 18: mod_base = OTHER; note = 2' fluoro-modified nucleoside
  modified_base 19: mod_base = OTHER; note = 2' O-methyl modified nucleoside
  modified_base 19..20: mod_base = OTHER; note = Phosphorothioate linkage
  modified_base 20: mod_base = OTHER; note = 2' O-methyl modified nucleoside
  modified_base 20..21: mod_base = OTHER; note = Phosphorothioate linkage
  modified_base 21: mod_base = OTHER; note = 2' O-methyl modified nucleoside
  source 1..21: mol_type = other RNA
tagacaagctactgctatgtt

SEQ ID NO: 11320 - RNA, 21 nt, synthetic construct
  misc_feature 1..21: note = Description of Artificial Sequence: Synthetic oligonucleotide
  modified_base 1: mod_base = OTHER; note = 2' O-methyl modified nucleoside
  modified_base 1..2: mod_base = OTHER; note = Phosphorothioate linkage
  modified_base 2: mod_base = OTHER; note = 2' fluoro-modified nucleoside
  modified_base 2..3: mod_base = OTHER; note = Phosphorothioate linkage
  modified_base 3: mod_base = OTHER; note = 2' O-methyl modified nucleoside
  modified_base 4: mod_base = OTHER; note = 2' fluoro-modified nucleoside
  modified_base 5: mod_base = OTHER; note = 2' O-methyl modified nucleoside
  modified_base 6: mod_base = OTHER; note = 2' fluoro-modified nucleoside
  modified_base 7: mod_base = OTHER; note = 2' O-methyl modified nucleoside
  modified_base 8: mod_base = OTHER; note = 2' fluoro-modified nucleoside
  modified_base 9: mod_base = OTHER; note = 2' O-methyl modified nucleoside
  modified_base 10: mod_base = OTHER; note = 2' fluoro-modified nucleoside
  modified_base 11: mod_base = OTHER; note = 2' O-methyl modified nucleoside
  modified_base 12: mod_base = OTHER; note = 2' O-methyl modified nucleoside
  modified_base 13: mod_base = OTHER; note = 2' O-methyl modified nucleoside
  modified_base 14: mod_base = OTHER; note = 2' fluoro-modified nucleoside
  modified_base 15: mod_base = OTHER; note = 2' O-methyl modified nucleoside
  modified_base 16: mod_base = OTHER; note = 2' fluoro-modified nucleoside
  modified_base 17: mod_base = OTHER; note = 2' O-methyl modified nucleoside
  modified_base 18: mod_base = OTHER; note = 2' fluoro-modified nucleoside
  modified_base 19: mod_base = OTHER; note = 2' O-methyl modified nucleoside
  modified_base 19..20: mod_base = OTHER; note = Phosphorothioate linkage
  modified_base 20: mod_base = OTHER; note = 2' O-methyl modified nucleoside
  modified_base 20..21: mod_base = OTHER; note = Phosphorothioate linkage
  modified_base 21: mod_base = OTHER; note = 2' O-methyl modified nucleoside
  source 1..21: mol_type = other RNA
taaaagacaagctactgcttt

SEQ ID NO: 11321 - RNA, 21 nt, synthetic construct
  misc_feature 1..21: note = Description of Artificial Sequence: Synthetic oligonucleotide
  modified_base 1: mod_base = OTHER; note = 2' O-methyl modified nucleoside
  modified_base 1..2: mod_base = OTHER; note = Phosphorothioate linkage
  modified_base 2: mod_base = OTHER; note = 2' fluoro-modified nucleoside
  modified_base 2..3: mod_base = OTHER; note = Phosphorothioate linkage
  modified_base 3: mod_base = OTHER; note = 2' O-methyl modified nucleoside
  modified_base 4: mod_base = OTHER; note = 2' fluoro-modified nucleoside
  modified_base 5: mod_base = OTHER; note = 2' O-methyl modified nucleoside
  modified_base 6: mod_base = OTHER; note = 2' fluoro-modified nucleoside
  modified_base 7: mod_base = OTHER; note = 2' O-methyl modified nucleoside
  modified_base 8: mod_base = OTHER; note = 2' fluoro-modified nucleoside
  modified_base 9: mod_base = OTHER; note = 2' O-methyl modified nucleoside
  modified_base 10: mod_base = OTHER; note = 2' fluoro-modified nucleoside
  modified_base 11: mod_base = OTHER; note = 2' O-methyl modified nucleoside
  modified_base 12: mod_base = OTHER; note = 2' O-methyl modified nucleoside
  modified_base 13: mod_base = OTHER; note = 2' O-methyl modified nucleoside
  modified_base 14: mod_base = OTHER; note = 2' fluoro-modified nucleoside
  modified_base 15: mod_base = OTHER; note = 2' O-methyl modified nucleoside
  modified_base 16: mod_base = OTHER; note = 2' fluoro-modified nucleoside
  modified_base 17: mod_base = OTHER; note = 2' O-methyl modified nucleoside
  modified_base 18: mod_base = OTHER; note = 2' fluoro-modified nucleoside
  modified_base 19: mod_base = OTHER; note = 2' O-methyl modified nucleoside
  modified_base 19..20: mod_base = OTHER; note = Phosphorothioate linkage
  modified_base 20: mod_base = OTHER; note = 2' O-methyl modified nucleoside
  modified_base 20..21: mod_base = OTHER; note = Phosphorothioate linkage
  modified_base 21: mod_base = OTHER; note = 2' O-methyl modified nucleoside
  source 1..21: mol_type = other RNA
tgcaaagggatttgtgttttt

SEQ ID NO: 11322 - RNA, 21 nt, synthetic construct
  misc_feature 1..21: note = Description of Artificial Sequence: Synthetic oligonucleotide
  modified_base 1: mod_base = OTHER; note = 2' O-methyl modified nucleoside
  modified_base 1..2: mod_base = OTHER; note = Phosphorothioate linkage
  modified_base 2: mod_base = OTHER; note = 2' fluoro-modified nucleoside
  modified_base 2..3: mod_base = OTHER; note = Phosphorothioate linkage
  modified_base 3: mod_base = OTHER; note = 2' O-methyl modified nucleoside
  modified_base 4: mod_base = OTHER; note = 2' fluoro-modified nucleoside
  modified_base 5: mod_base = OTHER; note = 2' O-methyl modified nucleoside
  modified_base 6: mod_base = OTHER; note = 2' fluoro-modified nucleoside
  modified_base 7: mod_base = OTHER; note = 2' O-methyl modified nucleoside
  modified_base 8: mod_base = OTHER; note = 2' fluoro-modified nucleoside
  modified_base 9: mod_base = OTHER; note = 2' O-methyl modified nucleoside
  modified_base 10: mod_base = OTHER; note = 2' fluoro-modified nucleoside
  modified_base 11: mod_base = OTHER; note = 2' O-methyl modified nucleoside
  modified_base 12: mod_base = OTHER; note = 2' O-methyl modified nucleoside
  modified_base 13: mod_base = OTHER; note = 2' O-methyl modified nucleoside
  modified_base 14: mod_base = OTHER; note = 2' fluoro-modified nucleoside
  modified_base 15: mod_base = OTHER; note = 2' O-methyl modified nucleoside
  modified_base 16: mod_base = OTHER; note = 2' fluoro-modified nucleoside
  modified_base 17: mod_base = OTHER; note = 2' O-methyl modified nucleoside
  modified_base 18: mod_base = OTHER; note = 2' fluoro-modified nucleoside
  modified_base 19: mod_base = OTHER; note = 2' O-methyl modified nucleoside
  modified_base 19..20: mod_base = OTHER; note = Phosphorothioate linkage
  modified_base 20: mod_base = OTHER; note = 2' O-methyl modified nucleoside
  modified_base 20..21: mod_base = OTHER; note = Phosphorothioate linkage
  modified_base 21: mod_base = OTHER; note = 2' O-methyl modified nucleoside
  source 1..21: mol_type = other RNA
tctaacactcaaaggcctatt

SEQ ID NO: 11323 - RNA, 21 nt, synthetic construct
  misc_feature 1..21: note = Description of Artificial Sequence: Synthetic oligonucleotide
  modified_base 1: mod_base = OTHER; note = 2' O-methyl modified nucleoside
  modified_base 1..2: mod_base = OTHER; note = Phosphorothioate linkage
  modified_base 2: mod_base = OTHER; note = 2' fluoro-modified nucleoside
  modified_base 2..3: mod_base = OTHER; note = Phosphorothioate linkage
  modified_base 3: mod_base = OTHER; note = 2' O-methyl modified nucleoside
  modified_base 4: mod_base = OTHER; note = 2' fluoro-modified nucleoside
  modified_base 5: mod_base = OTHER; note = 2' O-methyl modified nucleoside
  modified_base 6: mod_base = OTHER; note = 2' fluoro-modified nucleoside
  modified_base 7: mod_base = OTHER; note = 2' O-methyl modified nucleoside
  modified_base 8: mod_base = OTHER; note = 2' fluoro-modified nucleoside
  modified_base 9: mod_base = OTHER; note = 2' O-methyl modified nucleoside
  modified_base 10: mod_base = OTHER; note = 2' fluoro-modified nucleoside
  modified_base 11: mod_base = OTHER; note = 2' O-methyl modified nucleoside
  modified_base 12: mod_base = OTHER; note = 2' O-methyl modified nucleoside
  modified_base 13: mod_base = OTHER; note = 2' O-methyl modified nucleoside
  modified_base 14: mod_base = OTHER; note = 2' fluoro-modified nucleoside
  modified_base 15: mod_base = OTHER; note = 2' O-methyl modified nucleoside
  modified_base 16: mod_base = OTHER; note = 2' fluoro-modified nucleoside
  modified_base 17: mod_base = OTHER; note = 2' O-methyl modified nucleoside
  modified_base 18: mod_base = OTHER; note = 2' fluoro-modified nucleoside
  modified_base 19: mod_base = OTHER; note = 2' O-methyl modified nucleoside
  modified_base 19..20: mod_base = OTHER; note = Phosphorothioate linkage
  modified_base 20: mod_base = OTHER; note = 2' O-methyl modified nucleoside
  modified_base 20..21: mod_base = OTHER; note = Phosphorothioate linkage
  modified_base 21: mod_base = OTHER; note = 2' O-methyl modified nucleoside
  source 1..21: mol_type = other RNA
ttctaacactcaaaggccttt

SEQ ID NO: 11324 - RNA, 21 nt, synthetic construct
  misc_feature 1..21: note = Description of Artificial Sequence: Synthetic oligonucleotide
  modified_base 1: mod_base = OTHER; note = 2' O-methyl modified nucleoside
  modified_base 1..2: mod_base = OTHER; note = Phosphorothioate linkage
  modified_base 2: mod_base = OTHER; note = 2' fluoro-modified nucleoside
  modified_base 2..3: mod_base = OTHER; note = Phosphorothioate linkage
  modified_base 3: mod_base = OTHER; note = 2' O-methyl modified nucleoside
  modified_base 4: mod_base = OTHER; note = 2' fluoro-modified nucleoside
  modified_base 5: mod_base = OTHER; note = 2' O-methyl modified nucleoside
  modified_base 6: mod_base = OTHER; note = 2' fluoro-modified nucleoside
  modified_base 7: mod_base = OTHER; note = 2' O-methyl modified nucleoside
  modified_base 8: mod_base = OTHER; note = 2' fluoro-modified nucleoside
  modified_base 9: mod_base = OTHER; note = 2' O-methyl modified nucleoside
  modified_base 10: mod_base = OTHER; note = 2' fluoro-modified nucleoside
  modified_base 11: mod_base = OTHER; note = 2' O-methyl modified nucleoside
  modified_base 12: mod_base = OTHER; note = 2' O-methyl modified nucleoside
  modified_base 13: mod_base = OTHER; note = 2' O-methyl modified nucleoside
  modified_base 14: mod_base = OTHER; note = 2' fluoro-modified nucleoside
  modified_base 15: mod_base = OTHER; note = 2' O-methyl modified nucleoside
  modified_base 16: mod_base = OTHER; note = 2' fluoro-modified nucleoside
  modified_base 17: mod_base = OTHER; note = 2' O-methyl modified nucleoside
  modified_base 18: mod_base = OTHER; note = 2' fluoro-modified nucleoside
  modified_base 19: mod_base = OTHER; note = 2' O-methyl modified nucleoside
  modified_base 19..20: mod_base = OTHER; note = Phosphorothioate linkage
  modified_base 20: mod_base = OTHER; note = 2' O-methyl modified nucleoside
  modified_base 20..21: mod_base = OTHER; note = Phosphorothioate linkage
  modified_base 21: mod_base = OTHER; note = 2' O-methyl modified nucleoside
  source 1..21: mol_type = other RNA
tgtagactcaagataattttt

SEQ ID NO: 11325 - RNA, 21 nt, synthetic construct
  misc_feature 1..21: note = Description of Artificial Sequence: Synthetic oligonucleotide
  modified_base 1: mod_base = OTHER; note = 2' O-methyl modified nucleoside
  modified_base 1..2: mod_base = OTHER; note = Phosphorothioate linkage
  modified_base 2: mod_base = OTHER; note = 2' fluoro-modified nucleoside
  modified_base 2..3: mod_base = OTHER; note = Phosphorothioate linkage
  modified_base 3: mod_base = OTHER; note = 2' O-methyl modified nucleoside
  modified_base 4: mod_base = OTHER; note = 2' fluoro-modified nucleoside
  modified_base 5: mod_base = OTHER; note = 2' O-methyl modified nucleoside
  modified_base 6: mod_base = OTHER; note = 2' fluoro-modified nucleoside
  modified_base 7: mod_base = OTHER; note = 2' O-methyl modified nucleoside
  modified_base 8: mod_base = OTHER; note = 2' fluoro-modified nucleoside
  modified_base 9: mod_base = OTHER; note = 2' O-methyl modified nucleoside
  modified_base 10: mod_base = OTHER; note = 2' fluoro-modified nucleoside
  modified_base 11: mod_base = OTHER; note = 2' O-methyl modified nucleoside
  modified_base 12: mod_base = OTHER; note = 2' O-methyl modified nucleoside
  modified_base 13: mod_base = OTHER; note = 2' O-methyl modified nucleoside
  modified_base 14: mod_base = OTHER; note = 2' fluoro-modified nucleoside
  modified_base 15: mod_base = OTHER; note = 2' O-methyl modified nucleoside
  modified_base 16: mod_base = OTHER; note = 2' fluoro-modified nucleoside
  modified_base 17: mod_base = OTHER; note = 2' O-methyl modified nucleoside
  modified_base 18: mod_base = OTHER; note = 2' fluoro-modified nucleoside
  modified_base 19: mod_base = OTHER; note = 2' O-methyl modified nucleoside
  modified_base 19..20: mod_base = OTHER; note = Phosphorothioate linkage
  modified_base 20: mod_base = OTHER; note = 2' O-methyl modified nucleoside
  modified_base 20..21: mod_base = OTHER; note = Phosphorothioate linkage
  modified_base 21: mod_base = OTHER; note = 2' O-methyl modified nucleoside
  source 1..21: mol_type = other RNA
ttgtagactcaagataatttt

SEQ ID NO: 11326 - RNA, 21 nt, synthetic construct
  misc_feature 1..21: note = Description of Artificial Sequence: Synthetic oligonucleotide
  modified_base 1: mod_base = OTHER; note = 2' O-methyl modified nucleoside
  modified_base 1..2: mod_base = OTHER; note = Phosphorothioate linkage
  modified_base 2: mod_base = OTHER; note = 2' fluoro-modified nucleoside
  modified_base 2..3: mod_base = OTHER; note = Phosphorothioate linkage
  modified_base 3: mod_base = OTHER; note = 2' O-methyl modified nucleoside
  modified_base 4: mod_base = OTHER; note = 2' fluoro-modified nucleoside
  modified_base 5: mod_base = OTHER; note = 2' O-methyl modified nucleoside
  modified_base 6: mod_base = OTHER; note = 2' fluoro-modified nucleoside
  modified_base 7: mod_base = OTHER; note = 2' O-methyl modified nucleoside
  modified_base 8: mod_base = OTHER; note = 2' fluoro-modified nucleoside
  modified_base 9: mod_base = OTHER; note = 2' O-methyl modified nucleoside
  modified_base 10: mod_base = OTHER; note = 2' fluoro-modified nucleoside
  modified_base 11: mod_base = OTHER; note = 2' O-methyl modified nucleoside
  modified_base 12: mod_base = OTHER; note = 2' O-methyl modified nucleoside
  modified_base 13: mod_base = OTHER; note = 2' O-methyl modified nucleoside
  modified_base 14: mod_base = OTHER; note = 2' fluoro-modified nucleoside
  modified_base 15: mod_base = OTHER; note = 2' O-methyl modified nucleoside
  modified_base 16: mod_base = OTHER; note = 2' fluoro-modified nucleoside
  modified_base 17: mod_base = OTHER; note = 2' O-methyl modified nucleoside
  modified_base 18: mod_base = OTHER; note = 2' fluoro-modified nucleoside
  modified_base 19: mod_base = OTHER; note = 2' O-methyl modified nucleoside
  modified_base 19..20: mod_base = OTHER; note = Phosphorothioate linkage
  modified_base 20: mod_base = OTHER; note = 2' O-methyl modified nucleoside
  modified_base 20..21: mod_base = OTHER; note = Phosphorothioate linkage
  modified_base 21: mod_base = OTHER; note = 2' O-methyl modified nucleoside
  source 1..21: mol_type = other RNA
tcgaacaatttttgtgttttt

SEQ ID NO: 11327 - RNA, 21 nt, synthetic construct
  misc_feature 1..21: note = Description of Artificial Sequence: Synthetic oligonucleotide
  modified_base 1: mod_base = OTHER; note = 2' O-methyl modified nucleoside
  modified_base 1..2: mod_base = OTHER; note = Phosphorothioate linkage
  modified_base 2: mod_base = OTHER; note = 2' fluoro-modified nucleoside
  modified_base 2..3: mod_base = OTHER; note = Phosphorothioate linkage
  modified_base 3: mod_base = OTHER; note = 2' O-methyl modified nucleoside
  modified_base 4: mod_base = OTHER; note = 2' fluoro-modified nucleoside
  modified_base 5: mod_base = OTHER; note = 2' O-methyl modified nucleoside
  modified_base 6: mod_base = OTHER; note = 2' fluoro-modified nucleoside
  modified_base 7: mod_base = OTHER; note = 2' O-methyl modified nucleoside
  modified_base 8: mod_base = OTHER; note = 2' fluoro-modified nucleoside
  modified_base 9: mod_base = OTHER; note = 2' O-methyl modified nucleoside
  modified_base 10: mod_base = OTHER; note = 2' fluoro-modified nucleoside
  modified_base 11: mod_base = OTHER; note = 2' O-methyl modified nucleoside
  modified_base 12: mod_base = OTHER; note = 2' O-methyl modified nucleoside
  modified_base 13: mod_base = OTHER; note = 2' O-methyl modified nucleoside
  modified_base 14: mod_base = OTHER; note = 2' fluoro-modified nucleoside
  modified_base 15: mod_base = OTHER; note = 2' O-methyl modified nucleoside
  modified_base 16: mod_base = OTHER; note = 2' fluoro-modified nucleoside
  modified_base 17: mod_base = OTHER; note = 2' O-methyl modified nucleoside
  modified_base 18: mod_base = OTHER; note = 2' fluoro-modified nucleoside
  modified_base 19: mod_base = OTHER; note = 2' O-methyl modified nucleoside
  modified_base 19..20: mod_base = OTHER; note = Phosphorothioate linkage
  modified_base 20: mod_base = OTHER; note = 2' O-methyl modified nucleoside
  modified_base 20..21: mod_base = OTHER; note = Phosphorothioate linkage
  modified_base 21: mod_base = OTHER; note = 2' O-methyl modified nucleoside
  source 1..21: mol_type = other RNA
tgccgaacaatttttgtgttt

SEQ ID NO: 11328 - RNA, 21 nt, synthetic construct
  misc_feature 1..21: note = Description of Artificial Sequence: Synthetic oligonucleotide
  modified_base 1: mod_base = OTHER; note = 2' O-methyl modified nucleoside
  modified_base 1..2: mod_base = OTHER; note = Phosphorothioate linkage
  modified_base 2: mod_base = OTHER; note = 2' fluoro-modified nucleoside
  modified_base 2..3: mod_base = OTHER; note = Phosphorothioate linkage
  modified_base 3: mod_base = OTHER; note = 2' O-methyl modified nucleoside
  modified_base 4: mod_base = OTHER; note = 2' fluoro-modified nucleoside
  modified_base 5: mod_base = OTHER; note = 2' O-methyl modified nucleoside
  modified_base 6: mod_base = OTHER; note = 2' fluoro-modified nucleoside
  modified_base 7: mod_base = OTHER; note = 2' O-methyl modified nucleoside
  modified_base 8: mod_base = OTHER; note = 2' fluoro-modified nucleoside
  modified_base 9: mod_base = OTHER; note = 2' O-methyl modified nucleoside
  modified_base 10: mod_base = OTHER; note = 2' fluoro-modified nucleoside
  modified_base 11: mod_base = OTHER; note = 2' O-methyl modified nucleoside
  modified_base 12: mod_base = OTHER; note = 2' O-methyl modified nucleoside
  modified_base 13: mod_base = OTHER; note = 2' O-methyl modified nucleoside
  modified_base 14: mod_base = OTHER; note = 2' fluoro-modified nucleoside
  modified_base 15: mod_base = OTHER; note = 2' O-methyl modified nucleoside
  modified_base 16: mod_base = OTHER; note = 2' fluoro-modified nucleoside
  modified_base 17: mod_base = OTHER; note = 2' O-methyl modified nucleoside
  modified_base 18: mod_base = OTHER; note = 2' fluoro-modified nucleoside
  modified_base 19: mod_base = OTHER; note = 2' O-methyl modified nucleoside
  modified_base 19..20: mod_base = OTHER; note = Phosphorothioate linkage
  modified_base 20: mod_base = OTHER; note = 2' O-methyl modified nucleoside
  modified_base 20..21: mod_base = OTHER; note = Phosphorothioate linkage
  modified_base 21: mod_base = OTHER; note = 2' O-methyl modified nucleoside
  source 1..21: mol_type = other RNA
tagccgaacaatttttgtgtt

SEQ ID NO: 11329 - RNA, 21 nt, synthetic construct
  misc_feature 1..21: note = Description of Artificial Sequence: Synthetic oligonucleotide
  modified_base 1: mod_base = OTHER; note = 2' O-methyl modified nucleoside
  modified_base 1..2: mod_base = OTHER; note = Phosphorothioate linkage
  modified_base 2: mod_base = OTHER; note = 2' fluoro-modified nucleoside
  modified_base 2..3: mod_base = OTHER; note = Phosphorothioate linkage
  modified_base 3: mod_base = OTHER; note = 2' O-methyl modified nucleoside
  modified_base 4: mod_base = OTHER; note = 2' fluoro-modified nucleoside
  modified_base 5: mod_base = OTHER; note = 2' O-methyl modified nucleoside
  modified_base 6: mod_base = OTHER; note = 2' fluoro-modified nucleoside
  modified_base 7: mod_base = OTHER; note = 2' O-methyl modified nucleoside
  modified_base 8: mod_base = OTHER; note = 2' fluoro-modified nucleoside
  modified_base 9: mod_base = OTHER; note = 2' O-methyl modified nucleoside
  modified_base 10: mod_base = OTHER; note = 2' fluoro-modified nucleoside
  modified_base 11: mod_base = OTHER; note = 2' O-methyl modified nucleoside
  modified_base 12: mod_base = OTHER; note = 2' O-methyl modified nucleoside
  modified_base 13: mod_base = OTHER; note = 2' O-methyl modified nucleoside
  modified_base 14: mod_base = OTHER; note = 2' fluoro-modified nucleoside
  modified_base 15: mod_base = OTHER; note = 2' O-methyl modified nucleoside
  modified_base 16: mod_base = OTHER; note = 2' fluoro-modified nucleoside
  modified_base 17: mod_base = OTHER; note = 2' O-methyl modified nucleoside
  modified_base 18: mod_base = OTHER; note = 2' fluoro-modified nucleoside
  modified_base 19: mod_base = OTHER; note = 2' O-methyl modified nucleoside
  modified_base 19..20: mod_base = OTHER; note = Phosphorothioate linkage
  modified_base 20: mod_base = OTHER; note = 2' O-methyl modified nucleoside
  modified_base 20..21: mod_base = OTHER; note = Phosphorothioate linkage
  modified_base 21: mod_base = OTHER; note = 2' O-methyl modified nucleoside
  source 1..21: mol_type = other RNA
tcagccgaacaatttttgttt

SEQ ID NO: 11330 - RNA, 21 nt, synthetic construct
  misc_feature 1..21: note = Description of Artificial Sequence: Synthetic oligonucleotide
  modified_base 1: mod_base = OTHER; note = 2' O-methyl modified nucleoside
  modified_base 1..2: mod_base = OTHER; note = Phosphorothioate linkage
  modified_base 2: mod_base = OTHER; note = 2' fluoro-modified nucleoside
  modified_base 2..3: mod_base = OTHER; note = Phosphorothioate linkage
  modified_base 3: mod_base = OTHER; note = 2' O-methyl modified nucleoside
  modified_base 4: mod_base = OTHER; note = 2' fluoro-modified nucleoside
  modified_base 5: mod_base = OTHER; note = 2' O-methyl modified nucleoside
  modified_base 6: mod_base = OTHER; note = 2' fluoro-modified nucleoside
  modified_base 7: mod_base = OTHER; note = 2' O-methyl modified nucleoside
  modified_base 8: mod_base = OTHER; note = 2' fluoro-modified nucleoside
  modified_base 9: mod_base = OTHER; note = 2' O-methyl modified nucleoside
  modified_base 10: mod_base = OTHER; note = 2' fluoro-modified nucleoside
  modified_base 11: mod_base = OTHER; note = 2' O-methyl modified nucleoside
  modified_base 12: mod_base = OTHER; note = 2' O-methyl modified nucleoside
  modified_base 13: mod_base = OTHER; note = 2' O-methyl modified nucleoside
  modified_base 14: mod_base = OTHER; note = 2' fluoro-modified nucleoside
  modified_base 15: mod_base = OTHER; note = 2' O-methyl modified nucleoside
  modified_base 16: mod_base = OTHER; note = 2' fluoro-modified nucleoside
  modified_base 17: mod_base = OTHER; note = 2' O-methyl modified nucleoside
  modified_base 18: mod_base = OTHER; note = 2' fluoro-modified nucleoside
  modified_base 19: mod_base = OTHER; note = 2' O-methyl modified nucleoside
  modified_base 19..20: mod_base = OTHER; note = Phosphorothioate linkage
  modified_base 20: mod_base = OTHER; note = 2' O-methyl modified nucleoside
  modified_base 20..21: mod_base = OTHER; note = Phosphorothioate linkage
  modified_base 21: mod_base = OTHER; note = 2' O-methyl modified nucleoside
  source 1..21: mol_type = other RNA
ttaaggcagttttgtgccgtt

SEQ ID NO: 11331 - RNA, 21 nt, synthetic construct
  misc_feature 1..21: note = Description of Artificial Sequence: Synthetic oligonucleotide
  modified_base 1: mod_base = OTHER; note = 2' O-methyl modified nucleoside
  modified_base 1..2: mod_base = OTHER; note = Phosphorothioate linkage
  modified_base 2: mod_base = OTHER; note = 2' fluoro-modified nucleoside
  modified_base 2..3: mod_base = OTHER; note = Phosphorothioate linkage
  modified_base 3: mod_base = OTHER; note = 2' O-methyl modified nucleoside
  modified_base 4: mod_base = OTHER; note = 2' fluoro-modified nucleoside
  modified_base 5: mod_base = OTHER; note = 2' O-methyl modified nucleoside
  modified_base 6: mod_base = OTHER; note = 2' fluoro-modified nucleoside
  modified_base 7: mod_base = OTHER; note = 2' O-methyl modified nucleoside
  modified_base 8: mod_base = OTHER; note = 2' fluoro-modified nucleoside
  modified_base 9: mod_base = OTHER; note = 2' O-methyl modified nucleoside
  modified_base 10: mod_base = OTHER; note = 2' fluoro-modified nucleoside
  modified_base 11: mod_base = OTHER; note = 2' O-methyl modified nucleoside
  modified_base 12: mod_base = OTHER; note = 2' O-methyl modified nucleoside
  modified_base 13: mod_base = OTHER; note = 2' O-methyl modified nucleoside
  modified_base 14: mod_base = OTHER; note = 2' fluoro-modified nucleoside
  modified_base 15: mod_base = OTHER; note = 2' O-methyl modified nucleoside
  modified_base 16: mod_base = OTHER; note = 2' fluoro-modified nucleoside
  modified_base 17: mod_base = OTHER; note = 2' O-methyl modified nucleoside
  modified_base 18: mod_base = OTHER; note = 2' fluoro-modified nucleoside
  modified_base 19: mod_base = OTHER; note = 2' O-methyl modified nucleoside
  modified_base 19..20: mod_base = OTHER; note = Phosphorothioate linkage
  modified_base 20: mod_base = OTHER; note = 2' O-methyl modified nucleoside
  modified_base 20..21: mod_base = OTHER; note = Phosphorothioate linkage
  modified_base 21: mod_base = OTHER; note = 2' O-methyl modified nucleoside
  source 1..21: mol_type = other RNA
tataacaccatctaccttctt

SEQ ID NO: 11332 - RNA, 21 nt, synthetic construct
  misc_feature 1..21: note = Description of Artificial Sequence: Synthetic oligonucleotide
  modified_base 1: mod_base = OTHER; note = 2' O-methyl modified nucleoside
  modified_base 1..2: mod_base = OTHER; note = Phosphorothioate linkage
  modified_base 2: mod_base = OTHER; note = 2' fluoro-modified nucleoside
  modified_base 2..3: mod_base = OTHER; note = Phosphorothioate linkage
  modified_base 3: mod_base = OTHER; note = 2' O-methyl modified nucleoside
  modified_base 4: mod_base = OTHER; note = 2' fluoro-modified nucleoside
  modified_base 5: mod_base = OTHER; note = 2' O-methyl modified nucleoside
  modified_base 6: mod_base = OTHER; note = 2' fluoro-modified nucleoside
  modified_base 7: mod_base = OTHER; note = 2' O-methyl modified nucleoside
  modified_base 8: mod_base = OTHER; note = 2' fluoro-modified nucleoside
  modified_base 9: mod_base = OTHER; note = 2' O-methyl modified nucleoside
  modified_base 10: mod_base = OTHER; note = 2' fluoro-modified nucleoside
  modified_base 11: mod_base = OTHER; note = 2' O-methyl modified nucleoside
  modified_base 12: mod_base = OTHER; note = 2' O-methyl modified nucleoside
  modified_base 13: mod_base = OTHER; note = 2' O-methyl modified nucleoside
  modified_base 14: mod_base = OTHER; note = 2' fluoro-modified nucleoside
  modified_base 15: mod_base = OTHER; note = 2' O-methyl modified nucleoside
  modified_base 16: mod_base = OTHER; note = 2' fluoro-modified nucleoside
  modified_base 17: mod_base = OTHER; note = 2' O-methyl modified nucleoside
  modified_base 18: mod_base = OTHER; note = 2' fluoro-modified nucleoside
  modified_base 19: mod_base = OTHER; note = 2' O-methyl modified nucleoside
  modified_base 19..20: mod_base = OTHER; note = Phosphorothioate linkage
  modified_base 20: mod_base = OTHER; note = 2' O-methyl modified nucleoside
  modified_base 20..21: mod_base = OTHER; note = Phosphorothioate linkage
  modified_base 21: mod_base = OTHER; note = 2' O-methyl modified nucleoside
  source 1..21: mol_type = other RNA
taactataacaccatctactt

SEQ ID NO: 11333 - RNA, 21 nt, synthetic construct
  misc_feature 1..21: note = Description of Artificial Sequence: Synthetic oligonucleotide
  modified_base 1: mod_base = OTHER; note = 2' fluoro-modified nucleoside
  modified_base 1..2: mod_base = OTHER; note = Phosphorothioate linkage
  modified_base 2: mod_base = OTHER; note = 2' O-methyl modified nucleoside
  modified_base 2..3: mod_base = OTHER; note = Phosphorothioate linkage
  modified_base 3: mod_base = OTHER; note = 2' fluoro-modified nucleoside
  modified_base 4: mod_base = OTHER; note = 2' O-methyl modified nucleoside
  modified_base 5: mod_base = OTHER; note = 2' fluoro-modified nucleoside
  modified_base 6: mod_base = OTHER; note = 2' O-methyl modified nucleoside
  modified_base 7: mod_base = OTHER; note = 2' fluoro-modified nucleoside
  modified_base 8: mod_base = OTHER; note = 2' fluoro-modified nucleoside
  modified_base 9: mod_base = OTHER; note = 2' fluoro-modified nucleoside
  modified_base 10: mod_base = OTHER; note = 2' O-methyl modified nucleoside
  modified_base 11: mod_base = OTHER; note = 2' fluoro-modified nucleoside
  modified_base 12: mod_base = OTHER; note = 2' O-methyl modified nucleoside
  modified_base 13: mod_base = OTHER; note = 2' fluoro-modified nucleoside
  modified_base 14: mod_base = OTHER; note = 2' O-methyl modified nucleoside
  modified_base 15: mod_base = OTHER; note = 2' fluoro-modified nucleoside
  modified_base 16: mod_base = OTHER; note = 2' O-methyl modified nucleoside
  modified_base 17: mod_base = OTHER; note = 2' fluoro-modified nucleoside
  modified_base 18: mod_base = OTHER; note = 2' O-methyl modified nucleoside
  modified_base 19: mod_base = OTHER; note = 2' fluoro-modified nucleoside
  modified_base 19..20: mod_base = OTHER; note = Phosphorothioate linkage
  modified_base 20: mod_base = OTHER; note = 2' O-methyl modified nucleoside
  modified_base 20..21: mod_base = OTHER; note = Phosphorothioate linkage
  modified_base 21: mod_base = OTHER; note = 2' O-methyl modified nucleoside
  source 1..21: mol_type = other RNA
tggaccatcatccagagaatt

SEQ ID NO: 11334 - RNA, 21 nt, synthetic construct
  misc_feature 1..21: note = Description of Artificial Sequence: Synthetic oligonucleotide
  modified_base 1: mod_base = OTHER; note = 2' fluoro-modified nucleoside
  modified_base 1..2: mod_base = OTHER; note = Phosphorothioate linkage
  modified_base 2: mod_base = OTHER; note = 2' O-methyl modified nucleoside
  modified_base 2..3: mod_base = OTHER; note = Phosphorothioate linkage
  modified_base 3: mod_base = OTHER; note = 2' fluoro-modified nucleoside
  modified_base 4: mod_base = OTHER; note = 2' O-methyl modified nucleoside
  modified_base 5: mod_base = OTHER; note = 2' fluoro-modified nucleoside
  modified_base 6: mod_base = OTHER; note = 2' O-methyl modified nucleoside
  modified_base 7: mod_base = OTHER; note = 2' fluoro-modified nucleoside
  modified_base 8: mod_base = OTHER; note = 2' fluoro-modified nucleoside
  modified_base 9: mod_base = OTHER; note = 2' fluoro-modified nucleoside
  modified_base 10: mod_base = OTHER; note = 2' O-methyl modified nucleoside
  modified_base 11: mod_base = OTHER; note = 2' fluoro-modified nucleoside
  modified_base 12: mod_base = OTHER; note = 2' O-methyl modified nucleoside
  modified_base 13: mod_base = OTHER; note = 2' fluoro-modified nucleoside
  modified_base 14: mod_base = OTHER; note = 2' O-methyl modified nucleoside
  modified_base 15: mod_base = OTHER; note = 2' fluoro-modified nucleoside
  modified_base 16: mod_base = OTHER; note = 2' O-methyl modified nucleoside
  modified_base 17: mod_base = OTHER; note = 2' fluoro-modified nucleoside
  modified_base 18: mod_base = OTHER; note = 2' O-methyl modified nucleoside
  modified_base 19: mod_base = OTHER; note = 2' fluoro-modified nucleoside
  modified_base 19..20: mod_base = OTHER; note = Phosphorothioate linkage
  modified_base 20: mod_base = OTHER; note = 2' O-methyl modified nucleoside
  modified_base 20..21: mod_base = OTHER; note = Phosphorothioate linkage
  modified_base 21: mod_base = OTHER; note = 2' O-methyl modified nucleoside
  source 1..21: mol_type = other RNA
ggaccatcatccagagacatt

SEQ ID NO: 11335 - RNA, 21 nt, synthetic construct
  misc_feature 1..21: note = Description of Artificial Sequence: Synthetic oligonucleotide
  modified_base 1: mod_base = OTHER; note = 2' fluoro-modified nucleoside
  modified_base 1..2: mod_base = OTHER; note = Phosphorothioate linkage
  modified_base 2: mod_base = OTHER; note = 2' O-methyl modified nucleoside
  modified_base 2..3: mod_base = OTHER; note = Phosphorothioate linkage
  modified_base 3: mod_base = OTHER; note = 2' fluoro-modified nucleoside
  modified_base 4: mod_base = OTHER; note = 2' O-methyl modified nucleoside
  modified_base 5: mod_base = OTHER; note = 2' fluoro-modified nucleoside
  modified_base 6: mod_base = OTHER; note = 2' O-methyl modified nucleoside
  modified_base 7: mod_base = OTHER; note = 2' fluoro-modified nucleoside
  modified_base 8: mod_base = OTHER; note = 2' fluoro-modified nucleoside
  modified_base 9: mod_base = OTHER; note = 2' fluoro-modified nucleoside
  modified_base 10: mod_base = OTHER; note = 2' O-methyl modified nucleoside
  modified_base 11: mod_base = OTHER; note = 2' fluoro-modified nucleoside
  modified_base 12: mod_base = OTHER; note = 2' O-methyl modified nucleoside
  modified_base 13: mod_base = OTHER; note = 2' fluoro-modified nucleoside
  modified_base 14: mod_base = OTHER; note = 2' O-methyl modified nucleoside
  modified_base 15: mod_base = OTHER; note = 2' fluoro-modified nucleoside
  modified_base 16: mod_base = OTHER; note = 2' O-methyl modified nucleoside
  modified_base 17: mod_base = OTHER; note = 2' fluoro-modified nucleoside
  modified_base 18: mod_base = OTHER; note = 2' O-methyl modified nucleoside
  modified_base 19: mod_base = OTHER; note = 2' fluoro-modified nucleoside
  modified_base 19..20: mod_base = OTHER; note = Phosphorothioate linkage
  modified_base 20: mod_base = OTHER; note = 2' O-methyl modified nucleoside
  modified_base 20..21: mod_base = OTHER; note = Phosphorothioate linkage
  modified_base 21: mod_base = OTHER; note = 2' O-methyl modified nucleoside
  source 1..21: mol_type = other RNA
cgcctcttcctggggaacatt

SEQ ID NO: 11336 - RNA, 21 nt, synthetic construct
  misc_feature 1..21: note = Description of Artificial Sequence: Synthetic oligonucleotide
  modified_base 1: mod_base = OTHER; note = 2' fluoro-modified nucleoside
  modified_base 1..2: mod_base = OTHER; note = Phosphorothioate linkage
  modified_base 2: mod_base = OTHER; note = 2' O-methyl modified nucleoside
  modified_base 2..3: mod_base = OTHER; note = Phosphorothioate linkage
  modified_base 3: mod_base = OTHER; note = 2' fluoro-modified nucleoside
  modified_base 4: mod_base = OTHER; note = 2' O-methyl modified nucleoside
  modified_base 5: mod_base = OTHER; note = 2' fluoro-modified nucleoside
  modified_base 6: mod_base = OTHER; note = 2' O-methyl modified nucleoside
  modified_base 7: mod_base = OTHER; note = 2' fluoro-modified nucleoside
  modified_base 8: mod_base = OTHER; note = 2' fluoro-modified nucleoside
  modified_base 9: mod_base = OTHER; note = 2' fluoro-modified nucleoside
  modified_base 10: mod_base = OTHER; note = 2' O-methyl modified nucleoside
  modified_base 11: mod_base = OTHER; note = 2' fluoro-modified nucleoside
  modified_base 12: mod_base = OTHER; note = 2' O-methyl modified nucleoside
  modified_base 13: mod_base = OTHER; note = 2' fluoro-modified nucleoside
  modified_base 14: mod_base = OTHER; note = 2' O-methyl modified nucleoside
  modified_base 15: mod_base = OTHER; note = 2' fluoro-modified nucleoside
  modified_base 16: mod_base = OTHER; note = 2' O-methyl modified nucleoside
  modified_base 17: mod_base = OTHER; note = 2' fluoro-modified nucleoside
  modified_base 18: mod_base = OTHER; note = 2' O-methyl modified nucleoside
  modified_base 19: mod_base = OTHER; note = 2' fluoro-modified nucleoside
  modified_base 19..20: mod_base = OTHER; note = Phosphorothioate linkage
  modified_base 20: mod_base = OTHER; note = 2' O-methyl modified nucleoside
  modified_base 20..21: mod_base = OTHER; note = Phosphorothioate linkage
  modified_base 21: mod_base = OTHER; note = 2' O-methyl modified nucleoside
  source 1..21: mol_type = other RNA
gacaactgcttggacaagatt

SEQ ID NO: 11337 - RNA, 21 nt, synthetic construct
  misc_feature 1..21: note = Description of Artificial Sequence: Synthetic oligonucleotide
  modified_base 1: mod_base = OTHER; note = 2' fluoro-modified nucleoside
  modified_base 1..2: mod_base = OTHER; note = Phosphorothioate linkage
  modified_base 2: mod_base = OTHER; note = 2' O-methyl modified nucleoside
  modified_base 2..3: mod_base = OTHER; note = Phosphorothioate linkage
  modified_base 3: mod_base = OTHER; note = 2' fluoro-modified nucleoside
  modified_base 4: mod_base = OTHER; note = 2' O-methyl modified nucleoside
  modified_base 5: mod_base = OTHER; note = 2' fluoro-modified nucleoside
  modified_base 6: mod_base = OTHER; note = 2' O-methyl modified nucleoside
  modified_base 7: mod_base = OTHER; note = 2' fluoro-modified nucleoside
  modified_base 8: mod_base = OTHER; note = 2' fluoro-modified nucleoside
  modified_base 9: mod_base = OTHER; note = 2' fluoro-modified nucleoside
  modified_base 10: mod_base = OTHER; note = 2' O-methyl modified nucleoside
  modified_base 11: mod_base = OTHER; note = 2' fluoro-modified nucleoside
  modified_base 12: mod_base = OTHER; note = 2' O-methyl modified nucleoside
  modified_base 13: mod_base = OTHER; note = 2' fluoro-modified nucleoside
  modified_base 14: mod_base = OTHER; note = 2' O-methyl modified nucleoside
  modified_base 15: mod_base = OTHER; note = 2' fluoro-modified nucleoside
  modified_base 16: mod_base = OTHER; note = 2' O-methyl modified nucleoside
  modified_base 17: mod_base = OTHER; note = 2' fluoro-modified nucleoside
  modified_base 18: mod_base = OTHER; note = 2' O-methyl modified nucleoside
  modified_base 19: mod_base = OTHER; note = 2' fluoro-modified nucleoside
  modified_base 19..20: mod_base = OTHER; note = Phosphorothioate linkage
  modified_base 20: mod_base = OTHER; note = 2' O-methyl modified nucleoside
  modified_base 20..21: mod_base = OTHER; note = Phosphorothioate linkage
  modified_base 21: mod_base = OTHER; note = 2' O-methyl modified nucleoside
  source 1..21: mol_type = other RNA
acaactgcttggacaagtatt

SEQ ID NO: 11338 - RNA, 21 nt, synthetic construct
  misc_feature 1..21: note = Description of Artificial Sequence: Synthetic oligonucleotide
  modified_base 1: mod_base = OTHER; note = 2' fluoro-modified nucleoside
  modified_base 1..2: mod_base = OTHER; note = Phosphorothioate linkage
  modified_base 2: mod_base = OTHER; note = 2' O-methyl modified nucleoside
  modified_base 2..3: mod_base = OTHER; note = Phosphorothioate linkage
  modified_base 3: mod_base = OTHER; note = 2' fluoro-modified nucleoside
  modified_base 4: mod_base = OTHER; note = 2' O-methyl modified nucleoside
  modified_base 5: mod_base = OTHER; note = 2' fluoro-modified nucleoside
  modified_base 6: mod_base = OTHER; note = 2' O-methyl modified nucleoside
  modified_base 7: mod_base = OTHER; note = 2' fluoro-modified nucleoside
  modified_base 8: mod_base = OTHER; note = 2' fluoro-modified nucleoside
  modified_base 9: mod_base = OTHER; note = 2' fluoro-modified nucleoside
  modified_base 10: mod_base = OTHER; note = 2' O-methyl modified nucleoside
  modified_base 11: mod_base = OTHER; note = 2' fluoro-modified nucleoside
  modified_base 12: mod_base = OTHER; note = 2' O-methyl modified nucleoside
  modified_base 13: mod_base = OTHER; note = 2' fluoro-modified nucleoside
  modified_base 14: mod_base = OTHER; note = 2' O-methyl modified nucleoside
  modified_base 15: mod_base = OTHER; note = 2' fluoro-modified nucleoside
  modified_base 16: mod_base = OTHER; note = 2' O-methyl modified nucleoside
  modified_base 17: mod_base = OTHER; note = 2' fluoro-modified nucleoside
  modified_base 18: mod_base = OTHER; note = 2' O-methyl modified nucleoside
  modified_base 19: mod_base = OTHER; note = 2' fluoro-modified nucleoside
  modified_base 19..20: mod_base = OTHER; note = Phosphorothioate linkage
  modified_base 20: mod_base = OTHER; note = 2' O-methyl modified nucleoside
  modified_base 20..21: mod_base = OTHER; note = Phosphorothioate linkage
  modified_base 21: mod_base = OTHER; note = 2' O-methyl modified nucleoside
  source 1..21: mol_type = other RNA
aaggtggctactggtacaatt

SEQ ID NO: 11339 - RNA, 21 nt, synthetic construct
  misc_feature 1..21: note = Description of Artificial Sequence: Synthetic oligonucleotide
  modified_base 1: mod_base = OTHER; note = 2' fluoro-modified nucleoside
  modified_base 1..2: mod_base = OTHER; note = Phosphorothioate linkage
  modified_base 2: mod_base = OTHER; note = 2' O-methyl modified nucleoside
  modified_base 2..3: mod_base = OTHER; note = Phosphorothioate linkage
  modified_base 3: mod_base = OTHER; note = 2' fluoro-modified nucleoside
  modified_base 4: mod_base = OTHER; note = 2' O-methyl modified nucleoside
  modified_base 5: mod_base = OTHER; note = 2' fluoro-modified nucleoside
  modified_base 6: mod_base = OTHER; note = 2' O-methyl modified nucleoside
  modified_base 7: mod_base = OTHER; note = 2' fluoro-modified nucleoside
  modified_base 8: mod_base = OTHER; note = 2' fluoro-modified nucleoside
  modified_base 9: mod_base = OTHER; note = 2' fluoro-modified nucleoside
  modified_base 10: mod_base = OTHER; note = 2' O-methyl modified nucleoside
  modified_base 11: mod_base = OTHER; note = 2' fluoro-modified nucleoside
  modified_base 12: mod_base = OTHER; note = 2' O-methyl modified nucleoside
  modified_base 13: mod_base = OTHER; note = 2' fluoro-modified nucleoside
  modified_base 14: mod_base = OTHER; note = 2' O-methyl modified nucleoside
  modified_base 15: mod_base = OTHER; note = 2' fluoro-modified nucleoside
  modified_base 16: mod_base = OTHER; note = 2' O-methyl modified nucleoside
  modified_base 17: mod_base = OTHER; note = 2' fluoro-modified nucleoside
  modified_base 18: mod_base = OTHER; note = 2' O-methyl modified nucleoside
  modified_base 19: mod_base = OTHER; note = 2' fluoro-modified nucleoside
  modified_base 19..20: mod_base = OTHER; note = Phosphorothioate linkage
  modified_base 20: mod_base = OTHER; note = 2' O-methyl modified nucleoside
  modified_base 20..21: mod_base = OTHER; note = Phosphorothioate linkage
  modified_base 21: mod_base = OTHER; note = 2' O-methyl modified nucleoside
  source 1..21: mol_type = other RNA
aggtggctactggtacaaatt

SEQ ID NO: 11340 - RNA, 21 nt, synthetic construct
  misc_feature 1..21: note = Description of Artificial Sequence: Synthetic oligonucleotide
  modified_base 1: mod_base = OTHER; note = 2' fluoro-modified nucleoside
  modified_base 1..2: mod_base = OTHER; note = Phosphorothioate linkage
  modified_base 2: mod_base = OTHER; note = 2' O-methyl modified nucleoside
  modified_base 2..3: mod_base = OTHER; note = Phosphorothioate linkage
  modified_base 3: mod_base = OTHER; note = 2' fluoro-modified nucleoside
  modified_base 4: mod_base = OTHER; note = 2' O-methyl modified nucleoside
  modified_base 5: mod_base = OTHER; note = 2' fluoro-modified nucleoside
  modified_base 6: mod_base = OTHER; note = 2' O-methyl modified nucleoside
  modified_base 7: mod_base = OTHER; note = 2' fluoro-modified nucleoside
  modified_base 8: mod_base = OTHER; note = 2' fluoro-modified nucleoside
  modified_base 9: mod_base = OTHER; note = 2' fluoro-modified nucleoside
  modified_base 10: mod_base = OTHER; note = 2' O-methyl modified nucleoside
  modified_base 11: mod_base = OTHER; note = 2' fluoro-modified nucleoside
  modified_base 12: mod_base = OTHER; note = 2' O-methyl modified nucleoside
  modified_base 13: mod_base = OTHER; note = 2' fluoro-modified nucleoside
  modified_base 14: mod_base = OTHER; note = 2' O-methyl modified nucleoside
  modified_base 15: mod_base = OTHER; note = 2' fluoro-modified nucleoside
  modified_base 16: mod_base = OTHER; note = 2' O-methyl modified nucleoside
  modified_base 17: mod_base = OTHER; note = 2' fluoro-modified nucleoside
  modified_base 18: mod_base = OTHER; note = 2' O-methyl modified nucleoside
  modified_base 19: mod_base = OTHER; note = 2' fluoro-modified nucleoside
  modified_base 19..20: mod_base = OTHER; note = Phosphorothioate linkage
  modified_base 20: mod_base = OTHER; note = 2' O-methyl modified nucleoside
  modified_base 20..21: mod_base = OTHER; note = Phosphorothioate linkage
  modified_base 21: mod_base = OTHER; note = 2' O-methyl modified nucleoside
  source 1..21: mol_type = other RNA
gtggctactggtacaactatt

SEQ ID NO: 11341 - RNA, 21 nt, synthetic construct
  misc_feature 1..21: note = Description of Artificial Sequence: Synthetic oligonucleotide
  modified_base 1: mod_base = OTHER; note = 2' fluoro-modified nucleoside
  modified_base 1..2: mod_base = OTHER; note = Phosphorothioate linkage
  modified_base 2: mod_base = OTHER; note = 2' O-methyl modified nucleoside
  modified_base 2..3: mod_base = OTHER; note = Phosphorothioate linkage
  modified_base 3: mod_base = OTHER; note = 2' fluoro-modified nucleoside
  modified_base 4: mod_base = OTHER; note = 2' O-methyl modified nucleoside
  modified_base 5: mod_base = OTHER; note = 2' fluoro-modified nucleoside
  modified_base 6: mod_base = OTHER; note = 2' O-methyl modified nucleoside
  modified_base 7: mod_base = OTHER; note = 2' fluoro-modified nucleoside
  modified_base 8: mod_base = OTHER; note = 2' fluoro-modified nucleoside
  modified_base 9: mod_base = OTHER; note = 2' fluoro-modified nucleoside
  modified_base 10: mod_base = OTHER; note = 2' O-methyl modified nucleoside
  modified_base 11: mod_base = OTHER; note = 2' fluoro-modified nucleoside
  modified_base 12: mod_base = OTHER; note = 2' O-methyl modified nucleoside
  modified_base 13: mod_base = OTHER; note = 2' fluoro-modified nucleoside
  modified_base 14: mod_base = OTHER; note = 2' O-methyl modified nucleoside
  modified_base 15: mod_base = OTHER; note = 2' fluoro-modified nucleoside
  modified_base 16: mod_base = OTHER; note = 2' O-methyl modified nucleoside
  modified_base 17: mod_base = OTHER; note = 2' fluoro-modified nucleoside
  modified_base 18: mod_base = OTHER; note = 2' O-methyl modified nucleoside
  modified_base 19: mod_base = OTHER; note = 2' fluoro-modified nucleoside
  modified_base 19..20: mod_base = OTHER; note = Phosphorothioate linkage
  modified_base 20: mod_base = OTHER; note = 2' O-methyl modified nucleoside
  modified_base 20..21: mod_base = OTHER; note = Phosphorothioate linkage
  modified_base 21: mod_base = OTHER; note = 2' O-methyl modified nucleoside
  source 1..21: mol_type = other RNA
tggctactggtacaactgatt

SEQ ID NO: 11342 - RNA, 21 nt, synthetic construct
  misc_feature 1..21: note = Description of Artificial Sequence: Synthetic oligonucleotide
  modified_base 1: mod_base = OTHER; note = 2' fluoro-modified nucleoside
  modified_base 1..2: mod_base = OTHER; note = Phosphorothioate linkage
  modified_base 2: mod_base = OTHER; note = 2' O-methyl modified nucleoside
  modified_base 2..3: mod_base = OTHER; note = Phosphorothioate linkage
  modified_base 3: mod_base = OTHER; note = 2' fluoro-modified nucleoside
  modified_base 4: mod_base = OTHER; note = 2' O-methyl modified nucleoside
  modified_base 5: mod_base = OTHER; note = 2' fluoro-modified nucleoside
  modified_base 6: mod_base = OTHER; note = 2' O-methyl modified nucleoside
  modified_base 7: mod_base = OTHER; note = 2' fluoro-modified nucleoside
  modified_base 8: mod_base = OTHER; note = 2' fluoro-modified nucleoside
  modified_base 9: mod_base = OTHER; note = 2' fluoro-modified nucleoside
  modified_base 10: mod_base = OTHER; note = 2' O-methyl modified nucleoside
  modified_base 11: mod_base = OTHER; note = 2' fluoro-modified nucleoside
  modified_base 12: mod_base = OTHER; note = 2' O-methyl modified nucleoside
  modified_base 13: mod_base = OTHER; note = 2' fluoro-modified nucleoside
  modified_base 14: mod_base = OTHER; note = 2' O-methyl modified nucleoside
  modified_base 15: mod_base = OTHER; note = 2' fluoro-modified nucleoside
  modified_base 16: mod_base = OTHER; note = 2' O-methyl modified nucleoside
  modified_base 17: mod_base = OTHER; note = 2' fluoro-modified nucleoside
  modified_base 18: mod_base = OTHER; note = 2' O-methyl modified nucleoside
  modified_base 19: mod_base = OTHER; note = 2' fluoro-modified nucleoside
  modified_base 19..20: mod_base = OTHER; note = Phosphorothioate linkage
  modified_base 20: mod_base = OTHER; note = 2' O-methyl modified nucleoside
  modified_base 20..21: mod_base = OTHER; note = Phosphorothioate linkage
  modified_base 21: mod_base = OTHER; note = 2' O-methyl modified nucleoside
  source 1..21: mol_type = other RNA
ggctactggtacaactgcatt

SEQ ID NO: 11343 - RNA, 21 nt, synthetic construct
  misc_feature 1..21: note = Description of Artificial Sequence: Synthetic oligonucleotide
  modified_base 1: mod_base = OTHER; note = 2' fluoro-modified nucleoside
  modified_base 1..2: mod_base = OTHER; note = Phosphorothioate linkage
  modified_base 2: mod_base = OTHER; note = 2' O-methyl modified nucleoside
  modified_base 2..3: mod_base = OTHER; note = Phosphorothioate linkage
  modified_base 3: mod_base = OTHER; note = 2' fluoro-modified nucleoside
  modified_base 4: mod_base = OTHER; note = 2' O-methyl modified nucleoside
  modified_base 5: mod_base = OTHER; note = 2' fluoro-modified nucleoside
  modified_base 6: mod_base = OTHER; note = 2' O-methyl modified nucleoside
  modified_base 7: mod_base = OTHER; note = 2' fluoro-modified nucleoside
  modified_base 8: mod_base = OTHER; note = 2' fluoro-modified nucleoside
  modified_base 9: mod_base = OTHER; note = 2' fluoro-modified nucleoside
  modified_base 10: mod_base = OTHER; note = 2' O-methyl modified nucleoside
  modified_base 11: mod_base = OTHER; note = 2' fluoro-modified nucleoside
  modified_base 12: mod_base = OTHER; note = 2' O-methyl modified nucleoside
  modified_base 13: mod_base = OTHER; note = 2' fluoro-modified nucleoside
  modified_base 14: mod_base = OTHER; note = 2' O-methyl modified nucleoside
  modified_base 15: mod_base = OTHER; note = 2' fluoro-modified nucleoside
  modified_base 16: mod_base = OTHER; note = 2' O-methyl modified nucleoside
  modified_base 17: mod_base = OTHER; note = 2' fluoro-modified nucleoside
  modified_base 18: mod_base = OTHER; note = 2' O-methyl modified nucleoside
  modified_base 19: mod_base = OTHER; note = 2' fluoro-modified nucleoside
  modified_base 19..20: mod_base = OTHER; note = Phosphorothioate linkage
  modified_base 20: mod_base = OTHER; note = 2' O-methyl modified nucleoside
  modified_base 20..21: mod_base = OTHER; note = Phosphorothioate linkage
  modified_base 21: mod_base = OTHER; note = 2' O-methyl modified nucleoside
  source 1..21: mol_type = other RNA
gctactggtacaactgctatt

SEQ ID NO: 11344 - RNA, 21 nt, synthetic construct
  misc_feature 1..21: note = Description of Artificial Sequence: Synthetic oligonucleotide
  modified_base 1: mod_base = OTHER; note = 2' fluoro-modified nucleoside
  modified_base 1..2: mod_base = OTHER; note = Phosphorothioate linkage
  modified_base 2: mod_base = OTHER; note = 2' O-methyl modified nucleoside
  modified_base 2..3: mod_base = OTHER; note = Phosphorothioate linkage
  modified_base 3: mod_base = OTHER; note = 2' fluoro-modified nucleoside
  modified_base 4: mod_base = OTHER; note = 2' O-methyl modified nucleoside
  modified_base 5: mod_base = OTHER; note = 2' fluoro-modified nucleoside
  modified_base 6: mod_base = OTHER; note = 2' O-methyl modified nucleoside
  modified_base 7: mod_base = OTHER; note = 2' fluoro-modified nucleoside
  modified_base 8: mod_base = OTHER; note = 2' fluoro-modified nucleoside
  modified_base 9: mod_base = OTHER; note = 2' fluoro-modified nucleoside
  modified_base 10: mod_base = OTHER; note = 2' O-methyl modified nucleoside
  modified_base 11: mod_base = OTHER; note = 2' fluoro-modified nucleoside
  modified_base 12: mod_base = OTHER; note = 2' O-methyl modified nucleoside
  modified_base 13: mod_base = OTHER; note = 2' fluoro-modified nucleoside
  modified_base 14: mod_base = OTHER; note = 2' O-methyl modified nucleoside
  modified_base 15: mod_base = OTHER; note = 2' fluoro-modified nucleoside
  modified_base 16: mod_base = OTHER; note = 2' O-methyl modified nucleoside
  modified_base 17: mod_base = OTHER; note = 2' fluoro-modified nucleoside
  modified_base 18: mod_base = OTHER; note = 2' O-methyl modified nucleoside
  modified_base 19: mod_base = OTHER; note = 2' fluoro-modified nucleoside
  modified_base 19..20: mod_base = OTHER; note = Phosphorothioate linkage
  modified_base 20: mod_base = OTHER; note = 2' O-methyl modified nucleoside
  modified_base 20..21: mod_base = OTHER; note = Phosphorothioate linkage
  modified_base 21: mod_base = OTHER; note = 2' O-methyl modified nucleoside
  source 1..21: mol_type = other RNA
actggtacaactgctgcaatt

SEQ ID NO: 11345 - RNA, 21 nt, synthetic construct
  misc_feature 1..21: note = Description of Artificial Sequence: Synthetic oligonucleotide
  modified_base 1: mod_base = OTHER; note = 2' fluoro-modified nucleoside
  modified_base 1..2: mod_base = OTHER; note = Phosphorothioate linkage
  modified_base 2: mod_base = OTHER; note = 2' O-methyl modified nucleoside
  modified_base 2..3: mod_base = OTHER; note = Phosphorothioate linkage
  modified_base 3: mod_base = OTHER; note = 2' fluoro-modified nucleoside
  modified_base 4: mod_base = OTHER; note = 2' O-methyl modified nucleoside
  modified_base 5: mod_base = OTHER; note = 2' fluoro-modified nucleoside
  modified_base 6: mod_base = OTHER; note = 2' O-methyl modified nucleoside
  modified_base 7: mod_base = OTHER; note = 2' fluoro-modified nucleoside
  modified_base 8: mod_base = OTHER; note = 2' fluoro-modified nucleoside
  modified_base 9: mod_base = OTHER; note = 2' fluoro-modified nucleoside
  modified_base 10: mod_base = OTHER; note = 2' O-methyl modified nucleoside
  modified_base 11: mod_base = OTHER; note = 2' fluoro-modified nucleoside
  modified_base 12: mod_base = OTHER; note = 2' O-methyl modified nucleoside
  modified_base 13: mod_base = OTHER; note = 2' fluoro-modified nucleoside
  modified_base 14: mod_base = OTHER; note = 2' O-methyl modified nucleoside
  modified_base 15: mod_base = OTHER; note = 2' fluoro-modified nucleoside
  modified_base 16: mod_base = OTHER; note = 2' O-methyl modified nucleoside
  modified_base 17: mod_base = OTHER; note = 2' fluoro-modified nucleoside
  modified_base 18: mod_base = OTHER; note = 2' O-methyl modified nucleoside
  modified_base 19: mod_base = OTHER; note = 2' fluoro-modified nucleoside
  modified_base 19..20: mod_base = OTHER; note = Phosphorothioate linkage
  modified_base 20: mod_base = OTHER; note = 2' O-methyl modified nucleoside
  modified_base 20..21: mod_base = OTHER; note = Phosphorothioate linkage
  modified_base 21: mod_base = OTHER; note = 2' O-methyl modified nucleoside
  source 1..21: mol_type = other RNA
tggtacaactgctgcacaatt

SEQ ID NO: 11346 - RNA, 21 nt, synthetic construct
  misc_feature 1..21: note = Description of Artificial Sequence: Synthetic oligonucleotide
  modified_base 1: mod_base = OTHER; note = 2' fluoro-modified nucleoside
  modified_base 1..2: mod_base = OTHER; note = Phosphorothioate linkage
  modified_base 2: mod_base = OTHER; note = 2' O-methyl modified nucleoside
  modified_base 2..3: mod_base = OTHER; note = Phosphorothioate linkage
  modified_base 3: mod_base = OTHER; note = 2' fluoro-modified nucleoside
  modified_base 4: mod_base = OTHER; note = 2' O-methyl modified nucleoside
  modified_base 5: mod_base = OTHER; note = 2' fluoro-modified nucleoside
  modified_base 6: mod_base = OTHER; note = 2' O-methyl modified nucleoside
  modified_base 7: mod_base = OTHER; note = 2' fluoro-modified nucleoside
  modified_base 8: mod_base = OTHER; note = 2' fluoro-modified nucleoside
  modified_base 9: mod_base = OTHER; note = 2' fluoro-modified nucleoside
  modified_base 10: mod_base = OTHER; note = 2' O-methyl modified nucleoside
  modified_base 11: mod_base = OTHER; note = 2' fluoro-modified nucleoside
  modified_base 12: mod_base = OTHER; note = 2' O-methyl modified nucleoside
  modified_base 13: mod_base = OTHER; note = 2' fluoro-modified nucleoside
  modified_base 14: mod_base = OTHER; note = 2' O-methyl modified nucleoside
  modified_base 15: mod_base = OTHER; note = 2' fluoro-modified nucleoside
  modified_base 16: mod_base = OTHER; note = 2' O-methyl modified nucleoside
  modified_base 17: mod_base = OTHER; note = 2' fluoro-modified nucleoside
  modified_base 18: mod_base = OTHER; note = 2' O-methyl modified nucleoside
  modified_base 19: mod_base = OTHER; note = 2' fluoro-modified nucleoside
  modified_base 19..20: mod_base = OTHER; note = Phosphorothioate linkage
  modified_base 20: mod_base = OTHER; note = 2' O-methyl modified nucleoside
  modified_base 20..21: mod_base = OTHER; note = Phosphorothioate linkage
  modified_base 21: mod_base = OTHER; note = 2' O-methyl modified nucleoside
  source 1..21: mol_type = other RNA
ggtacaactgctgcacagatt

SEQ ID NO: 11347 - RNA, 21 nt, synthetic construct
  misc_feature 1..21: note = Description of Artificial Sequence: Synthetic oligonucleotide
  modified_base 1: mod_base = OTHER; note = 2' fluoro-modified nucleoside
  modified_base 1..2: mod_base = OTHER; note = Phosphorothioate linkage
  modified_base 2: mod_base = OTHER; note = 2' O-methyl modified nucleoside
  modified_base 2..3: mod_base = OTHER; note = Phosphorothioate linkage
  modified_base 3: mod_base = OTHER; note = 2' fluoro-modified nucleoside
  modified_base 4: mod_base = OTHER; note = 2' O-methyl modified nucleoside
  modified_base 5: mod_base = OTHER; note = 2' fluoro-modified nucleoside
  modified_base 6: mod_base = OTHER; note = 2' O-methyl modified nucleoside
  modified_base 7: mod_base = OTHER; note = 2' fluoro-modified nucleoside
  modified_base 8: mod_base = OTHER; note = 2' fluoro-modified nucleoside
  modified_base 9: mod_base = OTHER; note = 2' fluoro-modified nucleoside
  modified_base 10: mod_base = OTHER; note = 2' O-methyl modified nucleoside
  modified_base 11: mod_base = OTHER; note = 2' fluoro-modified nucleoside
  modified_base 12: mod_base = OTHER; note = 2' O-methyl modified nucleoside
  modified_base 13: mod_base = OTHER; note = 2' fluoro-modified nucleoside
  modified_base 14: mod_base = OTHER; note = 2' O-methyl modified nucleoside
  modified_base 15: mod_base = OTHER; note = 2' fluoro-modified nucleoside
  modified_base 16: mod_base = OTHER; note = 2' O-methyl modified nucleoside
  modified_base 17: mod_base = OTHER; note = 2' fluoro-modified nucleoside
  modified_base 18: mod_base = OTHER; note = 2' O-methyl modified nucleoside
  modified_base 19: mod_base = OTHER; note = 2' fluoro-modified nucleoside
  modified_base 19..20: mod_base = OTHER; note = Phosphorothioate linkage
  modified_base 20: mod_base = OTHER; note = 2' O-methyl modified nucleoside
  modified_base 20..21: mod_base = OTHER; note = Phosphorothioate linkage
  modified_base 21: mod_base = OTHER; note = 2' O-methyl modified nucleoside
  source 1..21: mol_type = other RNA
gtacaactgctgcacagaatt

SEQ ID NO: 11348 - RNA, 21 nt, synthetic construct
  misc_feature 1..21: note = Description of Artificial Sequence: Synthetic oligonucleotide
  modified_base 1: mod_base = OTHER; note = 2' fluoro-modified nucleoside
  modified_base 1..2: mod_base = OTHER; note = Phosphorothioate linkage
  modified_base 2: mod_base = OTHER; note = 2' O-methyl modified nucleoside
  modified_base 2..3: mod_base = OTHER; note = Phosphorothioate linkage
  modified_base 3: mod_base = OTHER; note = 2' fluoro-modified nucleoside
  modified_base 4: mod_base = OTHER; note = 2' O-methyl modified nucleoside
  modified_base 5: mod_base = OTHER; note = 2' fluoro-modified nucleoside
  modified_base 6: mod_base = OTHER; note = 2' O-methyl modified nucleoside
  modified_base 7: mod_base = OTHER; note = 2' fluoro-modified nucleoside
  modified_base 8: mod_base = OTHER; note = 2' fluoro-modified nucleoside
  modified_base 9: mod_base = OTHER; note = 2' fluoro-modified nucleoside
  modified_base 10: mod_base = OTHER; note = 2' O-methyl modified nucleoside
  modified_base 11: mod_base = OTHER; note = 2' fluoro-modified nucleoside
  modified_base 12: mod_base = OTHER; note = 2' O-methyl modified nucleoside
  modified_base 13: mod_base = OTHER; note = 2' fluoro-modified nucleoside
  modified_base 14: mod_base = OTHER; note = 2' O-methyl modified nucleoside
  modified_base 15: mod_base = OTHER; note = 2' fluoro-modified nucleoside
  modified_base 16: mod_base = OTHER; note = 2' O-methyl modified nucleoside
  modified_base 17: mod_base = OTHER; note = 2' fluoro-modified nucleoside
  modified_base 18: mod_base = OTHER; note = 2' O-methyl modified nucleoside
  modified_base 19: mod_base = OTHER; note = 2' fluoro-modified nucleoside
  modified_base 19..20: mod_base = OTHER; note = Phosphorothioate linkage
  modified_base 20: mod_base = OTHER; note = 2' O-methyl modified nucleoside
  modified_base 20..21: mod_base = OTHER; note = Phosphorothioate linkage
  modified_base 21: mod_base = OTHER; note = 2' O-methyl modified nucleoside
  source 1..21: mol_type = other RNA
tacaactgctgcacagacatt

SEQ ID NO: 11349 - RNA, 21 nt, synthetic construct
  misc_feature 1..21: note = Description of Artificial Sequence: Synthetic oligonucleotide
  modified_base 1: mod_base = OTHER; note = 2' fluoro-modified nucleoside
  modified_base 1..2: mod_base = OTHER; note = Phosphorothioate linkage
  modified_base 2: mod_base = OTHER; note = 2' O-methyl modified nucleoside
  modified_base 2..3: mod_base = OTHER; note = Phosphorothioate linkage
  modified_base 3: mod_base = OTHER; note = 2' fluoro-modified nucleoside
  modified_base 4: mod_base = OTHER; note = 2' O-methyl modified nucleoside
  modified_base 5: mod_base = OTHER; note = 2' fluoro-modified nucleoside
  modified_base 6: mod_base = OTHER; note = 2' O-methyl modified nucleoside
  modified_base 7: mod_base = OTHER; note = 2' fluoro-modified nucleoside
  modified_base 8: mod_base = OTHER; note = 2' fluoro-modified nucleoside
  modified_base 9: mod_base = OTHER; note = 2' fluoro-modified nucleoside
  modified_base 10: mod_base = OTHER; note = 2' O-methyl modified nucleoside
  modified_base 11: mod_base = OTHER; note = 2' fluoro-modified nucleoside
  modified_base 12: mod_base = OTHER; note = 2' O-methyl modified nucleoside
  modified_base 13: mod_base = OTHER; note = 2' fluoro-modified nucleoside
  modified_base 14: mod_base = OTHER; note = 2' O-methyl modified nucleoside
  modified_base 15: mod_base = OTHER; note = 2' fluoro-modified nucleoside
  modified_base 16: mod_base = OTHER; note = 2' O-methyl modified nucleoside
  modified_base 17: mod_base = OTHER; note = 2' fluoro-modified nucleoside
  modified_base 18: mod_base = OTHER; note = 2' O-methyl modified nucleoside
  modified_base 19: mod_base = OTHER; note = 2' fluoro-modified nucleoside
  modified_base 19..20: mod_base = OTHER; note = Phosphorothioate linkage
  modified_base 20: mod_base = OTHER; note = 2' O-methyl modified nucleoside
  modified_base 20..21: mod_base = OTHER; note = Phosphorothioate linkage
  modified_base 21: mod_base = OTHER; note = 2' O-methyl modified nucleoside
  source 1..21: mol_type = other RNA
ctgctgcacagactccaaatt

SEQ ID NO: 11350 - RNA, 21 nt, synthetic construct
  misc_feature 1..21: note = Description of Artificial Sequence: Synthetic oligonucleotide
  modified_base 1: mod_base = OTHER; note = 2' fluoro-modified nucleoside
  modified_base 1..2: mod_base = OTHER; note = Phosphorothioate linkage
  modified_base 2: mod_base = OTHER; note = 2' O-methyl modified nucleoside
  modified_base 2..3: mod_base = OTHER; note = Phosphorothioate linkage
  modified_base 3: mod_base = OTHER; note = 2' fluoro-modified nucleoside
  modified_base 4: mod_base = OTHER; note = 2' O-methyl modified nucleoside
  modified_base 5: mod_base = OTHER; note = 2' fluoro-modified nucleoside
  modified_base 6: mod_base = OTHER; note = 2' O-methyl modified nucleoside
  modified_base 7: mod_base = OTHER; note = 2' fluoro-modified nucleoside
  modified_base 8: mod_base = OTHER; note = 2' fluoro-modified nucleoside
  modified_base 9: mod_base = OTHER; note = 2' fluoro-modified nucleoside
  modified_base 10: mod_base = OTHER; note = 2' O-methyl modified nucleoside
  modified_base 11: mod_base = OTHER; note = 2' fluoro-modified nucleoside
  modified_base 12: mod_base = OTHER; note = 2' O-methyl modified nucleoside
  modified_base 13: mod_base = OTHER; note = 2' fluoro-modified nucleoside
  modified_base 14: mod_base = OTHER; note = 2' O-methyl modified nucleoside
  modified_base 15: mod_base = OTHER; note = 2' fluoro-modified nucleoside
  modified_base 16: mod_base = OTHER; note = 2' O-methyl modified nucleoside
  modified_base 17: mod_base = OTHER; note = 2' fluoro-modified nucleoside
  modified_base 18: mod_base = OTHER; note = 2' O-methyl modified nucleoside
  modified_base 19: mod_base = OTHER; note = 2' fluoro-modified nucleoside
  modified_base 19..20: mod_base = OTHER; note = Phosphorothioate linkage
  modified_base 20: mod_base = OTHER; note = 2' O-methyl modified nucleoside
  modified_base 20..21: mod_base = OTHER; note = Phosphorothioate linkage
  modified_base 21: mod_base = OTHER; note = 2' O-methyl modified nucleoside
  source 1..21: mol_type = other RNA
tgctgcacagactccaacatt

SEQ ID NO: 11351 - RNA, 21 nt, synthetic construct
  misc_feature 1..21: note = Description of Artificial Sequence: Synthetic oligonucleotide
  modified_base 1: mod_base = OTHER; note = 2' fluoro-modified nucleoside
  modified_base 1..2: mod_base = OTHER; note = Phosphorothioate linkage
  modified_base 2: mod_base = OTHER; note = 2' O-methyl modified nucleoside
  modified_base 2..3: mod_base = OTHER; note = Phosphorothioate linkage
  modified_base 3: mod_base = OTHER; note = 2' fluoro-modified nucleoside
  modified_base 4: mod_base = OTHER; note = 2' O-methyl modified nucleoside
  modified_base 5: mod_base = OTHER; note = 2' fluoro-modified nucleoside
  modified_base 6: mod_base = OTHER; note = 2' O-methyl modified nucleoside
  modified_base 7: mod_base = OTHER; note = 2' fluoro-modified nucleoside
  modified_base 8: mod_base = OTHER; note = 2' fluoro-modified nucleoside
  modified_base 9: mod_base = OTHER; note = 2' fluoro-modified nucleoside
  modified_base 10: mod_base = OTHER; note = 2' O-methyl modified nucleoside
  modified_base 11: mod_base = OTHER; note = 2' fluoro-modified nucleoside
  modified_base 12: mod_base = OTHER; note = 2' O-methyl modified nucleoside
  modified_base 13: mod_base = OTHER; note = 2' fluoro-modified nucleoside
  modified_base 14: mod_base = OTHER; note = 2' O-methyl modified nucleoside
  modified_base 15: mod_base = OTHER; note = 2' fluoro-modified nucleoside
  modified_base 16: mod_base = OTHER; note = 2' O-methyl modified nucleoside
  modified_base 17: mod_base = OTHER; note = 2' fluoro-modified nucleoside
  modified_base 18: mod_base = OTHER; note = 2' O-methyl modified nucleoside
  modified_base 19: mod_base = OTHER; note = 2' fluoro-modified nucleoside
  modified_base 19..20: mod_base = OTHER; note = Phosphorothioate linkage
  modified_base 20: mod_base = OTHER; note = 2' O-methyl modified nucleoside
  modified_base 20..21: mod_base = OTHER; note = Phosphorothioate linkage
  modified_base 21: mod_base = OTHER; note = 2' O-methyl modified nucleoside
  source 1..21: mol_type = other RNA
ctgcacagactccaacctatt

SEQ ID NO: 11352 - RNA, 21 nt, synthetic construct
  misc_feature 1..21: note = Description of Artificial Sequence: Synthetic oligonucleotide
  modified_base 1: mod_base = OTHER; note = 2' fluoro-modified nucleoside
  modified_base 1..2: mod_base = OTHER; note = Phosphorothioate linkage
  modified_base 2: mod_base = OTHER; note = 2' O-methyl modified nucleoside
  modified_base 2..3: mod_base = OTHER; note = Phosphorothioate linkage
  modified_base 3: mod_base = OTHER; note = 2' fluoro-modified nucleoside
  modified_base 4: mod_base = OTHER; note = 2' O-methyl modified nucleoside
  modified_base 5: mod_base = OTHER; note = 2' fluoro-modified nucleoside
  modified_base 6: mod_base = OTHER; note = 2' O-methyl modified nucleoside
  modified_base 7: mod_base = OTHER; note = 2' fluoro-modified nucleoside
  modified_base 8: mod_base = OTHER; note = 2' fluoro-modified nucleoside
  modified_base 9: mod_base = OTHER; note = 2' fluoro-modified nucleoside
  modified_base 10: mod_base = OTHER; note = 2' O-methyl modified nucleoside
  modified_base 11: mod_base = OTHER; note = 2' fluoro-modified nucleoside
  modified_base 12: mod_base = OTHER; note = 2' O-methyl modified nucleoside
  modified_base 13: mod_base = OTHER; note = 2' fluoro-modified nucleoside
  modified_base 14: mod_base = OTHER; note = 2' O-methyl modified nucleoside
  modified_base 15: mod_base = OTHER; note = 2' fluoro-modified nucleoside
  modified_base 16: mod_base = OTHER; note = 2' O-methyl modified nucleoside
  modified_base 17: mod_base = OTHER; note = 2' fluoro-modified nucleoside
  modified_base 18: mod_base = OTHER; note = 2' O-methyl modified nucleoside
  modified_base 19: mod_base = OTHER; note = 2' fluoro-modified nucleoside
  modified_base 19..20: mod_base = OTHER; note = Phosphorothioate linkage
  modified_base 20: mod_base = OTHER; note = 2' O-methyl modified nucleoside
  modified_base 20..21: mod_base = OTHER; note = Phosphorothioate linkage
  modified_base 21: mod_base = OTHER; note = 2' O-methyl modified nucleoside
  source 1..21: mol_type = other RNA
tgcacagactccaacctcatt

SEQ ID NO: 11353 - RNA, 21 nt, synthetic construct
  misc_feature 1..21: note = Description of Artificial Sequence: Synthetic oligonucleotide
  modified_base 1: mod_base = OTHER; note = 2' fluoro-modified nucleoside
  modified_base 1..2: mod_base = OTHER; note = Phosphorothioate linkage
  modified_base 2: mod_base = OTHER; note = 2' O-methyl modified nucleoside
  modified_base 2..3: mod_base = OTHER; note = Phosphorothioate linkage
  modified_base 3: mod_base = OTHER; note = 2' fluoro-modified nucleoside
  modified_base 4: mod_base = OTHER; note = 2' O-methyl modified nucleoside
  modified_base 5: mod_base = OTHER; note = 2' fluoro-modified nucleoside
  modified_base 6: mod_base = OTHER; note = 2' O-methyl modified nucleoside
  modified_base 7: mod_base = OTHER; note = 2' fluoro-modified nucleoside
  modified_base 8: mod_base = OTHER; note = 2' fluoro-modified nucleoside
  modified_base 9: mod_base = OTHER; note = 2' fluoro-modified nucleoside
  modified_base 10: mod_base = OTHER; note = 2' O-methyl modified nucleoside
  modified_base 11: mod_base = OTHER; note = 2' fluoro-modified nucleoside
  modified_base 12: mod_base = OTHER; note = 2' O-methyl modified nucleoside
  modified_base 13: mod_base = OTHER; note = 2' fluoro-modified nucleoside
  modified_base 14: mod_base = OTHER; note = 2' O-methyl modified nucleoside
  modified_base 15: mod_base = OTHER; note = 2' fluoro-modified nucleoside
  modified_base 16: mod_base = OTHER; note = 2' O-methyl modified nucleoside
  modified_base 17: mod_base = OTHER; note = 2' fluoro-modified nucleoside
  modified_base 18: mod_base = OTHER; note = 2' O-methyl modified nucleoside
  modified_base 19: mod_base = OTHER; note = 2' fluoro-modified nucleoside
  modified_base 19..20: mod_base = OTHER; note = Phosphorothioate linkage
  modified_base 20: mod_base = OTHER; note = 2' O-methyl modified nucleoside
  modified_base 20..21: mod_base = OTHER; note = Phosphorothioate linkage
  modified_base 21: mod_base = OTHER; note = 2' O-methyl modified nucleoside
  source 1..21: mol_type = other RNA
acagactccaacctcaatatt

SEQ ID NO: 11354 - RNA, 21 nt, synthetic construct
  misc_feature 1..21: note = Description of Artificial Sequence: Synthetic oligonucleotide
  modified_base 1: mod_base = OTHER; note = 2' fluoro-modified nucleoside
  modified_base 1..2: mod_base = OTHER; note = Phosphorothioate linkage
  modified_base 2: mod_base = OTHER; note = 2' O-methyl modified nucleoside
  modified_base 2..3: mod_base = OTHER; note = Phosphorothioate linkage
  modified_base 3: mod_base = OTHER; note = 2' fluoro-modified nucleoside
  modified_base 4: mod_base = OTHER; note = 2' O-methyl modified nucleoside
  modified_base 5: mod_base = OTHER; note = 2' fluoro-modified nucleoside
  modified_base 6: mod_base = OTHER; note = 2' O-methyl modified nucleoside
  modified_base 7: mod_base = OTHER; note = 2' fluoro-modified nucleoside
  modified_base 8: mod_base = OTHER; note = 2' fluoro-modified nucleoside
  modified_base 9: mod_base = OTHER; note = 2' fluoro-modified nucleoside
  modified_base 10: mod_base = OTHER; note = 2' O-methyl modified nucleoside
  modified_base 11: mod_base = OTHER; note = 2' fluoro-modified nucleoside
  modified_base 12: mod_base = OTHER; note = 2' O-methyl modified nucleoside
  modified_base 13: mod_base = OTHER; note = 2' fluoro-modified nucleoside
  modified_base 14: mod_base = OTHER; note = 2' O-methyl modified nucleoside
  modified_base 15: mod_base = OTHER; note = 2' fluoro-modified nucleoside
  modified_base 16: mod_base = OTHER; note = 2' O-methyl modified nucleoside
  modified_base 17: mod_base = OTHER; note = 2' fluoro-modified nucleoside
  modified_base 18: mod_base = OTHER; note = 2' O-methyl modified nucleoside
  modified_base 19: mod_base = OTHER; note = 2' fluoro-modified nucleoside
  modified_base 19..20: mod_base = OTHER; note = Phosphorothioate linkage
  modified_base 20: mod_base = OTHER; note = 2' O-methyl modified nucleoside
  modified_base 20..21: mod_base = OTHER; note = Phosphorothioate linkage
  modified_base 21: mod_base = OTHER; note = 2' O-methyl modified nucleoside
  source 1..21: mol_type = other RNA
ctggtatggctggcatggatt

SEQ ID NO: 11355 - RNA, 21 nt, synthetic construct
  misc_feature 1..21: note = Description of Artificial Sequence: Synthetic oligonucleotide
  modified_base 1: mod_base = OTHER; note = 2' O-methyl modified nucleoside
  modified_base 1..2: mod_base = OTHER; note = Phosphorothioate linkage
  modified_base 2: mod_base = OTHER; note = 2' fluoro-modified nucleoside
  modified_base 2..3: mod_base = OTHER; note = Phosphorothioate linkage
  modified_base 3: mod_base = OTHER; note = 2' O-methyl modified nucleoside
  modified_base 4: mod_base = OTHER; note = 2' fluoro-modified nucleoside
  modified_base 5: mod_base = OTHER; note = 2' O-methyl modified nucleoside
  modified_base 6: mod_base = OTHER; note = 2' fluoro-modified nucleoside
  modified_base 7: mod_base = OTHER; note = 2' O-methyl modified nucleoside
  modified_base 8: mod_base = OTHER; note = 2' fluoro-modified nucleoside
  modified_base 9: mod_base = OTHER; note = 2' O-methyl modified nucleoside
  modified_base 10: mod_base = OTHER; note = 2' fluoro-modified nucleoside
  modified_base 11: mod_base = OTHER; note = 2' O-methyl modified nucleoside
  modified_base 12: mod_base = OTHER; note = 2' O-methyl modified nucleoside
  modified_base 13: mod_base = OTHER; note = 2' O-methyl modified nucleoside
  modified_base 14: mod_base = OTHER; note = 2' fluoro-modified nucleoside
  modified_base 15: mod_base = OTHER; note = 2' O-methyl modified nucleoside
  modified_base 16: mod_base = OTHER; note = 2' fluoro-modified nucleoside
  modified_base 17: mod_base = OTHER; note = 2' O-methyl modified nucleoside
  modified_base 18: mod_base = OTHER; note = 2' fluoro-modified nucleoside
  modified_base 19: mod_base = OTHER; note = 2' O-methyl modified nucleoside
  modified_base 19..20: mod_base = OTHER; note = Phosphorothioate linkage
  modified_base 20: mod_base = OTHER; note = 2' O-methyl modified nucleoside
  modified_base 20..21: mod_base = OTHER; note = Phosphorothioate linkage
  modified_base 21: mod_base = OTHER; note = 2' O-methyl modified nucleoside
  source 1..21: mol_type = other RNA
ttctctggatgatggtccatt

SEQ ID NO: 11356 - RNA, 21 nt, synthetic construct
  misc_feature 1..21: note = Description of Artificial Sequence: Synthetic oligonucleotide
  modified_base 1: mod_base = OTHER; note = 2' O-methyl modified nucleoside
  modified_base 1..2: mod_base = OTHER; note = Phosphorothioate linkage
  modified_base 2: mod_base = OTHER; note = 2' fluoro-modified nucleoside
  modified_base 2..3: mod_base = OTHER; note = Phosphorothioate linkage
  modified_base 3: mod_base = OTHER; note = 2' O-methyl modified nucleoside
  modified_base 4: mod_base = OTHER; note = 2' fluoro-modified nucleoside
  modified_base 5: mod_base = OTHER; note = 2' O-methyl modified nucleoside
  modified_base 6: mod_base = OTHER; note = 2' fluoro-modified nucleoside
  modified_base 7: mod_base = OTHER; note = 2' O-methyl modified nucleoside
  modified_base 8: mod_base = OTHER; note = 2' fluoro-modified nucleoside
  modified_base 9: mod_base = OTHER; note = 2' O-methyl modified nucleoside
  modified_base 10: mod_base = OTHER; note = 2' fluoro-modified nucleoside
  modified_base 11: mod_base = OTHER; note = 2' O-methyl modified nucleoside
  modified_base 12: mod_base = OTHER; note = 2' O-methyl modified nucleoside
  modified_base 13: mod_base = OTHER; note = 2' O-methyl modified nucleoside
  modified_base 14: mod_base = OTHER; note = 2' fluoro-modified nucleoside
  modified_base 15: mod_base = OTHER; note = 2' O-methyl modified nucleoside
  modified_base 16: mod_base = OTHER; note = 2' fluoro-modified nucleoside
  modified_base 17: mod_base = OTHER; note = 2' O-methyl modified nucleoside
  modified_base 18: mod_base = OTHER; note = 2' fluoro-modified nucleoside
  modified_base 19: mod_base = OTHER; note = 2' O-methyl modified nucleoside
  modified_base 19..20: mod_base = OTHER; note = Phosphorothioate linkage
  modified_base 20: mod_base = OTHER; note = 2' O-methyl modified nucleoside
  modified_base 20..21: mod_base = OTHER; note = Phosphorothioate linkage
  modified_base 21: mod_base = OTHER; note = 2' O-methyl modified nucleoside
  source 1..21: mol_type = other RNA
tgtctctggatgatggtcctt

SEQ ID NO: 11357 - RNA, 21 nt, synthetic construct
  misc_feature 1..21: note = Description of Artificial Sequence: Synthetic oligonucleotide
  modified_base 1: mod_base = OTHER; note = 2' O-methyl modified nucleoside
  modified_base 1..2: mod_base = OTHER; note = Phosphorothioate linkage
  modified_base 2: mod_base = OTHER; note = 2' fluoro-modified nucleoside
  modified_base 2..3: mod_base = OTHER; note = Phosphorothioate linkage
  modified_base 3: mod_base = OTHER; note = 2' O-methyl modified nucleoside
  modified_base 4: mod_base = OTHER; note = 2' fluoro-modified nucleoside
  modified_base 5: mod_base = OTHER; note = 2' O-methyl modified nucleoside
  modified_base 6: mod_base = OTHER; note = 2' fluoro-modified nucleoside
  modified_base 7: mod_base = OTHER; note = 2' O-methyl modified nucleoside
  modified_base 8: mod_base = OTHER; note = 2' fluoro-modified nucleoside
  modified_base 9: mod_base = OTHER; note = 2' O-methyl modified nucleoside
  modified_base 10: mod_base = OTHER; note = 2' fluoro-modified nucleoside
  modified_base 11: mod_base = OTHER; note = 2' O-methyl modified nucleoside
  modified_base 12: mod_base = OTHER; note = 2' O-methyl modified nucleoside
  modified_base 13: mod_base = OTHER; note = 2' O-methyl modified nucleoside
  modified_base 14: mod_base = OTHER; note = 2' fluoro-modified nucleoside
  modified_base 15: mod_base = OTHER; note = 2' O-methyl modified nucleoside
  modified_base 16: mod_base = OTHER; note = 2' fluoro-modified nucleoside
  modified_base 17: mod_base = OTHER; note = 2' O-methyl modified nucleoside
  modified_base 18: mod_base = OTHER; note = 2' fluoro-modified nucleoside
  modified_base 19: mod_base = OTHER; note = 2' O-methyl modified nucleoside
  modified_base 19..20: mod_base = OTHER; note = Phosphorothioate linkage
  modified_base 20: mod_base = OTHER; note = 2' O-methyl modified nucleoside
  modified_base 20..21: mod_base = OTHER; note = Phosphorothioate linkage
  modified_base 21: mod_base = OTHER; note = 2' O-methyl modified nucleoside
  source 1..21: mol_type = other RNA
tgttccccaggaagaggcgtt

SEQ ID NO: 11358 - RNA, 21 nt, synthetic construct
  misc_feature 1..21: note = Description of Artificial Sequence: Synthetic oligonucleotide
  modified_base 1: mod_base = OTHER; note = 2' O-methyl modified nucleoside
  modified_base 1..2: mod_base = OTHER; note = Phosphorothioate linkage
  modified_base 2: mod_base = OTHER; note = 2' fluoro-modified nucleoside
  modified_base 2..3: mod_base = OTHER; note = Phosphorothioate linkage
  modified_base 3: mod_base = OTHER; note = 2' O-methyl modified nucleoside
  modified_base 4: mod_base = OTHER; note = 2' fluoro-modified nucleoside
  modified_base 5: mod_base = OTHER; note = 2' O-methyl modified nucleoside
  modified_base 6: mod_base = OTHER; note = 2' fluoro-modified nucleoside
  modified_base 7: mod_base = OTHER; note = 2' O-methyl modified nucleoside
  modified_base 8: mod_base = OTHER; note = 2' fluoro-modified nucleoside
  modified_base 9: mod_base = OTHER; note = 2' O-methyl modified nucleoside
  modified_base 10: mod_base = OTHER; note = 2' fluoro-modified nucleoside
  modified_base 11: mod_base = OTHER; note = 2' O-methyl modified nucleoside
  modified_base 12: mod_base = OTHER; note = 2' O-methyl modified nucleoside
  modified_base 13: mod_base = OTHER; note = 2' O-methyl modified nucleoside
  modified_base 14: mod_base = OTHER; note = 2' fluoro-modified nucleoside
  modified_base 15: mod_base = OTHER; note = 2' O-methyl modified nucleoside
  modified_base 16: mod_base = OTHER; note = 2' fluoro-modified nucleoside
  modified_base 17: mod_base = OTHER; note = 2' O-methyl modified nucleoside
  modified_base 18: mod_base = OTHER; note = 2' fluoro-modified nucleoside
  modified_base 19: mod_base = OTHER; note = 2' O-methyl modified nucleoside
  modified_base 19..20: mod_base = OTHER; note = Phosphorothioate linkage
  modified_base 20: mod_base = OTHER; note = 2' O-methyl modified nucleoside
  modified_base 20..21: mod_base = OTHER; note = Phosphorothioate linkage
  modified_base 21: mod_base = OTHER; note = 2' O-methyl modified nucleoside
  source 1..21: mol_type = other RNA
tcttgtccaagcagttgtctt

SEQ ID NO: 11359 - RNA, 21 nt, synthetic construct
  misc_feature 1..21: note = Description of Artificial Sequence: Synthetic oligonucleotide
  modified_base 1: mod_base = OTHER; note = 2' O-methyl modified nucleoside
  modified_base 1..2: mod_base = OTHER; note = Phosphorothioate linkage
  modified_base 2: mod_base = OTHER; note = 2' fluoro-modified nucleoside
  modified_base 2..3: mod_base = OTHER; note = Phosphorothioate linkage
  modified_base 3: mod_base = OTHER; note = 2' O-methyl modified nucleoside
  modified_base 4: mod_base = OTHER; note = 2' fluoro-modified nucleoside
  modified_base 5: mod_base = OTHER; note = 2' O-methyl modified nucleoside
  modified_base 6: mod_base = OTHER; note = 2' fluoro-modified nucleoside
  modified_base 7: mod_base = OTHER; note = 2' O-methyl modified nucleoside
  modified_base 8: mod_base = OTHER; note = 2' fluoro-modified nucleoside
  modified_base 9: mod_base = OTHER; note = 2' O-methyl modified nucleoside
  modified_base 10: mod_base = OTHER; note = 2' fluoro-modified nucleoside
  modified_base 11: mod_base = OTHER; note = 2' O-methyl modified nucleoside
  modified_base 12: mod_base = OTHER; note = 2' O-methyl modified nucleoside
  modified_base 13: mod_base = OTHER; note = 2' O-methyl modified nucleoside
  modified_base 14: mod_base = OTHER; note = 2' fluoro-modified nucleoside
  modified_base 15: mod_base = OTHER; note = 2' O-methyl modified nucleoside
  modified_base 16: mod_base = OTHER; note = 2' fluoro-modified nucleoside
  modified_base 17: mod_base = OTHER; note = 2' O-methyl modified nucleoside
  modified_base 18: mod_base = OTHER; note = 2' fluoro-modified nucleoside
  modified_base 19: mod_base = OTHER; note = 2' O-methyl modified nucleoside
  modified_base 19..20: mod_base = OTHER; note = Phosphorothioate linkage
  modified_base 20: mod_base = OTHER; note = 2' O-methyl modified nucleoside
  modified_base 20..21: mod_base = OTHER; note = Phosphorothioate linkage
  modified_base 21: mod_base = OTHER; note = 2' O-methyl modified nucleoside
  source 1..21: mol_type = other RNA
tacttgtccaagcagttgttt

SEQ ID NO: 11360 - RNA, 21 nt, synthetic construct
  misc_feature 1..21: note = Description of Artificial Sequence: Synthetic oligonucleotide
  modified_base 1: mod_base = OTHER; note = 2' O-methyl modified nucleoside
  modified_base 1..2: mod_base = OTHER; note = Phosphorothioate linkage
  modified_base 2: mod_base = OTHER; note = 2' fluoro-modified nucleoside
  modified_base 2..3: mod_base = OTHER; note = Phosphorothioate linkage
  modified_base 3: mod_base = OTHER; note = 2' O-methyl modified nucleoside
  modified_base 4: mod_base = OTHER; note = 2' fluoro-modified nucleoside
  modified_base 5: mod_base = OTHER; note = 2' O-methyl modified nucleoside
  modified_base 6: mod_base = OTHER; note = 2' fluoro-modified nucleoside
  modified_base 7: mod_base = OTHER; note = 2' O-methyl modified nucleoside
  modified_base 8: mod_base = OTHER; note = 2' fluoro-modified nucleoside
  modified_base 9: mod_base = OTHER; note = 2' O-methyl modified nucleoside
  modified_base 10: mod_base = OTHER; note = 2' fluoro-modified nucleoside
  modified_base 11: mod_base = OTHER; note = 2' O-methyl modified nucleoside
  modified_base 12: mod_base = OTHER; note = 2' O-methyl modified nucleoside
  modified_base 13: mod_base = OTHER; note = 2' O-methyl modified nucleoside
  modified_base 14: mod_base = OTHER; note = 2' fluoro-modified nucleoside
  modified_base 15: mod_base = OTHER; note = 2' O-methyl modified nucleoside
  modified_base 16: mod_base = OTHER; note = 2' fluoro-modified nucleoside
  modified_base 17: mod_base = OTHER; note = 2' O-methyl modified nucleoside
  modified_base 18: mod_base = OTHER; note = 2' fluoro-modified nucleoside
  modified_base 19: mod_base = OTHER; note = 2' O-methyl modified nucleoside
  modified_base 19..20: mod_base = OTHER; note = Phosphorothioate linkage
  modified_base 20: mod_base = OTHER; note = 2' O-methyl modified nucleoside
  modified_base 20..21: mod_base = OTHER; note = Phosphorothioate linkage
  modified_base 21: mod_base = OTHER; note = 2' O-methyl modified nucleoside
  source 1..21: mol_type = other RNA
ttgtaccagtagccacctttt

SEQ ID NO: 11361 - RNA, 21 nt, synthetic construct
  misc_feature 1..21: note = Description of Artificial Sequence: Synthetic oligonucleotide
  modified_base 1: mod_base = OTHER; note = 2' O-methyl modified nucleoside
  modified_base 1..2: mod_base = OTHER; note = Phosphorothioate linkage
  modified_base 2: mod_base = OTHER; note = 2' fluoro-modified nucleoside
  modified_base 2..3: mod_base = OTHER; note = Phosphorothioate linkage
  modified_base 3: mod_base = OTHER; note = 2' O-methyl modified nucleoside
  modified_base 4: mod_base = OTHER; note = 2' fluoro-modified nucleoside
  modified_base 5: mod_base = OTHER; note = 2' O-methyl modified nucleoside
  modified_base 6: mod_base = OTHER; note = 2' fluoro-modified nucleoside
  modified_base 7: mod_base = OTHER; note = 2' O-methyl modified nucleoside
  modified_base 8: mod_base = OTHER; note = 2' fluoro-modified nucleoside
  modified_base 9: mod_base = OTHER; note = 2' O-methyl modified nucleoside
  modified_base 10: mod_base = OTHER; note = 2' fluoro-modified nucleoside
  modified_base 11: mod_base = OTHER; note = 2' O-methyl modified nucleoside
  modified_base 12: mod_base = OTHER; note = 2' O-methyl modified nucleoside
  modified_base 13: mod_base = OTHER; note = 2' O-methyl modified nucleoside
  modified_base 14: mod_base = OTHER; note = 2' fluoro-modified nucleoside
  modified_base 15: mod_base = OTHER; note = 2' O-methyl modified nucleoside
  modified_base 16: mod_base = OTHER; note = 2' fluoro-modified nucleoside
  modified_base 17: mod_base = OTHER; note = 2' O-methyl modified nucleoside
  modified_base 18: mod_base = OTHER; note = 2' fluoro-modified nucleoside
  modified_base 19: mod_base = OTHER; note = 2' O-methyl modified nucleoside
  modified_base 19..20: mod_base = OTHER; note = Phosphorothioate linkage
  modified_base 20: mod_base = OTHER; note = 2' O-methyl modified nucleoside
  modified_base 20..21: mod_base = OTHER; note = Phosphorothioate linkage
  modified_base 21: mod_base = OTHER; note = 2' O-methyl modified nucleoside
  source 1..21: mol_type = other RNA
tttgtaccagtagccaccttt

SEQ ID NO: 11362 - RNA, 21 nt, synthetic construct
  misc_feature 1..21: note = Description of Artificial Sequence: Synthetic oligonucleotide
  modified_base 1: mod_base = OTHER; note = 2' O-methyl modified nucleoside
  modified_base 1..2: mod_base = OTHER; note = Phosphorothioate linkage
  modified_base 2: mod_base = OTHER; note = 2' fluoro-modified nucleoside
  modified_base 2..3: mod_base = OTHER; note = Phosphorothioate linkage
  modified_base 3: mod_base = OTHER; note = 2' O-methyl modified nucleoside
  modified_base 4: mod_base = OTHER; note = 2' fluoro-modified nucleoside
  modified_base 5: mod_base = OTHER; note = 2' O-methyl modified nucleoside
  modified_base 6: mod_base = OTHER; note = 2' fluoro-modified nucleoside
  modified_base 7: mod_base = OTHER; note = 2' O-methyl modified nucleoside
  modified_base 8: mod_base = OTHER; note = 2' fluoro-modified nucleoside
  modified_base 9: mod_base = OTHER; note = 2' O-methyl modified nucleoside
  modified_base 10: mod_base = OTHER; note = 2' fluoro-modified nucleoside
  modified_base 11: mod_base = OTHER; note = 2' O-methyl modified nucleoside
  modified_base 12: mod_base = OTHER; note = 2' O-methyl modified nucleoside
  modified_base 13: mod_base = OTHER; note = 2' O-methyl modified nucleoside
  modified_base 14: mod_base = OTHER; note = 2' fluoro-modified nucleoside
  modified_base 15: mod_base = OTHER; note = 2' O-methyl modified nucleoside
  modified_base 16: mod_base = OTHER; note = 2' fluoro-modified nucleoside
  modified_base 17: mod_base = OTHER; note = 2' O-methyl modified nucleoside
  modified_base 18: mod_base = OTHER; note = 2' fluoro-modified nucleoside
  modified_base 19: mod_base = OTHER; note = 2' O-methyl modified nucleoside
  modified_base 19..20: mod_base = OTHER; note = Phosphorothioate linkage
  modified_base 20: mod_base = OTHER; note = 2' O-methyl modified nucleoside
  modified_base 20..21: mod_base = OTHER; note = Phosphorothioate linkage
  modified_base 21: mod_base = OTHER; note = 2' O-methyl modified nucleoside
  source 1..21: mol_type = other RNA
tagttgtaccagtagccactt

SEQ ID NO: 11363 - RNA, 21 nt, synthetic construct
  misc_feature 1..21: note = Description of Artificial Sequence: Synthetic oligonucleotide
  modified_base 1: mod_base = OTHER; note = 2' O-methyl modified nucleoside
  modified_base 1..2: mod_base = OTHER; note = Phosphorothioate linkage
  modified_base 2: mod_base = OTHER; note = 2' fluoro-modified nucleoside
  modified_base 2..3: mod_base = OTHER; note = Phosphorothioate linkage
  modified_base 3: mod_base = OTHER; note = 2' O-methyl modified nucleoside
  modified_base 4: mod_base = OTHER; note = 2' fluoro-modified nucleoside
  modified_base 5: mod_base = OTHER; note = 2' O-methyl modified nucleoside
  modified_base 6: mod_base = OTHER; note = 2' fluoro-modified nucleoside
  modified_base 7: mod_base = OTHER; note = 2' O-methyl modified nucleoside
  modified_base 8: mod_base = OTHER; note = 2' fluoro-modified nucleoside
  modified_base 9: mod_base = OTHER; note = 2' O-methyl modified nucleoside
  modified_base 10: mod_base = OTHER; note = 2' fluoro-modified nucleoside
  modified_base 11: mod_base = OTHER; note = 2' O-methyl modified nucleoside
  modified_base 12: mod_base = OTHER; note = 2' O-methyl modified nucleoside
  modified_base 13: mod_base = OTHER; note = 2' O-methyl modified nucleoside
  modified_base 14: mod_base = OTHER; note = 2' fluoro-modified nucleoside
  modified_base 15: mod_base = OTHER; note = 2' O-methyl modified nucleoside
  modified_base 16: mod_base = OTHER; note = 2' fluoro-modified nucleoside
  modified_base 17: mod_base = OTHER; note = 2' O-methyl modified nucleoside
  modified_base 18: mod_base = OTHER; note = 2' fluoro-modified nucleoside
  modified_base 19: mod_base = OTHER; note = 2' O-methyl modified nucleoside
  modified_base 19..20: mod_base = OTHER; note = Phosphorothioate linkage
  modified_base 20: mod_base = OTHER; note = 2' O-methyl modified nucleoside
  modified_base 20..21: mod_base = OTHER; note = Phosphorothioate linkage
  modified_base 21: mod_base = OTHER; note = 2' O-methyl modified nucleoside
  source 1..21: mol_type = other RNA
tcagttgtaccagtagccatt

SEQ ID NO: 11364 - RNA, 21 nt, synthetic construct
  misc_feature 1..21: note = Description of Artificial Sequence: Synthetic oligonucleotide
  modified_base 1: mod_base = OTHER; note = 2' O-methyl modified nucleoside
  modified_base 1..2: mod_base = OTHER; note = Phosphorothioate linkage
  modified_base 2: mod_base = OTHER; note = 2' fluoro-modified nucleoside
  modified_base 2..3: mod_base = OTHER; note = Phosphorothioate linkage
  modified_base 3: mod_base = OTHER; note = 2' O-methyl modified nucleoside
  modified_base 4: mod_base = OTHER; note = 2' fluoro-modified nucleoside
  modified_base 5: mod_base = OTHER; note = 2' O-methyl modified nucleoside
  modified_base 6: mod_base = OTHER; note = 2' fluoro-modified nucleoside
  modified_base 7: mod_base = OTHER; note = 2' O-methyl modified nucleoside
  modified_base 8: mod_base = OTHER; note = 2' fluoro-modified nucleoside
  modified_base 9: mod_base = OTHER; note = 2' O-methyl modified nucleoside
  modified_base 10: mod_base = OTHER; note = 2' fluoro-modified nucleoside
  modified_base 11: mod_base = OTHER; note = 2' O-methyl modified nucleoside
  modified_base 12: mod_base = OTHER; note = 2' O-methyl modified nucleoside
  modified_base 13: mod_base = OTHER; note = 2' O-methyl modified nucleoside
  modified_base 14: mod_base = OTHER; note = 2' fluoro-modified nucleoside
  modified_base 15: mod_base = OTHER; note = 2' O-methyl modified nucleoside
  modified_base 16: mod_base = OTHER; note = 2' fluoro-modified nucleoside
  modified_base 17: mod_base = OTHER; note = 2' O-methyl modified nucleoside
  modified_base 18: mod_base = OTHER; note = 2' fluoro-modified nucleoside
  modified_base 19: mod_base = OTHER; note = 2' O-methyl modified nucleoside
  modified_base 19..20: mod_base = OTHER; note = Phosphorothioate linkage
  modified_base 20: mod_base = OTHER; note = 2' O-methyl modified nucleoside
  modified_base 20..21: mod_base = OTHER; note = Phosphorothioate linkage
  modified_base 21: mod_base = OTHER; note = 2' O-methyl modified nucleoside
  source 1..21: mol_type = other RNA
tgcagttgtaccagtagcctt

SEQ ID NO: 11365 - RNA, 21 nt, synthetic construct
  misc_feature 1..21: note = Description of Artificial Sequence: Synthetic oligonucleotide
  modified_base 1: mod_base = OTHER; note = 2' O-methyl modified nucleoside
  modified_base 1..2: mod_base = OTHER; note = Phosphorothioate linkage
  modified_base 2: mod_base = OTHER; note = 2' fluoro-modified nucleoside
  modified_base 2..3: mod_base = OTHER; note = Phosphorothioate linkage
  modified_base 3: mod_base = OTHER; note = 2' O-methyl modified nucleoside
  modified_base 4: mod_base = OTHER; note = 2' fluoro-modified nucleoside
  modified_base 5: mod_base = OTHER; note = 2' O-methyl modified nucleoside
  modified_base 6: mod_base = OTHER; note = 2' fluoro-modified nucleoside
  modified_base 7: mod_base = OTHER; note = 2' O-methyl modified nucleoside
  modified_base 8: mod_base = OTHER; note = 2' fluoro-modified nucleoside
  modified_base 9: mod_base = OTHER; note = 2' O-methyl modified nucleoside
  modified_base 10: mod_base = OTHER; note = 2' fluoro-modified nucleoside
  modified_base 11: mod_base = OTHER; note = 2' O-methyl modified nucleoside
  modified_base 12: mod_base = OTHER; note = 2' O-methyl modified nucleoside
  modified_base 13: mod_base = OTHER; note = 2' O-methyl modified nucleoside
  modified_base 14: mod_base = OTHER; note = 2' fluoro-modified nucleoside
  modified_base 15: mod_base = OTHER; note = 2' O-methyl modified nucleoside
  modified_base 16: mod_base = OTHER; note = 2' fluoro-modified nucleoside
  modified_base 17: mod_base = OTHER; note = 2' O-methyl modified nucleoside
  modified_base 18: mod_base = OTHER; note = 2' fluoro-modified nucleoside
  modified_base 19: mod_base = OTHER; note = 2' O-methyl modified nucleoside
  modified_base 19..20: mod_base = OTHER; note = Phosphorothioate linkage
  modified_base 20: mod_base = OTHER; note = 2' O-methyl modified nucleoside
  modified_base 20..21: mod_base = OTHER; note = Phosphorothioate linkage
  modified_base 21: mod_base = OTHER; note = 2' O-methyl modified nucleoside
  source 1..21: mol_type = other RNA
tagcagttgtaccagtagctt

SEQ ID NO: 11366 - RNA, 21 nt, synthetic construct
  misc_feature 1..21: note = Description of Artificial Sequence: Synthetic oligonucleotide
  modified_base 1: mod_base = OTHER; note = 2' O-methyl modified nucleoside
  modified_base 1..2: mod_base = OTHER; note = Phosphorothioate linkage
  modified_base 2: mod_base = OTHER; note = 2' fluoro-modified nucleoside
  modified_base 2..3: mod_base = OTHER; note = Phosphorothioate linkage
  modified_base 3: mod_base = OTHER; note = 2' O-methyl modified nucleoside
  modified_base 4: mod_base = OTHER; note = 2' fluoro-modified nucleoside
  modified_base 5: mod_base = OTHER; note = 2' O-methyl modified nucleoside
  modified_base 6: mod_base = OTHER; note = 2' fluoro-modified nucleoside
  modified_base 7: mod_base = OTHER; note = 2' O-methyl modified nucleoside
  modified_base 8: mod_base = OTHER; note = 2' fluoro-modified nucleoside
  modified_base 9: mod_base = OTHER; note = 2' O-methyl modified nucleoside
  modified_base 10: mod_base = OTHER; note = 2' fluoro-modified nucleoside
  modified_base 11: mod_base = OTHER; note = 2' O-methyl modified nucleoside
  modified_base 12: mod_base = OTHER; note = 2' O-methyl modified nucleoside
  modified_base 13: mod_base = OTHER; note = 2' O-methyl modified nucleoside
  modified_base 14: mod_base = OTHER; note = 2' fluoro-modified nucleoside
  modified_base 15: mod_base = OTHER; note = 2' O-methyl modified nucleoside
  modified_base 16: mod_base = OTHER; note = 2' fluoro-modified nucleoside
  modified_base 17: mod_base = OTHER; note = 2' O-methyl modified nucleoside
  modified_base 18: mod_base = OTHER; note = 2' fluoro-modified nucleoside
  modified_base 19: mod_base = OTHER; note = 2' O-methyl modified nucleoside
  modified_base 19..20: mod_base = OTHER; note = Phosphorothioate linkage
  modified_base 20: mod_base = OTHER; note = 2' O-methyl modified nucleoside
  modified_base 20..21: mod_base = OTHER; note = Phosphorothioate linkage
  modified_base 21: mod_base = OTHER; note = 2' O-methyl modified nucleoside
  source 1..21: mol_type = other RNA
ttgcagcagttgtaccagttt

SEQ ID NO: 11367 - RNA, 21 nt, synthetic construct
  misc_feature 1..21: note = Description of Artificial Sequence: Synthetic oligonucleotide
  modified_base 1: mod_base = OTHER; note = 2' O-methyl modified nucleoside
  modified_base 1..2: mod_base = OTHER; note = Phosphorothioate linkage
  modified_base 2: mod_base = OTHER; note = 2' fluoro-modified nucleoside
  modified_base 2..3: mod_base = OTHER; note = Phosphorothioate linkage
  modified_base 3: mod_base = OTHER; note = 2' O-methyl modified nucleoside
  modified_base 4: mod_base = OTHER; note = 2' fluoro-modified nucleoside
  modified_base 5: mod_base = OTHER; note = 2' O-methyl modified nucleoside
  modified_base 6: mod_base = OTHER; note = 2' fluoro-modified nucleoside
  modified_base 7: mod_base = OTHER; note = 2' O-methyl modified nucleoside
  modified_base 8: mod_base = OTHER; note = 2' fluoro-modified nucleoside
  modified_base 9: mod_base = OTHER; note = 2' O-methyl modified nucleoside
  modified_base 10: mod_base = OTHER; note = 2' fluoro-modified nucleoside
  modified_base 11: mod_base = OTHER; note = 2' O-methyl modified nucleoside
  modified_base 12: mod_base = OTHER; note = 2' O-methyl modified nucleoside
  modified_base 13: mod_base = OTHER; note = 2' O-methyl modified nucleoside
  modified_base 14: mod_base = OTHER; note = 2' fluoro-modified nucleoside
  modified_base 15: mod_base = OTHER; note = 2' O-methyl modified nucleoside
  modified_base 16: mod_base = OTHER; note = 2' fluoro-modified nucleoside
  modified_base 17: mod_base = OTHER; note = 2' O-methyl modified nucleoside
  modified_base 18: mod_base = OTHER; note = 2' fluoro-modified nucleoside
  modified_base 19: mod_base = OTHER; note = 2' O-methyl modified nucleoside
  modified_base 19..20: mod_base = OTHER; note = Phosphorothioate linkage
  modified_base 20: mod_base = OTHER; note = 2' O-methyl modified nucleoside
  modified_base 20..21: mod_base = OTHER; note = Phosphorothioate linkage
  modified_base 21: mod_base = OTHER; note = 2' O-methyl modified nucleoside
  source 1..21: mol_type = other RNA
ttgtgcagcagttgtaccatt

SEQ ID NO: 11368 - RNA, 21 nt, synthetic construct
  misc_feature 1..21: note = Description of Artificial Sequence: Synthetic oligonucleotide
  modified_base 1: mod_base = OTHER; note = 2' O-methyl modified nucleoside
  modified_base 1..2: mod_base = OTHER; note = Phosphorothioate linkage
  modified_base 2: mod_base = OTHER; note = 2' fluoro-modified nucleoside
  modified_base 2..3: mod_base = OTHER; note = Phosphorothioate linkage
  modified_base 3: mod_base = OTHER; note = 2' O-methyl modified nucleoside
  modified_base 4: mod_base = OTHER; note = 2' fluoro-modified nucleoside
  modified_base 5: mod_base = OTHER; note = 2' O-methyl modified nucleoside
  modified_base 6: mod_base = OTHER; note = 2' fluoro-modified nucleoside
  modified_base 7: mod_base = OTHER; note = 2' O-methyl modified nucleoside
  modified_base 8: mod_base = OTHER; note = 2' fluoro-modified nucleoside
  modified_base 9: mod_base = OTHER; note = 2' O-methyl modified nucleoside
  modified_base 10: mod_base = OTHER; note = 2' fluoro-modified nucleoside
  modified_base 11: mod_base = OTHER; note = 2' O-methyl modified nucleoside
  modified_base 12: mod_base = OTHER; note = 2' O-methyl modified nucleoside
  modified_base 13: mod_base = OTHER; note = 2' O-methyl modified nucleoside
  modified_base 14: mod_base = OTHER; note = 2' fluoro-modified nucleoside
  modified_base 15: mod_base = OTHER; note = 2' O-methyl modified nucleoside
  modified_base 16: mod_base = OTHER; note = 2' fluoro-modified nucleoside
  modified_base 17: mod_base = OTHER; note = 2' O-methyl modified nucleoside
  modified_base 18: mod_base = OTHER; note = 2' fluoro-modified nucleoside
  modified_base 19: mod_base = OTHER; note = 2' O-methyl modified nucleoside
  modified_base 19..20: mod_base = OTHER; note = Phosphorothioate linkage
  modified_base 20: mod_base = OTHER; note = 2' O-methyl modified nucleoside
  modified_base 20..21: mod_base = OTHER; note = Phosphorothioate linkage
  modified_base 21: mod_base = OTHER; note = 2' O-methyl modified nucleoside
  source 1..21: mol_type = other RNA
tctgtgcagcagttgtacctt

SEQ ID NO: 11369 - RNA, 21 nt, synthetic construct
  misc_feature 1..21: note = Description of Artificial Sequence: Synthetic oligonucleotide
  modified_base 1: mod_base = OTHER; note = 2' O-methyl modified nucleoside
  modified_base 1..2: mod_base = OTHER; note = Phosphorothioate linkage
  modified_base 2: mod_base = OTHER; note = 2' fluoro-modified nucleoside
  modified_base 2..3: mod_base = OTHER; note = Phosphorothioate linkage
  modified_base 3: mod_base = OTHER; note = 2' O-methyl modified nucleoside
  modified_base 4: mod_base = OTHER; note = 2' fluoro-modified nucleoside
  modified_base 5: mod_base = OTHER; note = 2' O-methyl modified nucleoside
  modified_base 6: mod_base = OTHER; note = 2' fluoro-modified nucleoside
  modified_base 7: mod_base = OTHER; note = 2' O-methyl modified nucleoside
  modified_base 8: mod_base = OTHER; note = 2' fluoro-modified nucleoside
  modified_base 9: mod_base = OTHER; note = 2' O-methyl modified nucleoside
  modified_base 10: mod_base = OTHER; note = 2' fluoro-modified nucleoside
  modified_base 11: mod_base = OTHER; note = 2' O-methyl modified nucleoside
  modified_base 12: mod_base = OTHER; note = 2' O-methyl modified nucleoside
  modified_base 13: mod_base = OTHER; note = 2' O-methyl modified nucleoside
  modified_base 14: mod_base = OTHER; note = 2' fluoro-modified nucleoside
  modified_base 15: mod_base = OTHER; note = 2' O-methyl modified nucleoside
  modified_base 16: mod_base = OTHER; note = 2' fluoro-modified nucleoside
  modified_base 17: mod_base = OTHER; note = 2' O-methyl modified nucleoside
  modified_base 18: mod_base = OTHER; note = 2' fluoro-modified nucleoside
  modified_base 19: mod_base = OTHER; note = 2' O-methyl modified nucleoside
  modified_base 19..20: mod_base = OTHER; note = Phosphorothioate linkage
  modified_base 20: mod_base = OTHER; note = 2' O-methyl modified nucleoside
  modified_base 20..21: mod_base = OTHER; note = Phosphorothioate linkage
  modified_base 21: mod_base = OTHER; note = 2' O-methyl modified nucleoside
  source 1..21: mol_type = other RNA
ttctgtgcagcagttgtactt

SEQ ID NO: 11370 - RNA, 21 nt, synthetic construct
  misc_feature 1..21: note = Description of Artificial Sequence: Synthetic oligonucleotide
  modified_base 1: mod_base = OTHER; note = 2' O-methyl modified nucleoside
  modified_base 1..2: mod_base = OTHER; note = Phosphorothioate linkage
  modified_base 2: mod_base = OTHER; note = 2' fluoro-modified nucleoside
  modified_base 2..3: mod_base = OTHER; note = Phosphorothioate linkage
  modified_base 3: mod_base = OTHER; note = 2' O-methyl modified nucleoside
  modified_base 4: mod_base = OTHER; note = 2' fluoro-modified nucleoside
  modified_base 5: mod_base = OTHER; note = 2' O-methyl modified nucleoside
  modified_base 6: mod_base = OTHER; note = 2' fluoro-modified nucleoside
  modified_base 7: mod_base = OTHER; note = 2' O-methyl modified nucleoside
  modified_base 8: mod_base = OTHER; note = 2' fluoro-modified nucleoside
  modified_base 9: mod_base = OTHER; note = 2' O-methyl modified nucleoside
  modified_base 10: mod_base = OTHER; note = 2' fluoro-modified nucleoside
  modified_base 11: mod_base = OTHER; note = 2' O-methyl modified nucleoside
  modified_base 12: mod_base = OTHER; note = 2' O-methyl modified nucleoside
  modified_base 13: mod_base = OTHER; note = 2' O-methyl modified nucleoside
  modified_base 14: mod_base = OTHER; note = 2' fluoro-modified nucleoside
  modified_base 15: mod_base = OTHER; note = 2' O-methyl modified nucleoside
  modified_base 16: mod_base = OTHER; note = 2' fluoro-modified nucleoside
  modified_base 17: mod_base = OTHER; note = 2' O-methyl modified nucleoside
  modified_base 18: mod_base = OTHER; note = 2' fluoro-modified nucleoside
  modified_base 19: mod_base = OTHER; note = 2' O-methyl modified nucleoside
  modified_base 19..20: mod_base = OTHER; note = Phosphorothioate linkage
  modified_base 20: mod_base = OTHER; note = 2' O-methyl modified nucleoside
  modified_base 20..21: mod_base = OTHER; note = Phosphorothioate linkage
  modified_base 21: mod_base = OTHER; note = 2' O-methyl modified nucleoside
  source 1..21: mol_type = other RNA
tgtctgtgcagcagttgtatt

SEQ ID NO: 11371 - RNA, 21 nt, synthetic construct
  misc_feature 1..21: note = Description of Artificial Sequence: Synthetic oligonucleotide
  modified_base 1: mod_base = OTHER; note = 2' O-methyl modified nucleoside
  modified_base 1..2: mod_base = OTHER; note = Phosphorothioate linkage
  modified_base 2: mod_base = OTHER; note = 2' fluoro-modified nucleoside
  modified_base 2..3: mod_base = OTHER; note = Phosphorothioate linkage
  modified_base 3: mod_base = OTHER; note = 2' O-methyl modified nucleoside
  modified_base 4: mod_base = OTHER; note = 2' fluoro-modified nucleoside
  modified_base 5: mod_base = OTHER; note = 2' O-methyl modified nucleoside
  modified_base 6: mod_base = OTHER; note = 2' fluoro-modified nucleoside
  modified_base 7: mod_base = OTHER; note = 2' O-methyl modified nucleoside
  modified_base 8: mod_base = OTHER; note = 2' fluoro-modified nucleoside
  modified_base 9: mod_base = OTHER; note = 2' O-methyl modified nucleoside
  modified_base 10: mod_base = OTHER; note = 2' fluoro-modified nucleoside
  modified_base 11: mod_base = OTHER; note = 2' O-methyl modified nucleoside
  modified_base 12: mod_base = OTHER; note = 2' O-methyl modified nucleoside
  modified_base 13: mod_base = OTHER; note = 2' O-methyl modified nucleoside
  modified_base 14: mod_base = OTHER; note = 2' fluoro-modified nucleoside
  modified_base 15: mod_base = OTHER; note = 2' O-methyl modified nucleoside
  modified_base 16: mod_base = OTHER; note = 2' fluoro-modified nucleoside
  modified_base 17: mod_base = OTHER; note = 2' O-methyl modified nucleoside
  modified_base 18: mod_base = OTHER; note = 2' fluoro-modified nucleoside
  modified_base 19: mod_base = OTHER; note = 2' O-methyl modified nucleoside
  modified_base 19..20: mod_base = OTHER; note = Phosphorothioate linkage
  modified_base 20: mod_base = OTHER; note = 2' O-methyl modified nucleoside
  modified_base 20..21: mod_base = OTHER; note = Phosphorothioate linkage
  modified_base 21: mod_base = OTHER; note = 2' O-methyl modified nucleoside
  source 1..21: mol_type = other RNA
tttggagtctgtgcagcagtt

SEQ ID NO: 11372 - RNA, 21 nt, synthetic construct
  misc_feature 1..21: note = Description of Artificial Sequence: Synthetic oligonucleotide
  modified_base 1: mod_base = OTHER; note = 2' O-methyl modified nucleoside
  modified_base 1..2: mod_base = OTHER; note = Phosphorothioate linkage
  modified_base 2: mod_base = OTHER; note = 2' fluoro-modified nucleoside
  modified_base 2..3: mod_base = OTHER; note = Phosphorothioate linkage
  modified_base 3: mod_base = OTHER; note = 2' O-methyl modified nucleoside
  modified_base 4: mod_base = OTHER; note = 2' fluoro-modified nucleoside
  modified_base 5: mod_base = OTHER; note = 2' O-methyl modified nucleoside
  modified_base 6: mod_base = OTHER; note = 2' fluoro-modified nucleoside
  modified_base 7: mod_base = OTHER; note = 2' O-methyl modified nucleoside
  modified_base 8: mod_base = OTHER; note = 2' fluoro-modified nucleoside
  modified_base 9: mod_base = OTHER; note = 2' O-methyl modified nucleoside
  modified_base 10: mod_base = OTHER; note = 2' fluoro-modified nucleoside
  modified_base 11: mod_base = OTHER; note = 2' O-methyl modified nucleoside
  modified_base 12: mod_base = OTHER; note = 2' O-methyl modified nucleoside
  modified_base 13: mod_base = OTHER; note = 2' O-methyl modified nucleoside
  modified_base 14: mod_base = OTHER; note = 2' fluoro-modified nucleoside
  modified_base 15: mod_base = OTHER; note = 2' O-methyl modified nucleoside
  modified_base 16: mod_base = OTHER; note = 2' fluoro-modified nucleoside
  modified_base 17: mod_base = OTHER; note = 2' O-methyl modified nucleoside
  modified_base 18: mod_base = OTHER; note = 2' fluoro-modified nucleoside
  modified_base 19: mod_base = OTHER; note = 2' O-methyl modified nucleoside
  modified_base 19..20: mod_base = OTHER; note = Phosphorothioate linkage
  modified_base 20: mod_base = OTHER; note = 2' O-methyl modified nucleoside
  modified_base 20..21: mod_base = OTHER; note = Phosphorothioate linkage
  modified_base 21: mod_base = OTHER; note = 2' O-methyl modified nucleoside
  source 1..21: mol_type = other RNA
tgttggagtctgtgcagcatt

SEQ ID NO: 11373 - RNA, 21 nt, synthetic construct
  misc_feature 1..21: note = Description of Artificial Sequence: Synthetic oligonucleotide
  modified_base 1: mod_base = OTHER; note = 2' O-methyl modified nucleoside
  modified_base 1..2: mod_base = OTHER; note = Phosphorothioate linkage
  modified_base 2: mod_base = OTHER; note = 2' fluoro-modified nucleoside
  modified_base 2..3: mod_base = OTHER; note = Phosphorothioate linkage
  modified_base 3: mod_base = OTHER; note = 2' O-methyl modified nucleoside
  modified_base 4: mod_base = OTHER; note = 2' fluoro-modified nucleoside
  modified_base 5: mod_base = OTHER; note = 2' O-methyl modified nucleoside
  modified_base 6: mod_base = OTHER; note = 2' fluoro-modified nucleoside
  modified_base 7: mod_base = OTHER; note = 2' O-methyl modified nucleoside
  modified_base 8: mod_base = OTHER; note = 2' fluoro-modified nucleoside
  modified_base 9: mod_base = OTHER; note = 2' O-methyl modified nucleoside
  modified_base 10: mod_base = OTHER; note = 2' fluoro-modified nucleoside
  modified_base 11: mod_base = OTHER; note = 2' O-methyl modified nucleoside
  modified_base 12: mod_base = OTHER; note = 2' O-methyl modified nucleoside
  modified_base 13: mod_base = OTHER; note = 2' O-methyl modified nucleoside
  modified_base 14: mod_base = OTHER; note = 2' fluoro-modified nucleoside
  modified_base 15: mod_base = OTHER; note = 2' O-methyl modified nucleoside
  modified_base 16: mod_base = OTHER; note = 2' fluoro-modified nucleoside
  modified_base 17: mod_base = OTHER; note = 2' O-methyl modified nucleoside
  modified_base 18: mod_base = OTHER; note = 2' fluoro-modified nucleoside
  modified_base 19: mod_base = OTHER; note = 2' O-methyl modified nucleoside
  modified_base 19..20: mod_base = OTHER; note = Phosphorothioate linkage
  modified_base 20: mod_base = OTHER; note = 2' O-methyl modified nucleoside
  modified_base 20..21: mod_base = OTHER; note = Phosphorothioate linkage
  modified_base 21: mod_base = OTHER; note = 2' O-methyl modified nucleoside
  source 1..21: mol_type = other RNA
taggttggagtctgtgcagtt

SEQ ID NO: 11374 - RNA, 21 nt, synthetic construct
  misc_feature 1..21: note = Description of Artificial Sequence: Synthetic oligonucleotide
  modified_base 1: mod_base = OTHER; note = 2' O-methyl modified nucleoside
  modified_base 1..2: mod_base = OTHER; note = Phosphorothioate linkage
  modified_base 2: mod_base = OTHER; note = 2' fluoro-modified nucleoside
  modified_base 2..3: mod_base = OTHER; note = Phosphorothioate linkage
  modified_base 3: mod_base = OTHER; note = 2' O-methyl modified nucleoside
  modified_base 4: mod_base = OTHER; note = 2' fluoro-modified nucleoside
  modified_base 5: mod_base = OTHER; note = 2' O-methyl modified nucleoside
  modified_base 6: mod_base = OTHER; note = 2' fluoro-modified nucleoside
  modified_base 7: mod_base = OTHER; note = 2' O-methyl modified nucleoside
  modified_base 8: mod_base = OTHER; note = 2' fluoro-modified nucleoside
  modified_base 9: mod_base = OTHER; note = 2' O-methyl modified nucleoside
  modified_base 10: mod_base = OTHER; note = 2' fluoro-modified nucleoside
  modified_base 11: mod_base = OTHER; note = 2' O-methyl modified nucleoside
  modified_base 12: mod_base = OTHER; note = 2' O-methyl modified nucleoside
  modified_base 13: mod_base = OTHER; note = 2' O-methyl modified nucleoside
  modified_base 14: mod_base = OTHER; note = 2' fluoro-modified nucleoside
  modified_base 15: mod_base = OTHER; note = 2' O-methyl modified nucleoside
  modified_base 16: mod_base = OTHER; note = 2' fluoro-modified nucleoside
  modified_base 17: mod_base = OTHER; note = 2' O-methyl modified nucleoside
  modified_base 18: mod_base = OTHER; note = 2' fluoro-modified nucleoside
  modified_base 19: mod_base = OTHER; note = 2' O-methyl modified nucleoside
  modified_base 19..20: mod_base = OTHER; note = Phosphorothioate linkage
  modified_base 20: mod_base = OTHER; note = 2' O-methyl modified nucleoside
  modified_base 20..21: mod_base = OTHER; note = Phosphorothioate linkage
  modified_base 21: mod_base = OTHER; note = 2' O-methyl modified nucleoside
  source 1..21: mol_type = other RNA
tgaggttggagtctgtgcatt

SEQ ID NO: 11375 - RNA, 21 nt, synthetic construct
  misc_feature 1..21: note = Description of Artificial Sequence: Synthetic oligonucleotide
  modified_base 1: mod_base = OTHER; note = 2' O-methyl modified nucleoside
  modified_base 1..2: mod_base = OTHER; note = Phosphorothioate linkage
  modified_base 2: mod_base = OTHER; note = 2' fluoro-modified nucleoside
  modified_base 2..3: mod_base = OTHER; note = Phosphorothioate linkage
  modified_base 3: mod_base = OTHER; note = 2' O-methyl modified nucleoside
  modified_base 4: mod_base = OTHER; note = 2' fluoro-modified nucleoside
  modified_base 5: mod_base = OTHER; note = 2' O-methyl modified nucleoside
  modified_base 6: mod_base = OTHER; note = 2' fluoro-modified nucleoside
  modified_base 7: mod_base = OTHER; note = 2' O-methyl modified nucleoside
  modified_base 8: mod_base = OTHER; note = 2' fluoro-modified nucleoside
  modified_base 9: mod_base = OTHER; note = 2' O-methyl modified nucleoside
  modified_base 10: mod_base = OTHER; note = 2' fluoro-modified nucleoside
  modified_base 11: mod_base = OTHER; note = 2' O-methyl modified nucleoside
  modified_base 12: mod_base = OTHER; note = 2' O-methyl modified nucleoside
  modified_base 13: mod_base = OTHER; note = 2' O-methyl modified nucleoside
  modified_base 14: mod_base = OTHER; note = 2' fluoro-modified nucleoside
  modified_base 15: mod_base = OTHER; note = 2' O-methyl modified nucleoside
  modified_base 16: mod_base = OTHER; note = 2' fluoro-modified nucleoside
  modified_base 17: mod_base = OTHER; note = 2' O-methyl modified nucleoside
  modified_base 18: mod_base = OTHER; note = 2' fluoro-modified nucleoside
  modified_base 19: mod_base = OTHER; note = 2' O-methyl modified nucleoside
  modified_base 19..20: mod_base = OTHER; note = Phosphorothioate linkage
  modified_base 20: mod_base = OTHER; note = 2' O-methyl modified nucleoside
  modified_base 20..21: mod_base = OTHER; note = Phosphorothioate linkage
  modified_base 21: mod_base = OTHER; note = 2' O-methyl modified nucleoside
  source 1..21: mol_type = other RNA
tattgaggttggagtctgttt

SEQ ID NO: 11376 - RNA, 21 nt, synthetic construct
  misc_feature 1..21: note = Description of Artificial Sequence: Synthetic oligonucleotide
  modified_base 1: mod_base = OTHER; note = 2' O-methyl modified nucleoside
  modified_base 1..2: mod_base = OTHER; note = Phosphorothioate linkage
  modified_base 2: mod_base = OTHER; note = 2' fluoro-modified nucleoside
  modified_base 2..3: mod_base = OTHER; note = Phosphorothioate linkage
  modified_base 3: mod_base = OTHER; note = 2' O-methyl modified nucleoside
  modified_base 4: mod_base = OTHER; note = 2' fluoro-modified nucleoside
  modified_base 5: mod_base = OTHER; note = 2' O-methyl modified nucleoside
  modified_base 6: mod_base = OTHER; note = 2' fluoro-modified nucleoside
  modified_base 7: mod_base = OTHER; note = 2' O-methyl modified nucleoside
  modified_base 8: mod_base = OTHER; note = 2' fluoro-modified nucleoside
  modified_base 9: mod_base = OTHER; note = 2' O-methyl modified nucleoside
  modified_base 10: mod_base = OTHER; note = 2' fluoro-modified nucleoside
  modified_base 11: mod_base = OTHER; note = 2' O-methyl modified nucleoside
  modified_base 12: mod_base = OTHER; note = 2' O-methyl modified nucleoside
  modified_base 13: mod_base = OTHER; note = 2' O-methyl modified nucleoside
  modified_base 14: mod_base = OTHER; note = 2' fluoro-modified nucleoside
  modified_base 15: mod_base = OTHER; note = 2' O-methyl modified nucleoside
  modified_base 16: mod_base = OTHER; note = 2' fluoro-modified nucleoside
  modified_base 17: mod_base = OTHER; note = 2' O-methyl modified nucleoside
  modified_base 18: mod_base = OTHER; note = 2' fluoro-modified nucleoside
  modified_base 19: mod_base = OTHER; note = 2' O-methyl modified nucleoside
  modified_base 19..20: mod_base = OTHER; note = Phosphorothioate linkage
  modified_base 20: mod_base = OTHER; note = 2' O-methyl modified nucleoside
  modified_base 20..21: mod_base = OTHER; note = Phosphorothioate linkage
  modified_base 21: mod_base = OTHER; note = 2' O-methyl modified nucleoside
  source 1..21: mol_type = other RNA
tccatgccagccataccagtt

SEQ ID NO: 11377 - RNA, 21 nt, synthetic construct
  misc_feature 1..21: note = Description of Artificial Sequence: Synthetic oligonucleotide
  modified_base 1: mod_base = OTHER; note = 2' fluoro-modified nucleoside
  modified_base 1..2: mod_base = OTHER; note = Phosphorothioate linkage
  modified_base 2: mod_base = OTHER; note = 2' O-methyl modified nucleoside
  modified_base 2..3: mod_base = OTHER; note = Phosphorothioate linkage
  modified_base 3: mod_base = OTHER; note = 2' fluoro-modified nucleoside
  modified_base 4: mod_base = OTHER; note = 2' O-methyl modified nucleoside
  modified_base 5: mod_base = OTHER; note = 2' fluoro-modified nucleoside
  modified_base 6: mod_base = OTHER; note = 2' O-methyl modified nucleoside
  modified_base 7: mod_base = OTHER; note = 2' fluoro-modified nucleoside
  modified_base 8: mod_base = OTHER; note = 2' fluoro-modified nucleoside
  modified_base 9: mod_base = OTHER; note = 2' fluoro-modified nucleoside
  modified_base 10: mod_base = OTHER; note = 2' O-methyl modified nucleoside
  modified_base 11: mod_base = OTHER; note = 2' fluoro-modified nucleoside
  modified_base 12: mod_base = OTHER; note = 2' O-methyl modified nucleoside
  modified_base 13: mod_base = OTHER; note = 2' fluoro-modified nucleoside
  modified_base 14: mod_base = OTHER; note = 2' O-methyl modified nucleoside
  modified_base 15: mod_base = OTHER; note = 2' fluoro-modified nucleoside
  modified_base 16: mod_base = OTHER; note = 2' O-methyl modified nucleoside
  modified_base 17: mod_base = OTHER; note = 2' fluoro-modified nucleoside
  modified_base 18: mod_base = OTHER; note = 2' O-methyl modified nucleoside
  modified_base 19: mod_base = OTHER; note = 2' fluoro-modified nucleoside
  modified_base 19..20: mod_base = OTHER; note = Phosphorothioate linkage
  modified_base 20: mod_base = OTHER; note = 2' O-methyl modified nucleoside
  modified_base 20..21: mod_base = OTHER; note = Phosphorothioate linkage
  modified_base 21: mod_base = OTHER; note = 2' O-methyl modified nucleoside
  source 1..21: mol_type = other RNA
atatgtaccaaggatgttatt

SEQ ID NO: 11378 - RNA, 21 nt, synthetic construct
  misc_feature 1..21: note = Description of Artificial Sequence: Synthetic oligonucleotide
  modified_base 1: mod_base = OTHER; note = 2' fluoro-modified nucleoside
  modified_base 1..2: mod_base = OTHER; note = Phosphorothioate linkage
  modified_base 2: mod_base = OTHER; note = 2' O-methyl modified nucleoside
  modified_base 2..3: mod_base = OTHER; note = Phosphorothioate linkage
  modified_base 3: mod_base = OTHER; note = 2' fluoro-modified nucleoside
  modified_base 4: mod_base = OTHER; note = 2' O-methyl modified nucleoside
  modified_base 5: mod_base = OTHER; note = 2' fluoro-modified nucleoside
  modified_base 6: mod_base = OTHER; note = 2' O-methyl modified nucleoside
  modified_base 7: mod_base = OTHER; note = 2' fluoro-modified nucleoside
  modified_base 8: mod_base = OTHER; note = 2' fluoro-modified nucleoside
  modified_base 9: mod_base = OTHER; note = 2' fluoro-modified nucleoside
  modified_base 10: mod_base = OTHER; note = 2' O-methyl modified nucleoside
  modified_base 11: mod_base = OTHER; note = 2' fluoro-modified nucleoside
  modified_base 12: mod_base = OTHER; note = 2' O-methyl modified nucleoside
  modified_base 13: mod_base = OTHER; note = 2' fluoro-modified nucleoside
  modified_base 14: mod_base = OTHER; note = 2' O-methyl modified nucleoside
  modified_base 15: mod_base = OTHER; note = 2' fluoro-modified nucleoside
  modified_base 16: mod_base = OTHER; note = 2' O-methyl modified nucleoside
  modified_base 17: mod_base = OTHER; note = 2' fluoro-modified nucleoside
  modified_base 18: mod_base = OTHER; note = 2' O-methyl modified nucleoside
  modified_base 19: mod_base = OTHER; note = 2' fluoro-modified nucleoside
  modified_base 19..20: mod_base = OTHER; note = Phosphorothioate linkage
  modified_base 20: mod_base = OTHER; note = 2' O-methyl modified nucleoside
  modified_base 20..21: mod_base = OTHER; note = Phosphorothioate linkage
  modified_base 21: mod_base = OTHER; note = 2' O-methyl modified nucleoside
  source 1..21: mol_type = other RNA
tgtggcccgcacggggcaatt

SEQ ID NO: 11379 - RNA, 21 nt, synthetic construct
  misc_feature 1..21: note = Description of Artificial Sequence: Synthetic oligonucleotide
  modified_base 1: mod_base = OTHER; note = 2' O-methyl modified nucleoside
  modified_base 1..2: mod_base = OTHER; note = Phosphorothioate linkage
  modified_base 2: mod_base = OTHER; note = 2' fluoro-modified nucleoside
  modified_base 2..3: mod_base = OTHER; note = Phosphorothioate linkage
  modified_base 3: mod_base = OTHER; note = 2' O-methyl modified nucleoside
  modified_base 4: mod_base = OTHER; note = 2' fluoro-modified nucleoside
  modified_base 5: mod_base = OTHER; note = 2' O-methyl modified nucleoside
  modified_base 6: mod_base = OTHER; note = 2' fluoro-modified nucleoside
  modified_base 7: mod_base = OTHER; note = 2' O-methyl modified nucleoside
  modified_base 8: mod_base = OTHER; note = 2' fluoro-modified nucleoside
  modified_base 9: mod_base = OTHER; note = 2' O-methyl modified nucleoside
  modified_base 10: mod_base = OTHER; note = 2' fluoro-modified nucleoside
  modified_base 11: mod_base = OTHER; note = 2' O-methyl modified nucleoside
  modified_base 12: mod_base = OTHER; note = 2' O-methyl modified nucleoside
  modified_base 13: mod_base = OTHER; note = 2' O-methyl modified nucleoside
  modified_base 14: mod_base = OTHER; note = 2' fluoro-modified nucleoside
  modified_base 15: mod_base = OTHER; note = 2' O-methyl modified nucleoside
  modified_base 16: mod_base = OTHER; note = 2' fluoro-modified nucleoside
  modified_base 17: mod_base = OTHER; note = 2' O-methyl modified nucleoside
  modified_base 18: mod_base = OTHER; note = 2' fluoro-modified nucleoside
  modified_base 19: mod_base = OTHER; note = 2' O-methyl modified nucleoside
  modified_base 19..20: mod_base = OTHER; note = Phosphorothioate linkage
  modified_base 20: mod_base = OTHER; note = 2' O-methyl modified nucleoside
  modified_base 20..21: mod_base = OTHER; note = Phosphorothioate linkage
  modified_base 21: mod_base = OTHER; note = 2' O-methyl modified nucleoside
  source 1..21: mol_type = other RNA
ttgccccgtgcgggccacatt

SEQ ID NO: 11380-11389 - skipped (10 entries)

SEQ ID NO: 11390 - protein, 16 aa, unidentified
  REGION 1..16: note = Description of Unknown: RFGF sequence
AAVALLPAVLLALLAP

SEQ ID NO: 11391 - protein, 11 aa, unidentified
  REGION 1..11: note = Description of Unknown: RFGF analogue sequence
AALLPVLLAAP

SEQ ID NO: 11392 - protein, 13 aa, Human immunodeficiency virus 1
GRKKRRQRRRPPQ

SEQ ID NO: 11393 - protein, 15 aa, Drosophila sp.
RQIKIWFQNRRMKWK

SEQ ID NO: 11394-11401 - skipped (8 entries)

SEQ ID NO: 11402 - RNA, 21 nt, synthetic construct
  misc_feature 1..21: note = Description of Artificial Sequence: Synthetic oligonucleotide
  modified_base 1: mod_base = OTHER; note = 2' O-methyl modified nucleoside
  modified_base 1..2: mod_base = OTHER; note = Phosphorothioate linkage
  modified_base 2: mod_base = OTHER; note = 2' O-methyl modified nucleoside
  modified_base 2..3: mod_base = OTHER; note = Phosphorothioate linkage
  modified_base 3: mod_base = OTHER; note = 2' O-methyl modified nucleoside
  modified_base 4: mod_base = OTHER; note = 2' O-methyl modified nucleoside
  modified_base 5: mod_base = OTHER; note = 2' fluoro-modified nucleoside
  modified_base 6: mod_base = OTHER; note = 2' O-methyl modified nucleoside
  modified_base 7: mod_base = OTHER; note = 2' fluoro-modified nucleoside
  modified_base 8: mod_base = OTHER; note = 2' fluoro-modified nucleoside
  modified_base 9: mod_base = OTHER; note = 2' fluoro-modified nucleoside
  modified_base 10: mod_base = OTHER; note = 2' O-methyl modified nucleoside
  modified_base 11: mod_base = OTHER; note = 2' O-methyl modified nucleoside
  modified_base 12: mod_base = OTHER; note = 2' O-methyl modified nucleoside
  modified_base 13: mod_base = OTHER; note = 2' O-methyl modified nucleoside
  modified_base 14: mod_base = OTHER; note = 2' O-methyl modified nucleoside
  modified_base 15: mod_base = OTHER; note = 2' O-methyl modified nucleoside
  modified_base 16: mod_base = OTHER; note = 2' O-methyl modified nucleoside
  modified_base 17: mod_base = OTHER; note = 2' O-methyl modified nucleoside
  modified_base 18: mod_base = OTHER; note = 2' O-methyl modified nucleoside
  modified_base 19: mod_base = OTHER; note = 2' O-methyl modified nucleoside
  modified_base 19..20: mod_base = OTHER; note = Phosphorothioate linkage
  modified_base 20: mod_base = OTHER; note = 2' O-methyl modified nucleoside
  modified_base 20..21: mod_base = OTHER; note = Phosphorothioate linkage
  modified_base 21: mod_base = OTHER; note = 2' O-methyl modified nucleoside
  source 1..21: mol_type = other RNA
aaaacaacaaagtggcgagtt

SEQ ID NO: 11403 - RNA, 21 nt, synthetic construct
  misc_feature 1..21: note = Description of Artificial Sequence: Synthetic oligonucleotide
  modified_base 1..2: mod_base = OTHER; note = Phosphorothioate linkage
  modified_base 2: mod_base = OTHER; note = 2' O-methyl modified nucleoside
  modified_base 2..3: mod_base = OTHER; note = Phosphorothioate linkage
  modified_base 3: mod_base = OTHER; note = 2' O-methyl modified nucleoside
  modified_base 4: mod_base = OTHER; note = 2' O-methyl modified nucleoside
  modified_base 5: mod_base = OTHER; note = 2' fluoro-modified nucleoside
  modified_base 6: mod_base = OTHER; note = 2' O-methyl modified nucleoside
  modified_base 7: mod_base = OTHER; note = 2' fluoro-modified nucleoside
  modified_base 8: mod_base = OTHER; note = 2' fluoro-modified nucleoside
  modified_base 9: mod_base = OTHER; note = 2' fluoro-modified nucleoside
  modified_base 10: mod_base = OTHER; note = 2' O-methyl modified nucleoside
  modified_base 11: mod_base = OTHER; note = 2' O-methyl modified nucleoside
  modified_base 12: mod_base = OTHER; note = 2' O-methyl modified nucleoside
  modified_base 13: mod_base = OTHER; note = 2' O-methyl modified nucleoside
  modified_base 14: mod_base = OTHER; note = 2' O-methyl modified nucleoside
  modified_base 15: mod_base = OTHER; note = 2' O-methyl modified nucleoside
  modified_base 16: mod_base = OTHER; note = 2' O-methyl modified nucleoside
  modified_base 17: mod_base = OTHER; note = 2' O-methyl modified nucleoside
  modified_base 18: mod_base = OTHER; note = 2' O-methyl modified nucleoside
  modified_base 19: mod_base = OTHER; note = 2' O-methyl modified nucleoside
  modified_base 19..20: mod_base = OTHER; note = Phosphorothioate linkage
  modified_base 20: mod_base = OTHER; note = 2' O-methyl modified nucleoside
  modified_base 20..21: mod_base = OTHER; note = Phosphorothioate linkage
  modified_base 21: mod_base = OTHER; note = 2' O-methyl modified nucleoside
  source 1..21: mol_type = other RNA
ctcacccaaacccacaaaatt

SEQ ID NO: 11404 - RNA, 21 nt, synthetic construct
  misc_feature 1..21: note = Description of Artificial Sequence: Synthetic oligonucleotide
  modified_base 1: mod_base = OTHER; note = 2' O-methyl modified nucleoside
  modified_base 1..2: mod_base = OTHER; note = Phosphorothioate linkage
  modified_base 2: mod_base = OTHER; note = 2' O-methyl modified nucleoside
  modified_base 2..3: mod_base = OTHER; note = Phosphorothioate linkage
  modified_base 3: mod_base = OTHER; note = 2' O-methyl modified nucleoside
  modified_base 4: mod_base = OTHER; note = 2' O-methyl modified nucleoside
  modified_base 5: mod_base = OTHER; note = 2' fluoro-modified nucleoside
  modified_base 6: mod_base = OTHER; note = 2' O-methyl modified nucleoside
  modified_base 7: mod_base = OTHER; note = 2' fluoro-modified nucleoside
  modified_base 8: mod_base = OTHER; note = 2' fluoro-modified nucleoside
  modified_base 9: mod_base = OTHER; note = 2' fluoro-modified nucleoside
  modified_base 10: mod_base = OTHER; note = 2' O-methyl modified nucleoside
  modified_base 11: mod_base = OTHER; note = 2' O-methyl modified nucleoside
  modified_base 12: mod_base = OTHER; note = 2' O-methyl modified nucleoside
  modified_base 13: mod_base = OTHER; note = 2' O-methyl modified nucleoside
  modified_base 14: mod_base = OTHER; note = 2' O-methyl modified nucleoside
  modified_base 15: mod_base = OTHER; note = 2' O-methyl modified nucleoside
  modified_base 16: mod_base = OTHER; note = 2' O-methyl modified nucleoside
  modified_base 17: mod_base = OTHER; note = 2' O-methyl modified nucleoside
  modified_base 18: mod_base = OTHER; note = 2' O-methyl modified nucleoside
  modified_base 19: mod_base = OTHER; note = 2' O-methyl modified nucleoside
  modified_base 19..20: mod_base = OTHER; note = Phosphorothioate linkage
  modified_base 20: mod_base = OTHER; note = 2' O-methyl modified nucleoside
  modified_base 20..21: mod_base = OTHER; note = Phosphorothioate linkage
  modified_base 21: mod_base = OTHER; note = 2' O-methyl modified nucleoside
  source 1..21: mol_type = other RNA
gtataagcttcctcctgattt

SEQ ID NO: 11405 - RNA, 21 nt, synthetic construct
  misc_feature 1..21: note = Description of Artificial Sequence: Synthetic oligonucleotide
  modified_base 1: mod_base = OTHER; note = 2' O-methyl modified nucleoside
  modified_base 1..2: mod_base = OTHER; note = Phosphorothioate linkage
  modified_base 2: mod_base = OTHER; note = 2' O-methyl modified nucleoside
  modified_base 2..3: mod_base = OTHER; note = Phosphorothioate linkage
  modified_base 3: mod_base = OTHER; note = 2' O-methyl modified nucleoside
  modified_base 4: mod_base = OTHER; note = 2' O-methyl modified nucleoside
  modified_base 5: mod_base = OTHER; note = 2' fluoro-modified nucleoside
  modified_base 6: mod_base = OTHER; note = 2' O-methyl modified nucleoside
  modified_base 7: mod_base = OTHER; note = 2' fluoro-modified nucleoside
  modified_base 8: mod_base = OTHER; note = 2' fluoro-modified nucleoside
  modified_base 9: mod_base = OTHER; note = 2' fluoro-modified nucleoside
  modified_base 10: mod_base = OTHER; note = 2' O-methyl modified nucleoside
  modified_base 11: mod_base = OTHER; note = 2' O-methyl modified nucleoside
  modified_base 12: mod_base = OTHER; note = 2' O-methyl modified nucleoside
  modified_base 13: mod_base = OTHER; note = 2' O-methyl modified nucleoside
  modified_base 14: mod_base = OTHER; note = 2' O-methyl modified nucleoside
  modified_base 15: mod_base = OTHER; note = 2' O-methyl modified nucleoside
  modified_base 16: mod_base = OTHER; note = 2' O-methyl modified nucleoside
  modified_base 17: mod_base = OTHER; note = 2' O-methyl modified nucleoside
  modified_base 18: mod_base = OTHER; note = 2' O-methyl modified nucleoside
  modified_base 19: mod_base = OTHER; note = 2' O-methyl modified nucleoside
  modified_base 19..20: mod_base = OTHER; note = Phosphorothioate linkage
  modified_base 20: mod_base = OTHER; note = 2' O-methyl modified nucleoside
  modified_base 20..21: mod_base = OTHER; note = Phosphorothioate linkage
  modified_base 21: mod_base = OTHER; note = 2' O-methyl modified nucleoside
  source 1..21: mol_type = other RNA
ctgagtatagccactttgttt

SEQ ID NO: 11406 - RNA, 21 nt, synthetic construct
  misc_feature 1..21: note = Description of Artificial Sequence: Synthetic oligonucleotide
  modified_base 1: mod_base = OTHER; note = 2' O-methyl modified nucleoside
  modified_base 1..2: mod_base = OTHER; note = Phosphorothioate linkage
  modified_base 2: mod_base = OTHER; note = 2' O-methyl modified nucleoside
  modified_base 2..3: mod_base = OTHER; note = Phosphorothioate linkage
  modified_base 3: mod_base = OTHER; note = 2' O-methyl modified nucleoside
  modified_base 4: mod_base = OTHER; note = 2' O-methyl modified nucleoside
  modified_base 5: mod_base = OTHER; note = 2' fluoro-modified nucleoside
  modified_base 6: mod_base = OTHER; note = 2' O-methyl modified nucleoside
  modified_base 7: mod_base = OTHER; note = 2' fluoro-modified nucleoside
  modified_base 8: mod_base = OTHER; note = 2' fluoro-modified nucleoside
  modified_base 9: mod_base = OTHER; note = 2' fluoro-modified nucleoside
  modified_base 10: mod_base = OTHER; note = 2' O-methyl modified nucleoside
  modified_base 11: mod_base = OTHER; note = 2' O-methyl modified nucleoside
  modified_base 12: mod_base = OTHER; note = 2' O-methyl modified nucleoside
  modified_base 13: mod_base = OTHER; note = 2' O-methyl modified nucleoside
  modified_base 14: mod_base = OTHER; note = 2' O-methyl modified nucleoside
  modified_base 15: mod_base = OTHER; note = 2' O-methyl modified nucleoside
  modified_base 16: mod_base = OTHER; note = 2' O-methyl modified nucleoside
  modified_base 17: mod_base = OTHER; note = 2' O-methyl modified nucleoside
  modified_base 18: mod_base = OTHER; note = 2' O-methyl modified nucleoside
  modified_base 19: mod_base = OTHER; note = 2' O-methyl modified nucleoside
  modified_base 19..20: mod_base = OTHER; note = Phosphorothioate linkage
  modified_base 20: mod_base = OTHER; note = 2' O-methyl modified nucleoside
  modified_base 20..21: mod_base = OTHER; note = Phosphorothioate linkage
  modified_base 21: mod_base = OTHER; note = 2' O-methyl modified nucleoside
  source 1..21: mol_type = other RNA
ttgggcaatgaactcaacatt

SEQ ID NO: 11407 - RNA, 21 nt, synthetic construct
  misc_feature 1..21: note = Description of Artificial Sequence: Synthetic oligonucleotide
  modified_base 1: mod_base = OTHER; note = 2' O-methyl modified nucleoside
  modified_base 1..2: mod_base = OTHER; note = Phosphorothioate linkage
  modified_base 2: mod_base = OTHER; note = 2' O-methyl modified nucleoside
  modified_base 2..3: mod_base = OTHER; note = Phosphorothioate linkage
  modified_base 3: mod_base = OTHER; note = 2' O-methyl modified nucleoside
  modified_base 4: mod_base = OTHER; note = 2' O-methyl modified nucleoside
  modified_base 5: mod_base = OTHER; note = 2' fluoro-modified nucleoside
  modified_base 6: mod_base = OTHER; note = 2' O-methyl modified nucleoside
  modified_base 7: mod_base = OTHER; note = 2' fluoro-modified nucleoside
  modified_base 8: mod_base = OTHER; note = 2' fluoro-modified nucleoside
  modified_base 9: mod_base = OTHER; note = 2' fluoro-modified nucleoside
  modified_base 10: mod_base = OTHER; note = 2' O-methyl modified nucleoside
  modified_base 11: mod_base = OTHER; note = 2' O-methyl modified nucleoside
  modified_base 12: mod_base = OTHER; note = 2' O-methyl modified nucleoside
  modified_base 13: mod_base = OTHER; note = 2' O-methyl modified nucleoside
  modified_base 14: mod_base = OTHER; note = 2' O-methyl modified nucleoside
  modified_base 15: mod_base = OTHER; note = 2' O-methyl modified nucleoside
  modified_base 16: mod_base = OTHER; note = 2' O-methyl modified nucleoside
  modified_base 17: mod_base = OTHER; note = 2' O-methyl modified nucleoside
  modified_base 18: mod_base = OTHER; note = 2' O-methyl modified nucleoside
  modified_base 19: mod_base = OTHER; note = 2' O-methyl modified nucleoside
  modified_base 19..20: mod_base = OTHER; note = Phosphorothioate linkage
  modified_base 20: mod_base = OTHER; note = 2' O-methyl modified nucleoside
  modified_base 20..21: mod_base = OTHER; note = Phosphorothioate linkage
  modified_base 21: mod_base = OTHER; note = 2' O-methyl modified nucleoside
  source 1..21: mol_type = other RNA
cataacaacacagccttcatt

SEQ ID NO: 11408 - RNA, 21 nt, synthetic construct
  misc_feature 1..21: note = Description of Artificial Sequence: Synthetic oligonucleotide
  modified_base 1: mod_base = OTHER; note = 2' O-methyl modified nucleoside
  modified_base 1..2: mod_base = OTHER; note = Phosphorothioate linkage
  modified_base 2: mod_base = OTHER; note = 2' O-methyl modified nucleoside
  modified_base 2..3: mod_base = OTHER; note = Phosphorothioate linkage
  modified_base 3: mod_base = OTHER; note = 2' O-methyl modified nucleoside
  modified_base 4: mod_base = OTHER; note = 2' O-methyl modified nucleoside
  modified_base 5: mod_base = OTHER; note = 2' fluoro-modified nucleoside
  modified_base 6: mod_base = OTHER; note = 2' O-methyl modified nucleoside
  modified_base 7: mod_base = OTHER; note = 2' fluoro-modified nucleoside
  modified_base 8: mod_base = OTHER; note = 2' fluoro-modified nucleoside
  modified_base 9: mod_base = OTHER; note = 2' fluoro-modified nucleoside
  modified_base 10: mod_base = OTHER; note = 2' O-methyl modified nucleoside
  modified_base 11: mod_base = OTHER; note = 2' O-methyl modified nucleoside
  modified_base 12: mod_base = OTHER; note = 2' O-methyl modified nucleoside
  modified_base 13: mod_base = OTHER; note = 2' O-methyl modified nucleoside
  modified_base 14: mod_base = OTHER; note = 2' O-methyl modified nucleoside
  modified_base 15: mod_base = OTHER; note = 2' O-methyl modified nucleoside
  modified_base 16: mod_base = OTHER; note = 2' O-methyl modified nucleoside
  modified_base 17: mod_base = OTHER; note = 2' O-methyl modified nucleoside
  modified_base 18: mod_base = OTHER; note = 2' O-methyl modified nucleoside
  modified_base 19: mod_base = OTHER; note = 2' O-methyl modified nucleoside
  modified_base 19..20: mod_base = OTHER; note = Phosphorothioate linkage
  modified_base 20: mod_base = OTHER; note = 2' O-methyl modified nucleoside
  modified_base 20..21: mod_base = OTHER; note = Phosphorothioate linkage
  modified_base 21: mod_base = OTHER; note = 2' O-methyl modified nucleoside
  source 1..21: mol_type = other RNA
tatgtaccaaggatgttactt

SEQ ID NO: 11409 - RNA, 21 nt, synthetic construct
  misc_feature 1..21: note = Description of Artificial Sequence: Synthetic oligonucleotide
  modified_base 1: mod_base = OTHER; note = 2' O-methyl modified nucleoside
  modified_base 1..2: mod_base = OTHER; note = Phosphorothioate linkage
  modified_base 2: mod_base = OTHER; note = 2' O-methyl modified nucleoside
  modified_base 2..3: mod_base = OTHER; note = Phosphorothioate linkage
  modified_base 3: mod_base = OTHER; note = 2' O-methyl modified nucleoside
  modified_base 4: mod_base = OTHER; note = 2' O-methyl modified nucleoside
  modified_base 5: mod_base = OTHER; note = 2' fluoro-modified nucleoside
  modified_base 6: mod_base = OTHER; note = 2' O-methyl modified nucleoside
  modified_base 7: mod_base = OTHER; note = 2' fluoro-modified nucleoside
  modified_base 8: mod_base = OTHER; note = 2' fluoro-modified nucleoside
  modified_base 9: mod_base = OTHER; note = 2' fluoro-modified nucleoside
  modified_base 10: mod_base = OTHER; note = 2' O-methyl modified nucleoside
  modified_base 11: mod_base = OTHER; note = 2' O-methyl modified nucleoside
  modified_base 12: mod_base = OTHER; note = 2' O-methyl modified nucleoside
  modified_base 13: mod_base = OTHER; note = 2' O-methyl modified nucleoside
  modified_base 14: mod_base = OTHER; note = 2' O-methyl modified nucleoside
  modified_base 15: mod_base = OTHER; note = 2' O-methyl modified nucleoside
  modified_base 16: mod_base = OTHER; note = 2' O-methyl modified nucleoside
  modified_base 17: mod_base = OTHER; note = 2' O-methyl modified nucleoside
  modified_base 18: mod_base = OTHER; note = 2' O-methyl modified nucleoside
  modified_base 19: mod_base = OTHER; note = 2' O-methyl modified nucleoside
  modified_base 19..20: mod_base = OTHER; note = Phosphorothioate linkage
  modified_base 20: mod_base = OTHER; note = 2' O-methyl modified nucleoside
  modified_base 20..21: mod_base = OTHER; note = Phosphorothioate linkage
  modified_base 21: mod_base = OTHER; note = 2' O-methyl modified nucleoside
  source 1..21: mol_type = other RNA
taccaaggatgttacagtatt

SEQ ID NO: 11410 - RNA, 21 nt, synthetic construct
  misc_feature 1..21: note = Description of Artificial Sequence: Synthetic oligonucleotide
  modified_base 1: mod_base = OTHER; note = 2' O-methyl modified nucleoside
  modified_base 1..2: mod_base = OTHER; note = Phosphorothioate linkage
  modified_base 2: mod_base = OTHER; note = 2' O-methyl modified nucleoside
  modified_base 2..3: mod_base = OTHER; note = Phosphorothioate linkage
  modified_base 3: mod_base = OTHER; note = 2' O-methyl modified nucleoside
  modified_base 4: mod_base = OTHER; note = 2' O-methyl modified nucleoside
  modified_base 5: mod_base = OTHER; note = 2' fluoro-modified nucleoside
  modified_base 6: mod_base = OTHER; note = 2' O-methyl modified nucleoside
  modified_base 7: mod_base = OTHER; note = 2' fluoro-modified nucleoside
  modified_base 8: mod_base = OTHER; note = 2' fluoro-modified nucleoside
  modified_base 9: mod_base = OTHER; note = 2' fluoro-modified nucleoside
  modified_base 10: mod_base = OTHER; note = 2' O-methyl modified nucleoside
  modified_base 11: mod_base = OTHER; note = 2' O-methyl modified nucleoside
  modified_base 12: mod_base = OTHER; note = 2' O-methyl modified nucleoside
  modified_base 13: mod_base = OTHER; note = 2' O-methyl modified nucleoside
  modified_base 14: mod_base = OTHER; note = 2' O-methyl modified nucleoside
  modified_base 15: mod_base = OTHER; note = 2' O-methyl modified nucleoside
  modified_base 16: mod_base = OTHER; note = 2' O-methyl modified nucleoside
  modified_base 17: mod_base = OTHER; note = 2' O-methyl modified nucleoside
  modified_base 18: mod_base = OTHER; note = 2' O-methyl modified nucleoside
  modified_base 19: mod_base = OTHER; note = 2' O-methyl modified nucleoside
  modified_base 19..20: mod_base = OTHER; note = Phosphorothioate linkage
  modified_base 20: mod_base = OTHER; note = 2' O-methyl modified nucleoside
  modified_base 20..21: mod_base = OTHER; note = Phosphorothioate linkage
  modified_base 21: mod_base = OTHER; note = 2' O-methyl modified nucleoside
  source 1..21: mol_type = other RNA
gatgttacagtaaacaggatt

SEQ ID NO: 11411 - RNA, 21 nt, synthetic construct
  misc_feature 1..21: note = Description of Artificial Sequence: Synthetic oligonucleotide
  modified_base 1: mod_base = OTHER; note = 2' O-methyl modified nucleoside
  modified_base 1..2: mod_base = OTHER; note = Phosphorothioate linkage
  modified_base 2: mod_base = OTHER; note = 2' O-methyl modified nucleoside
  modified_base 2..3: mod_base = OTHER; note = Phosphorothioate linkage
  modified_base 3: mod_base = OTHER; note = 2' O-methyl modified nucleoside
  modified_base 4: mod_base = OTHER; note = 2' O-methyl modified nucleoside
  modified_base 5: mod_base = OTHER; note = 2' fluoro-modified nucleoside
  modified_base 6: mod_base = OTHER; note = 2' O-methyl modified nucleoside
  modified_base 7: mod_base = OTHER; note = 2' fluoro-modified nucleoside
  modified_base 8: mod_base = OTHER; note = 2' fluoro-modified nucleoside
  modified_base 9: mod_base = OTHER; note = 2' fluoro-modified nucleoside
  modified_base 10: mod_base = OTHER; note = 2' O-methyl modified nucleoside
  modified_base 11: mod_base = OTHER; note = 2' O-methyl modified nucleoside
  modified_base 12: mod_base = OTHER; note = 2' O-methyl modified nucleoside
  modified_base 13: mod_base = OTHER; note = 2' O-methyl modified nucleoside
  modified_base 14: mod_base = OTHER; note = 2' O-methyl modified nucleoside
  modified_base 15: mod_base = OTHER; note = 2' O-methyl modified nucleoside
  modified_base 16: mod_base = OTHER; note = 2' O-methyl modified nucleoside
  modified_base 17: mod_base = OTHER; note = 2' O-methyl modified nucleoside
  modified_base 18: mod_base = OTHER; note = 2' O-methyl modified nucleoside
  modified_base 19: mod_base = OTHER; note = 2' O-methyl modified nucleoside
  modified_base 19..20: mod_base = OTHER; note = Phosphorothioate linkage
  modified_base 20: mod_base = OTHER; note = 2' O-methyl modified nucleoside
  modified_base 20..21: mod_base = OTHER; note = Phosphorothioate linkage
  modified_base 21: mod_base = OTHER; note = 2' O-methyl modified nucleoside
  source 1..21: mol_type = other RNA
tgttacagtaaacaggatgtt

SEQ ID NO: 11412 - RNA, 21 nt, synthetic construct
  misc_feature 1..21: note = Description of Artificial Sequence: Synthetic oligonucleotide
  modified_base 1: mod_base = OTHER; note = 2' O-methyl modified nucleoside
  modified_base 1..2: mod_base = OTHER; note = Phosphorothioate linkage
  modified_base 2: mod_base = OTHER; note = 2' O-methyl modified nucleoside
  modified_base 2..3: mod_base = OTHER; note = Phosphorothioate linkage
  modified_base 3: mod_base = OTHER; note = 2' O-methyl modified nucleoside
  modified_base 4: mod_base = OTHER; note = 2' O-methyl modified nucleoside
  modified_base 5: mod_base = OTHER; note = 2' fluoro-modified nucleoside
  modified_base 6: mod_base = OTHER; note = 2' O-methyl modified nucleoside
  modified_base 7: mod_base = OTHER; note = 2' fluoro-modified nucleoside
  modified_base 8: mod_base = OTHER; note = 2' fluoro-modified nucleoside
  modified_base 9: mod_base = OTHER; note = 2' fluoro-modified nucleoside
  modified_base 10: mod_base = OTHER; note = 2' O-methyl modified nucleoside
  modified_base 11: mod_base = OTHER; note = 2' O-methyl modified nucleoside
  modified_base 12: mod_base = OTHER; note = 2' O-methyl modified nucleoside
  modified_base 13: mod_base = OTHER; note = 2' O-methyl modified nucleoside
  modified_base 14: mod_base = OTHER; note = 2' O-methyl modified nucleoside
  modified_base 15: mod_base = OTHER; note = 2' O-methyl modified nucleoside
  modified_base 16: mod_base = OTHER; note = 2' O-methyl modified nucleoside
  modified_base 17: mod_base = OTHER; note = 2' O-methyl modified nucleoside
  modified_base 18: mod_base = OTHER; note = 2' O-methyl modified nucleoside
  modified_base 19: mod_base = OTHER; note = 2' O-methyl modified nucleoside
  modified_base 19..20: mod_base = OTHER; note = Phosphorothioate linkage
  modified_base 20: mod_base = OTHER; note = 2' O-methyl modified nucleoside
  modified_base 20..21: mod_base = OTHER; note = Phosphorothioate linkage
  modified_base 21: mod_base = OTHER; note = 2' O-methyl modified nucleoside
  source 1..21: mol_type = other RNA
tgctaaaaagaaccatatttt

SEQ ID NO: 11413 - RNA, 21 nt, synthetic construct
  misc_feature 1..21: note = Description of Artificial Sequence: Synthetic oligonucleotide
  modified_base 1: mod_base = OTHER; note = 2' O-methyl modified nucleoside
  modified_base 1..2: mod_base = OTHER; note = Phosphorothioate linkage
  modified_base 2: mod_base = OTHER; note = 2' O-methyl modified nucleoside
  modified_base 2..3: mod_base = OTHER; note = Phosphorothioate linkage
  modified_base 3: mod_base = OTHER; note = 2' O-methyl modified nucleoside
  modified_base 4: mod_base = OTHER; note = 2' O-methyl modified nucleoside
  modified_base 5: mod_base = OTHER; note = 2' fluoro-modified nucleoside
  modified_base 6: mod_base = OTHER; note = 2' O-methyl modified nucleoside
  modified_base 7: mod_base = OTHER; note = 2' fluoro-modified nucleoside
  modified_base 8: mod_base = OTHER; note = 2' fluoro-modified nucleoside
  modified_base 9: mod_base = OTHER; note = 2' fluoro-modified nucleoside
  modified_base 10: mod_base = OTHER; note = 2' O-methyl modified nucleoside
  modified_base 11: mod_base = OTHER; note = 2' O-methyl modified nucleoside
  modified_base 12: mod_base = OTHER; note = 2' O-methyl modified nucleoside
  modified_base 13: mod_base = OTHER; note = 2' O-methyl modified nucleoside
  modified_base 14: mod_base = OTHER; note = 2' O-methyl modified nucleoside
  modified_base 15: mod_base = OTHER; note = 2' O-methyl modified nucleoside
  modified_base 16: mod_base = OTHER; note = 2' O-methyl modified nucleoside
  modified_base 17: mod_base = OTHER; note = 2' O-methyl modified nucleoside
  modified_base 18: mod_base = OTHER; note = 2' O-methyl modified nucleoside
  modified_base 19: mod_base = OTHER; note = 2' O-methyl modified nucleoside
  modified_base 19..20: mod_base = OTHER; note = Phosphorothioate linkage
  modified_base 20: mod_base = OTHER; note = 2' O-methyl modified nucleoside
  modified_base 20..21: mod_base = OTHER; note = Phosphorothioate linkage
  modified_base 21: mod_base = OTHER; note = 2' O-methyl modified nucleoside
  source 1..21: mol_type = other RNA
ggcctttgagtgttagagatt

SEQ ID NO: 11414 - RNA, 21 nt, synthetic construct
  misc_feature 1..21: note = Description of Artificial Sequence: Synthetic oligonucleotide
  modified_base 1: mod_base = OTHER; note = 2' O-methyl modified nucleoside
  modified_base 1..2: mod_base = OTHER; note = Phosphorothioate linkage
  modified_base 2: mod_base = OTHER; note = 2' O-methyl modified nucleoside
  modified_base 2..3: mod_base = OTHER; note = Phosphorothioate linkage
  modified_base 3: mod_base = OTHER; note = 2' O-methyl modified nucleoside
  modified_base 4: mod_base = OTHER; note = 2' O-methyl modified nucleoside
  modified_base 5: mod_base = OTHER; note = 2' fluoro-modified nucleoside
  modified_base 6: mod_base = OTHER; note = 2' O-methyl modified nucleoside
  modified_base 7: mod_base = OTHER; note = 2' fluoro-modified nucleoside
  modified_base 8: mod_base = OTHER; note = 2' fluoro-modified nucleoside
  modified_base 9: mod_base = OTHER; note = 2' fluoro-modified nucleoside
  modified_base 10: mod_base = OTHER; note = 2' O-methyl modified nucleoside
  modified_base 11: mod_base = OTHER; note = 2' O-methyl modified nucleoside
  modified_base 12: mod_base = OTHER; note = 2' O-methyl modified nucleoside
  modified_base 13: mod_base = OTHER; note = 2' O-methyl modified nucleoside
  modified_base 14: mod_base = OTHER; note = 2' O-methyl modified nucleoside
  modified_base 15: mod_base = OTHER; note = 2' O-methyl modified nucleoside
  modified_base 16: mod_base = OTHER; note = 2' O-methyl modified nucleoside
  modified_base 17: mod_base = OTHER; note = 2' O-methyl modified nucleoside
  modified_base 18: mod_base = OTHER; note = 2' O-methyl modified nucleoside
  modified_base 19: mod_base = OTHER; note = 2' O-methyl modified nucleoside
  modified_base 19..20: mod_base = OTHER; note = Phosphorothioate linkage
  modified_base 20: mod_base = OTHER; note = 2' O-methyl modified nucleoside
  modified_base 20..21: mod_base = OTHER; note = Phosphorothioate linkage
  modified_base 21: mod_base = OTHER; note = 2' O-methyl modified nucleoside
  source 1..21: mol_type = other RNA
ggcacaaaactgccttaaatt

SEQ ID NO: 11415 - RNA, 21 nt, synthetic construct
  misc_feature 1..21: note = Description of Artificial Sequence: Synthetic oligonucleotide
  modified_base 1: mod_base = OTHER; note = 2' O-methyl modified nucleoside
  modified_base 1..2: mod_base = OTHER; note = Phosphorothioate linkage
  modified_base 2: mod_base = OTHER; note = 2' O-methyl modified nucleoside
  modified_base 2..3: mod_base = OTHER; note = Phosphorothioate linkage
  modified_base 3: mod_base = OTHER; note = 2' O-methyl modified nucleoside
  modified_base 4: mod_base = OTHER; note = 2' O-methyl modified nucleoside
  modified_base 5: mod_base = OTHER; note = 2' fluoro-modified nucleoside
  modified_base 6: mod_base = OTHER; note = 2' O-methyl modified nucleoside
  modified_base 7: mod_base = OTHER; note = 2' fluoro-modified nucleoside
  modified_base 8: mod_base = OTHER; note = 2' fluoro-modified nucleoside
  modified_base 9: mod_base = OTHER; note = 2' fluoro-modified nucleoside
  modified_base 10: mod_base = OTHER; note = 2' O-methyl modified nucleoside
  modified_base 11: mod_base = OTHER; note = 2' O-methyl modified nucleoside
  modified_base 12: mod_base = OTHER; note = 2' O-methyl modified nucleoside
  modified_base 13: mod_base = OTHER; note = 2' O-methyl modified nucleoside
  modified_base 14: mod_base = OTHER; note = 2' O-methyl modified nucleoside
  modified_base 15: mod_base = OTHER; note = 2' O-methyl modified nucleoside
  modified_base 16: mod_base = OTHER; note = 2' O-methyl modified nucleoside
  modified_base 17: mod_base = OTHER; note = 2' O-methyl modified nucleoside
  modified_base 18: mod_base = OTHER; note = 2' O-methyl modified nucleoside
  modified_base 19: mod_base = OTHER; note = 2' O-methyl modified nucleoside
  modified_base 19..20: mod_base = OTHER; note = Phosphorothioate linkage
  modified_base 20: mod_base = OTHER; note = 2' O-methyl modified nucleoside
  modified_base 20..21: mod_base = OTHER; note = Phosphorothioate linkage
  modified_base 21: mod_base = OTHER; note = 2' O-methyl modified nucleoside
  source 1..21: mol_type = other RNA
gtaagaaacaagctcaaggtt

SEQ ID NO: 11416 - RNA, 21 nt, synthetic construct
  misc_feature 1..21: note = Description of Artificial Sequence: Synthetic oligonucleotide
  modified_base 1: mod_base = OTHER; note = 2' O-methyl modified nucleoside
  modified_base 1..2: mod_base = OTHER; note = Phosphorothioate linkage
  modified_base 2: mod_base = OTHER; note = 2' O-methyl modified nucleoside
  modified_base 2..3: mod_base = OTHER; note = Phosphorothioate linkage
  modified_base 3: mod_base = OTHER; note = 2' O-methyl modified nucleoside
  modified_base 4: mod_base = OTHER; note = 2' O-methyl modified nucleoside
  modified_base 5: mod_base = OTHER; note = 2' fluoro-modified nucleoside
  modified_base 6: mod_base = OTHER; note = 2' O-methyl modified nucleoside
  modified_base 7: mod_base = OTHER; note = 2' fluoro-modified nucleoside
  modified_base 8: mod_base = OTHER; note = 2' fluoro-modified nucleoside
  modified_base 9: mod_base = OTHER; note = 2' fluoro-modified nucleoside
  modified_base 10: mod_base = OTHER; note = 2' O-methyl modified nucleoside
  modified_base 11: mod_base = OTHER; note = 2' O-methyl modified nucleoside
  modified_base 12: mod_base = OTHER; note = 2' O-methyl modified nucleoside
  modified_base 13: mod_base = OTHER; note = 2' O-methyl modified nucleoside
  modified_base 14: mod_base = OTHER; note = 2' O-methyl modified nucleoside
  modified_base 15: mod_base = OTHER; note = 2' O-methyl modified nucleoside
  modified_base 16: mod_base = OTHER; note = 2' O-methyl modified nucleoside
  modified_base 17: mod_base = OTHER; note = 2' O-methyl modified nucleoside
  modified_base 18: mod_base = OTHER; note = 2' O-methyl modified nucleoside
  modified_base 19: mod_base = OTHER; note = 2' O-methyl modified nucleoside
  modified_base 19..20: mod_base = OTHER; note = Phosphorothioate linkage
  modified_base 20: mod_base = OTHER; note = 2' O-methyl modified nucleoside
  modified_base 20..21: mod_base = OTHER; note = Phosphorothioate linkage
  modified_base 21: mod_base = OTHER; note = 2' O-methyl modified nucleoside
  source 1..21: mol_type = other RNA
aaaactgaaggtagatggttt

SEQ ID NO: 11417 - RNA, 21 nt, synthetic construct
  misc_feature 1..21: note = Description of Artificial Sequence: Synthetic oligonucleotide
  modified_base 1: mod_base = OTHER; note = 2' O-methyl modified nucleoside
  modified_base 1..2: mod_base = OTHER; note = Phosphorothioate linkage
  modified_base 2: mod_base = OTHER; note = 2' O-methyl modified nucleoside
  modified_base 2..3: mod_base = OTHER; note = Phosphorothioate linkage
  modified_base 3: mod_base = OTHER; note = 2' O-methyl modified nucleoside
  modified_base 4: mod_base = OTHER; note = 2' O-methyl modified nucleoside
  modified_base 5: mod_base = OTHER; note = 2' fluoro-modified nucleoside
  modified_base 6: mod_base = OTHER; note = 2' O-methyl modified nucleoside
  modified_base 7: mod_base = OTHER; note = 2' fluoro-modified nucleoside
  modified_base 8: mod_base = OTHER; note = 2' fluoro-modified nucleoside
  modified_base 9: mod_base = OTHER; note = 2' fluoro-modified nucleoside
  modified_base 10: mod_base = OTHER; note = 2' O-methyl modified nucleoside
  modified_base 11: mod_base = OTHER; note = 2' O-methyl modified nucleoside
  modified_base 12: mod_base = OTHER; note = 2' O-methyl modified nucleoside
  modified_base 13: mod_base = OTHER; note = 2' O-methyl modified nucleoside
  modified_base 14: mod_base = OTHER; note = 2' O-methyl modified nucleoside
  modified_base 15: mod_base = OTHER; note = 2' O-methyl modified nucleoside
  modified_base 16: mod_base = OTHER; note = 2' O-methyl modified nucleoside
  modified_base 17: mod_base = OTHER; note = 2' O-methyl modified nucleoside
  modified_base 18: mod_base = OTHER; note = 2' O-methyl modified nucleoside
  modified_base 19: mod_base = OTHER; note = 2' O-methyl modified nucleoside
  modified_base 19..20: mod_base = OTHER; note = Phosphorothioate linkage
  modified_base 20: mod_base = OTHER; note = 2' O-methyl modified nucleoside
  modified_base 20..21: mod_base = OTHER; note = Phosphorothioate linkage
  modified_base 21: mod_base = OTHER; note = 2' O-methyl modified nucleoside
  source 1..21: mol_type = other RNA
aactgaaggtagatggtgttt

SEQ ID NO: 11418 - RNA, 21 nt, synthetic construct
  misc_feature 1..21: note = Description of Artificial Sequence: Synthetic oligonucleotide
  modified_base 1: mod_base = OTHER; note = 2' O-methyl modified nucleoside
  modified_base 1..2: mod_base = OTHER; note = Phosphorothioate linkage
  modified_base 2: mod_base = OTHER; note = 2' O-methyl modified nucleoside
  modified_base 2..3: mod_base = OTHER; note = Phosphorothioate linkage
  modified_base 3: mod_base = OTHER; note = 2' O-methyl modified nucleoside
  modified_base 4: mod_base = OTHER; note = 2' O-methyl modified nucleoside
  modified_base 5: mod_base = OTHER; note = 2' fluoro-modified nucleoside
  modified_base 6: mod_base = OTHER; note = 2' O-methyl modified nucleoside
  modified_base 7: mod_base = OTHER; note = 2' fluoro-modified nucleoside
  modified_base 8: mod_base = OTHER; note = 2' fluoro-modified nucleoside
  modified_base 9: mod_base = OTHER; note = 2' fluoro-modified nucleoside
  modified_base 10: mod_base = OTHER; note = 2' O-methyl modified nucleoside
  modified_base 11: mod_base = OTHER; note = 2' O-methyl modified nucleoside
  modified_base 12: mod_base = OTHER; note = 2' O-methyl modified nucleoside
  modified_base 13: mod_base = OTHER; note = 2' O-methyl modified nucleoside
  modified_base 14: mod_base = OTHER; note = 2' O-methyl modified nucleoside
  modified_base 15: mod_base = OTHER; note = 2' O-methyl modified nucleoside
  modified_base 16: mod_base = OTHER; note = 2' O-methyl modified nucleoside
  modified_base 17: mod_base = OTHER; note = 2' O-methyl modified nucleoside
  modified_base 18: mod_base = OTHER; note = 2' O-methyl modified nucleoside
  modified_base 19: mod_base = OTHER; note = 2' O-methyl modified nucleoside
  modified_base 19..20: mod_base = OTHER; note = Phosphorothioate linkage
  modified_base 20: mod_base = OTHER; note = 2' O-methyl modified nucleoside
  modified_base 20..21: mod_base = OTHER; note = Phosphorothioate linkage
  modified_base 21: mod_base = OTHER; note = 2' O-methyl modified nucleoside
  source 1..21: mol_type = other RNA
atggtgttatagttaataatt

SEQ ID NO: 11419 - RNA, 21 nt, synthetic construct
  misc_feature 1..21: note = Description of Artificial Sequence: Synthetic oligonucleotide
  modified_base 1: mod_base = OTHER; note = 2' O-methyl modified nucleoside
  modified_base 1..2: mod_base = OTHER; note = Phosphorothioate linkage
  modified_base 2: mod_base = OTHER; note = 2' O-methyl modified nucleoside
  modified_base 2..3: mod_base = OTHER; note = Phosphorothioate linkage
  modified_base 3: mod_base = OTHER; note = 2' O-methyl modified nucleoside
  modified_base 4: mod_base = OTHER; note = 2' O-methyl modified nucleoside
  modified_base 5: mod_base = OTHER; note = 2' fluoro-modified nucleoside
  modified_base 6: mod_base = OTHER; note = 2' O-methyl modified nucleoside
  modified_base 7: mod_base = OTHER; note = 2' fluoro-modified nucleoside
  modified_base 8: mod_base = OTHER; note = 2' fluoro-modified nucleoside
  modified_base 9: mod_base = OTHER; note = 2' fluoro-modified nucleoside
  modified_base 10: mod_base = OTHER; note = 2' O-methyl modified nucleoside
  modified_base 11: mod_base = OTHER; note = 2' O-methyl modified nucleoside
  modified_base 12: mod_base = OTHER; note = 2' O-methyl modified nucleoside
  modified_base 13: mod_base = OTHER; note = 2' O-methyl modified nucleoside
  modified_base 14: mod_base = OTHER; note = 2' O-methyl modified nucleoside
  modified_base 15: mod_base = OTHER; note = 2' O-methyl modified nucleoside
  modified_base 16: mod_base = OTHER; note = 2' O-methyl modified nucleoside
  modified_base 17: mod_base = OTHER; note = 2' O-methyl modified nucleoside
  modified_base 18: mod_base = OTHER; note = 2' O-methyl modified nucleoside
  modified_base 19: mod_base = OTHER; note = 2' O-methyl modified nucleoside
  modified_base 19..20: mod_base = OTHER; note = Phosphorothioate linkage
  modified_base 20: mod_base = OTHER; note = 2' O-methyl modified nucleoside
  modified_base 20..21: mod_base = OTHER; note = Phosphorothioate linkage
  modified_base 21: mod_base = OTHER; note = 2' O-methyl modified nucleoside
  source 1..21: mol_type = other RNA
tttccttctacaataaacatt

SEQ ID NO: 11420 - RNA, 21 nt, synthetic construct
  misc_feature 1..21: note = Description of Artificial Sequence: Synthetic oligonucleotide
  modified_base 1: mod_base = OTHER; note = 2' O-methyl modified nucleoside
  modified_base 1..2: mod_base = OTHER; note = Phosphorothioate linkage
  modified_base 2: mod_base = OTHER; note = 2' O-methyl modified nucleoside
  modified_base 2..3: mod_base = OTHER; note = Phosphorothioate linkage
  modified_base 3: mod_base = OTHER; note = 2' O-methyl modified nucleoside
  modified_base 4: mod_base = OTHER; note = 2' O-methyl modified nucleoside
  modified_base 5: mod_base = OTHER; note = 2' fluoro-modified nucleoside
  modified_base 6: mod_base = OTHER; note = 2' O-methyl modified nucleoside
  modified_base 7: mod_base = OTHER; note = 2' fluoro-modified nucleoside
  modified_base 8: mod_base = OTHER; note = 2' fluoro-modified nucleoside
  modified_base 9: mod_base = OTHER; note = 2' fluoro-modified nucleoside
  modified_base 10: mod_base = OTHER; note = 2' O-methyl modified nucleoside
  modified_base 11: mod_base = OTHER; note = 2' O-methyl modified nucleoside
  modified_base 12: mod_base = OTHER; note = 2' O-methyl modified nucleoside
  modified_base 13: mod_base = OTHER; note = 2' O-methyl modified nucleoside
  modified_base 14: mod_base = OTHER; note = 2' O-methyl modified nucleoside
  modified_base 15: mod_base = OTHER; note = 2' O-methyl modified nucleoside
  modified_base 16: mod_base = OTHER; note = 2' O-methyl modified nucleoside
  modified_base 17: mod_base = OTHER; note = 2' O-methyl modified nucleoside
  modified_base 18: mod_base = OTHER; note = 2' O-methyl modified nucleoside
  modified_base 19: mod_base = OTHER; note = 2' O-methyl modified nucleoside
  modified_base 19..20: mod_base = OTHER; note = Phosphorothioate linkage
  modified_base 20: mod_base = OTHER; note = 2' O-methyl modified nucleoside
  modified_base 20..21: mod_base = OTHER; note = Phosphorothioate linkage
  modified_base 21: mod_base = OTHER; note = 2' O-methyl modified nucleoside
  source 1..21: mol_type = other RNA
caatgaactcaacagctattt

SEQ ID NO: 11421 - RNA, 21 nt, synthetic construct
  misc_feature 1..21: note = Description of Artificial Sequence: Synthetic oligonucleotide
  modified_base 1: mod_base = OTHER; note = 2' O-methyl modified nucleoside
  modified_base 1..2: mod_base = OTHER; note = Phosphorothioate linkage
  modified_base 2: mod_base = OTHER; note = 2' O-methyl modified nucleoside
  modified_base 2..3: mod_base = OTHER; note = Phosphorothioate linkage
  modified_base 3: mod_base = OTHER; note = 2' O-methyl modified nucleoside
  modified_base 4: mod_base = OTHER; note = 2' O-methyl modified nucleoside
  modified_base 5: mod_base = OTHER; note = 2' fluoro-modified nucleoside
  modified_base 6: mod_base = OTHER; note = 2' O-methyl modified nucleoside
  modified_base 7: mod_base = OTHER; note = 2' fluoro-modified nucleoside
  modified_base 8: mod_base = OTHER; note = 2' fluoro-modified nucleoside
  modified_base 9: mod_base = OTHER; note = 2' fluoro-modified nucleoside
  modified_base 10: mod_base = OTHER; note = 2' O-methyl modified nucleoside
  modified_base 11: mod_base = OTHER; note = 2' O-methyl modified nucleoside
  modified_base 12: mod_base = OTHER; note = 2' O-methyl modified nucleoside
  modified_base 13: mod_base = OTHER; note = 2' O-methyl modified nucleoside
  modified_base 14: mod_base = OTHER; note = 2' O-methyl modified nucleoside
  modified_base 15: mod_base = OTHER; note = 2' O-methyl modified nucleoside
  modified_base 16: mod_base = OTHER; note = 2' O-methyl modified nucleoside
  modified_base 17: mod_base = OTHER; note = 2' O-methyl modified nucleoside
  modified_base 18: mod_base = OTHER; note = 2' O-methyl modified nucleoside
  modified_base 19: mod_base = OTHER; note = 2' O-methyl modified nucleoside
  modified_base 19..20: mod_base = OTHER; note = Phosphorothioate linkage
  modified_base 20: mod_base = OTHER; note = 2' O-methyl modified nucleoside
  modified_base 20..21: mod_base = OTHER; note = Phosphorothioate linkage
  modified_base 21: mod_base = OTHER; note = 2' O-methyl modified nucleoside
  source 1..21: mol_type = other RNA
tgaaattatcttgagtctatt

SEQ ID NO: 11422 - RNA, 21 nt, synthetic construct
  misc_feature 1..21: note = Description of Artificial Sequence: Synthetic oligonucleotide
  modified_base 1: mod_base = OTHER; note = 2' O-methyl modified nucleoside
  modified_base 1..2: mod_base = OTHER; note = Phosphorothioate linkage
  modified_base 2: mod_base = OTHER; note = 2' fluoro-modified nucleoside
  modified_base 2..3: mod_base = OTHER; note = Phosphorothioate linkage
  modified_base 3: mod_base = OTHER; note = 2' O-methyl modified nucleoside
  modified_base 4: mod_base = OTHER; note = 2' O-methyl modified nucleoside
  modified_base 5: mod_base = OTHER; note = 2' O-methyl modified nucleoside
  modified_base 6: mod_base = OTHER; note = 2' fluoro-modified nucleoside
  modified_base 7: mod_base = OTHER; note = 2' O-methyl modified nucleoside
  modified_base 8: mod_base = OTHER; note = 2' O-methyl modified nucleoside
  modified_base 9: mod_base = OTHER; note = 2' O-methyl modified nucleoside
  modified_base 10: mod_base = OTHER; note = 2' O-methyl modified nucleoside
  modified_base 11: mod_base = OTHER; note = 2' O-methyl modified nucleoside
  modified_base 12: mod_base = OTHER; note = 2' O-methyl modified nucleoside
  modified_base 13: mod_base = OTHER; note = 2' O-methyl modified nucleoside
  modified_base 14: mod_base = OTHER; note = 2' fluoro-modified nucleoside
  modified_base 15: mod_base = OTHER; note = 2' O-methyl modified nucleoside
  modified_base 16: mod_base = OTHER; note = 2' fluoro-modified nucleoside
  modified_base 17: mod_base = OTHER; note = 2' O-methyl modified nucleoside
  modified_base 18: mod_base = OTHER; note = 2' O-methyl modified nucleoside
  modified_base 19: mod_base = OTHER; note = 2' O-methyl modified nucleoside
  modified_base 19..20: mod_base = OTHER; note = Phosphorothioate linkage
  modified_base 20: mod_base = OTHER; note = 2' O-methyl modified nucleoside
  modified_base 20..21: mod_base = OTHER; note = Phosphorothioate linkage
  modified_base 21: mod_base = OTHER; note = 2' O-methyl modified nucleoside
  source 1..21: mol_type = other RNA
ctcgccactttgttgtttttt

SEQ ID NO: 11423 - RNA, 21 nt, synthetic construct
  misc_feature 1..21: note = Description of Artificial Sequence: Synthetic oligonucleotide
  modified_base 1: mod_base = OTHER; note = 2' O-methyl modified nucleoside
  modified_base 1..2: mod_base = OTHER; note = Phosphorothioate linkage
  modified_base 2: mod_base = OTHER; note = 2' fluoro-modified nucleoside
  modified_base 2..3: mod_base = OTHER; note = Phosphorothioate linkage
  modified_base 3: mod_base = OTHER; note = 2' O-methyl modified nucleoside
  modified_base 4: mod_base = OTHER; note = 2' O-methyl modified nucleoside
  modified_base 5: mod_base = OTHER; note = 2' O-methyl modified nucleoside
  modified_base 6: mod_base = OTHER; note = 2' fluoro-modified nucleoside
  modified_base 7: mod_base = OTHER; note = 2' O-methyl modified nucleoside
  modified_base 8: mod_base = OTHER; note = 2' O-methyl modified nucleoside
  modified_base 9: mod_base = OTHER; note = 2' O-methyl modified nucleoside
  modified_base 10: mod_base = OTHER; note = 2' O-methyl modified nucleoside
  modified_base 11: mod_base = OTHER; note = 2' O-methyl modified nucleoside
  modified_base 12: mod_base = OTHER; note = 2' O-methyl modified nucleoside
  modified_base 13: mod_base = OTHER; note = 2' O-methyl modified nucleoside
  modified_base 14: mod_base = OTHER; note = 2' fluoro-modified nucleoside
  modified_base 15: mod_base = OTHER; note = 2' O-methyl modified nucleoside
  modified_base 16: mod_base = OTHER; note = 2' fluoro-modified nucleoside
  modified_base 17: mod_base = OTHER; note = 2' O-methyl modified nucleoside
  modified_base 18: mod_base = OTHER; note = 2' O-methyl modified nucleoside
  modified_base 19: mod_base = OTHER; note = 2' O-methyl modified nucleoside
  modified_base 19..20: mod_base = OTHER; note = Phosphorothioate linkage
  modified_base 20: mod_base = OTHER; note = 2' O-methyl modified nucleoside
  modified_base 20..21: mod_base = OTHER; note = Phosphorothioate linkage
  modified_base 21: mod_base = OTHER; note = 2' O-methyl modified nucleoside
  source 1..21: mol_type = other RNA
ttttgtgggtttgggtgagtt

SEQ ID NO: 11424 - RNA, 21 nt, synthetic construct
  misc_feature 1..21: note = Description of Artificial Sequence: Synthetic oligonucleotide
  modified_base 1: mod_base = OTHER; note = 2' O-methyl modified nucleoside
  modified_base 1..2: mod_base = OTHER; note = Phosphorothioate linkage
  modified_base 2: mod_base = OTHER; note = 2' fluoro-modified nucleoside
  modified_base 2..3: mod_base = OTHER; note = Phosphorothioate linkage
  modified_base 3: mod_base = OTHER; note = 2' O-methyl modified nucleoside
  modified_base 4: mod_base = OTHER; note = 2' O-methyl modified nucleoside
  modified_base 5: mod_base = OTHER; note = 2' O-methyl modified nucleoside
  modified_base 6: mod_base = OTHER; note = 2' fluoro-modified nucleoside
  modified_base 7: mod_base = OTHER; note = 2' O-methyl modified nucleoside
  modified_base 8: mod_base = OTHER; note = 2' O-methyl modified nucleoside
  modified_base 9: mod_base = OTHER; note = 2' O-methyl modified nucleoside
  modified_base 10: mod_base = OTHER; note = 2' O-methyl modified nucleoside
  modified_base 11: mod_base = OTHER; note = 2' O-methyl modified nucleoside
  modified_base 12: mod_base = OTHER; note = 2' O-methyl modified nucleoside
  modified_base 13: mod_base = OTHER; note = 2' O-methyl modified nucleoside
  modified_base 14: mod_base = OTHER; note = 2' fluoro-modified nucleoside
  modified_base 15: mod_base = OTHER; note = 2' O-methyl modified nucleoside
  modified_base 16: mod_base = OTHER; note = 2' fluoro-modified nucleoside
  modified_base 17: mod_base = OTHER; note = 2' O-methyl modified nucleoside
  modified_base 18: mod_base = OTHER; note = 2' O-methyl modified nucleoside
  modified_base 19: mod_base = OTHER; note = 2' O-methyl modified nucleoside
  modified_base 19..20: mod_base = OTHER; note = Phosphorothioate linkage
  modified_base 20: mod_base = OTHER; note = 2' O-methyl modified nucleoside
  modified_base 20..21: mod_base = OTHER; note = Phosphorothioate linkage
  modified_base 21: mod_base = OTHER; note = 2' O-methyl modified nucleoside
  source 1..21: mol_type = other RNA
atcaggaggaagcttatactt

SEQ ID NO: 11425 - RNA, 21 nt, synthetic construct
  misc_feature 1..21: note = Description of Artificial Sequence: Synthetic oligonucleotide
  modified_base 1: mod_base = OTHER; note = 2' O-methyl modified nucleoside
  modified_base 1..2: mod_base = OTHER; note = Phosphorothioate linkage
  modified_base 2: mod_base = OTHER; note = 2' fluoro-modified nucleoside
  modified_base 2..3: mod_base = OTHER; note = Phosphorothioate linkage
  modified_base 3: mod_base = OTHER; note = 2' O-methyl modified nucleoside
  modified_base 4: mod_base = OTHER; note = 2' O-methyl modified nucleoside
  modified_base 5: mod_base = OTHER; note = 2' O-methyl modified nucleoside
  modified_base 6: mod_base = OTHER; note = 2' fluoro-modified nucleoside
  modified_base 7: mod_base = OTHER; note = 2' O-methyl modified nucleoside
  modified_base 8: mod_base = OTHER; note = 2' O-methyl modified nucleoside
  modified_base 9: mod_base = OTHER; note = 2' O-methyl modified nucleoside
  modified_base 10: mod_base = OTHER; note = 2' O-methyl modified nucleoside
  modified_base 11: mod_base = OTHER; note = 2' O-methyl modified nucleoside
  modified_base 12: mod_base = OTHER; note = 2' O-methyl modified nucleoside
  modified_base 13: mod_base = OTHER; note = 2' O-methyl modified nucleoside
  modified_base 14: mod_base = OTHER; note = 2' fluoro-modified nucleoside
  modified_base 15: mod_base = OTHER; note = 2' O-methyl modified nucleoside
  modified_base 16: mod_base = OTHER; note = 2' fluoro-modified nucleoside
  modified_base 17: mod_base = OTHER; note = 2' O-methyl modified nucleoside
  modified_base 18: mod_base = OTHER; note = 2' O-methyl modified nucleoside
  modified_base 19: mod_base = OTHER; note = 2' O-methyl modified nucleoside
  modified_base 19..20: mod_base = OTHER; note = Phosphorothioate linkage
  modified_base 20: mod_base = OTHER; note = 2' O-methyl modified nucleoside
  modified_base 20..21: mod_base = OTHER; note = Phosphorothioate linkage
  modified_base 21: mod_base = OTHER; note = 2' O-methyl modified nucleoside
  source 1..21: mol_type = other RNA
acaaagtggctatactcagtt

SEQ ID NO: 11426 - RNA, 21 nt, synthetic construct
  misc_feature 1..21: note = Description of Artificial Sequence: Synthetic oligonucleotide
  modified_base 1: mod_base = OTHER; note = 2' O-methyl modified nucleoside
  modified_base 1..2: mod_base = OTHER; note = Phosphorothioate linkage
  modified_base 2: mod_base = OTHER; note = 2' fluoro-modified nucleoside
  modified_base 2..3: mod_base = OTHER; note = Phosphorothioate linkage
  modified_base 3: mod_base = OTHER; note = 2' O-methyl modified nucleoside
  modified_base 4: mod_base = OTHER; note = 2' O-methyl modified nucleoside
  modified_base 5: mod_base = OTHER; note = 2' O-methyl modified nucleoside
  modified_base 6: mod_base = OTHER; note = 2' fluoro-modified nucleoside
  modified_base 7: mod_base = OTHER; note = 2' O-methyl modified nucleoside
  modified_base 8: mod_base = OTHER; note = 2' O-methyl modified nucleoside
  modified_base 9: mod_base = OTHER; note = 2' O-methyl modified nucleoside
  modified_base 10: mod_base = OTHER; note = 2' O-methyl modified nucleoside
  modified_base 11: mod_base = OTHER; note = 2' O-methyl modified nucleoside
  modified_base 12: mod_base = OTHER; note = 2' O-methyl modified nucleoside
  modified_base 13: mod_base = OTHER; note = 2' O-methyl modified nucleoside
  modified_base 14: mod_base = OTHER; note = 2' fluoro-modified nucleoside
  modified_base 15: mod_base = OTHER; note = 2' O-methyl modified nucleoside
  modified_base 16: mod_base = OTHER; note = 2' fluoro-modified nucleoside
  modified_base 17: mod_base = OTHER; note = 2' O-methyl modified nucleoside
  modified_base 18: mod_base = OTHER; note = 2' O-methyl modified nucleoside
  modified_base 19: mod_base = OTHER; note = 2' O-methyl modified nucleoside
  modified_base 19..20: mod_base = OTHER; note = Phosphorothioate linkage
  modified_base 20: mod_base = OTHER; note = 2' O-methyl modified nucleoside
  modified_base 20..21: mod_base = OTHER; note = Phosphorothioate linkage
  modified_base 21: mod_base = OTHER; note = 2' O-methyl modified nucleoside
  source 1..21: mol_type = other RNA
tgttgagttcattgcccaatt

SEQ ID NO: 11427 - RNA, 21 nt, synthetic construct
  misc_feature 1..21: note = Description of Artificial Sequence: Synthetic oligonucleotide
  modified_base 1: mod_base = OTHER; note = 2' O-methyl modified nucleoside
  modified_base 1..2: mod_base = OTHER; note = Phosphorothioate linkage
  modified_base 2: mod_base = OTHER; note = 2' fluoro-modified nucleoside
  modified_base 2..3: mod_base = OTHER; note = Phosphorothioate linkage
  modified_base 3: mod_base = OTHER; note = 2' O-methyl modified nucleoside
  modified_base 4: mod_base = OTHER; note = 2' O-methyl modified nucleoside
  modified_base 5: mod_base = OTHER; note = 2' O-methyl modified nucleoside
  modified_base 6: mod_base = OTHER; note = 2' fluoro-modified nucleoside
  modified_base 7: mod_base = OTHER; note = 2' O-methyl modified nucleoside
  modified_base 8: mod_base = OTHER; note = 2' O-methyl modified nucleoside
  modified_base 9: mod_base = OTHER; note = 2' O-methyl modified nucleoside
  modified_base 10: mod_base = OTHER; note = 2' O-methyl modified nucleoside
  modified_base 11: mod_base = OTHER; note = 2' O-methyl modified nucleoside
  modified_base 12: mod_base = OTHER; note = 2' O-methyl modified nucleoside
  modified_base 13: mod_base = OTHER; note = 2' O-methyl modified nucleoside
  modified_base 14: mod_base = OTHER; note = 2' fluoro-modified nucleoside
  modified_base 15: mod_base = OTHER; note = 2' O-methyl modified nucleoside
  modified_base 16: mod_base = OTHER; note = 2' fluoro-modified nucleoside
  modified_base 17: mod_base = OTHER; note = 2' O-methyl modified nucleoside
  modified_base 18: mod_base = OTHER; note = 2' O-methyl modified nucleoside
  modified_base 19: mod_base = OTHER; note = 2' O-methyl modified nucleoside
  modified_base 19..20: mod_base = OTHER; note = Phosphorothioate linkage
  modified_base 20: mod_base = OTHER; note = 2' O-methyl modified nucleoside
  modified_base 20..21: mod_base = OTHER; note = Phosphorothioate linkage
  modified_base 21: mod_base = OTHER; note = 2' O-methyl modified nucleoside
  source 1..21: mol_type = other RNA
tgaaggctgtgttgttatgtt

SEQ ID NO: 11428 - RNA, 21 nt, synthetic construct
  misc_feature 1..21: note = Description of Artificial Sequence: Synthetic oligonucleotide
  modified_base 1: mod_base = OTHER; note = 2' O-methyl modified nucleoside
  modified_base 1..2: mod_base = OTHER; note = Phosphorothioate linkage
  modified_base 2: mod_base = OTHER; note = 2' fluoro-modified nucleoside
  modified_base 2..3: mod_base = OTHER; note = Phosphorothioate linkage
  modified_base 3: mod_base = OTHER; note = 2' O-methyl modified nucleoside
  modified_base 4: mod_base = OTHER; note = 2' O-methyl modified nucleoside
  modified_base 5: mod_base = OTHER; note = 2' O-methyl modified nucleoside
  modified_base 6: mod_base = OTHER; note = 2' fluoro-modified nucleoside
  modified_base 7: mod_base = OTHER; note = 2' O-methyl modified nucleoside
  modified_base 8: mod_base = OTHER; note = 2' O-methyl modified nucleoside
  modified_base 9: mod_base = OTHER; note = 2' O-methyl modified nucleoside
  modified_base 10: mod_base = OTHER; note = 2' O-methyl modified nucleoside
  modified_base 11: mod_base = OTHER; note = 2' O-methyl modified nucleoside
  modified_base 12: mod_base = OTHER; note = 2' O-methyl modified nucleoside
  modified_base 13: mod_base = OTHER; note = 2' O-methyl modified nucleoside
  modified_base 14: mod_base = OTHER; note = 2' fluoro-modified nucleoside
  modified_base 15: mod_base = OTHER; note = 2' O-methyl modified nucleoside
  modified_base 16: mod_base = OTHER; note = 2' fluoro-modified nucleoside
  modified_base 17: mod_base = OTHER; note = 2' O-methyl modified nucleoside
  modified_base 18: mod_base = OTHER; note = 2' O-methyl modified nucleoside
  modified_base 19: mod_base = OTHER; note = 2' O-methyl modified nucleoside
  modified_base 19..20: mod_base = OTHER; note = Phosphorothioate linkage
  modified_base 20: mod_base = OTHER; note = 2' O-methyl modified nucleoside
  modified_base 20..21: mod_base = OTHER; note = Phosphorothioate linkage
  modified_base 21: mod_base = OTHER; note = 2' O-methyl modified nucleoside
  source 1..21: mol_type = other RNA
gtaacatccttggtacatatt

SEQ ID NO: 11429 - RNA, 21 nt, synthetic construct
  misc_feature 1..21: note = Description of Artificial Sequence: Synthetic oligonucleotide
  modified_base 1: mod_base = OTHER; note = 2' O-methyl modified nucleoside
  modified_base 1..2: mod_base = OTHER; note = Phosphorothioate linkage
  modified_base 2: mod_base = OTHER; note = 2' fluoro-modified nucleoside
  modified_base 2..3: mod_base = OTHER; note = Phosphorothioate linkage
  modified_base 3: mod_base = OTHER; note = 2' O-methyl modified nucleoside
  modified_base 4: mod_base = OTHER; note = 2' O-methyl modified nucleoside
  modified_base 5: mod_base = OTHER; note = 2' O-methyl modified nucleoside
  modified_base 6: mod_base = OTHER; note = 2' fluoro-modified nucleoside
  modified_base 7: mod_base = OTHER; note = 2' O-methyl modified nucleoside
  modified_base 8: mod_base = OTHER; note = 2' O-methyl modified nucleoside
  modified_base 9: mod_base = OTHER; note = 2' O-methyl modified nucleoside
  modified_base 10: mod_base = OTHER; note = 2' O-methyl modified nucleoside
  modified_base 11: mod_base = OTHER; note = 2' O-methyl modified nucleoside
  modified_base 12: mod_base = OTHER; note = 2' O-methyl modified nucleoside
  modified_base 13: mod_base = OTHER; note = 2' O-methyl modified nucleoside
  modified_base 14: mod_base = OTHER; note = 2' fluoro-modified nucleoside
  modified_base 15: mod_base = OTHER; note = 2' O-methyl modified nucleoside
  modified_base 16: mod_base = OTHER; note = 2' fluoro-modified nucleoside
  modified_base 17: mod_base = OTHER; note = 2' O-methyl modified nucleoside
  modified_base 18: mod_base = OTHER; note = 2' O-methyl modified nucleoside
  modified_base 19: mod_base = OTHER; note = 2' O-methyl modified nucleoside
  modified_base 19..20: mod_base = OTHER; note = Phosphorothioate linkage
  modified_base 20: mod_base = OTHER; note = 2' O-methyl modified nucleoside
  modified_base 20..21: mod_base = OTHER; note = Phosphorothioate linkage
  modified_base 21: mod_base = OTHER; note = 2' O-methyl modified nucleoside
  source 1..21: mol_type = other RNA
tactgtaacatccttggtatt

SEQ ID NO: 11430 - RNA, 21 nt, synthetic construct
  misc_feature 1..21: note = Description of Artificial Sequence: Synthetic oligonucleotide
  modified_base 1: mod_base = OTHER; note = 2' O-methyl modified nucleoside
  modified_base 1..2: mod_base = OTHER; note = Phosphorothioate linkage
  modified_base 2: mod_base = OTHER; note = 2' fluoro-modified nucleoside
  modified_base 2..3: mod_base = OTHER; note = Phosphorothioate linkage
  modified_base 3: mod_base = OTHER; note = 2' O-methyl modified nucleoside
  modified_base 4: mod_base = OTHER; note = 2' O-methyl modified nucleoside
  modified_base 5: mod_base = OTHER; note = 2' O-methyl modified nucleoside
  modified_base 6: mod_base = OTHER; note = 2' fluoro-modified nucleoside
  modified_base 7: mod_base = OTHER; note = 2' O-methyl modified nucleoside
  modified_base 8: mod_base = OTHER; note = 2' O-methyl modified nucleoside
  modified_base 9: mod_base = OTHER; note = 2' O-methyl modified nucleoside
  modified_base 10: mod_base = OTHER; note = 2' O-methyl modified nucleoside
  modified_base 11: mod_base = OTHER; note = 2' O-methyl modified nucleoside
  modified_base 12: mod_base = OTHER; note = 2' O-methyl modified nucleoside
  modified_base 13: mod_base = OTHER; note = 2' O-methyl modified nucleoside
  modified_base 14: mod_base = OTHER; note = 2' fluoro-modified nucleoside
  modified_base 15: mod_base = OTHER; note = 2' O-methyl modified nucleoside
  modified_base 16: mod_base = OTHER; note = 2' fluoro-modified nucleoside
  modified_base 17: mod_base = OTHER; note = 2' O-methyl modified nucleoside
  modified_base 18: mod_base = OTHER; note = 2' O-methyl modified nucleoside
  modified_base 19: mod_base = OTHER; note = 2' O-methyl modified nucleoside
  modified_base 19..20: mod_base = OTHER; note = Phosphorothioate linkage
  modified_base 20: mod_base = OTHER; note = 2' O-methyl modified nucleoside
  modified_base 20..21: mod_base = OTHER; note = Phosphorothioate linkage
  modified_base 21: mod_base = OTHER; note = 2' O-methyl modified nucleoside
  source 1..21: mol_type = other RNA
tcctgtttactgtaacatctt

SEQ ID NO: 11431 - RNA, 21 nt, synthetic construct
  misc_feature 1..21: note = Description of Artificial Sequence: Synthetic oligonucleotide
  modified_base 1: mod_base = OTHER; note = 2' O-methyl modified nucleoside
  modified_base 1..2: mod_base = OTHER; note = Phosphorothioate linkage
  modified_base 2: mod_base = OTHER; note = 2' fluoro-modified nucleoside
  modified_base 2..3: mod_base = OTHER; note = Phosphorothioate linkage
  modified_base 3: mod_base = OTHER; note = 2' O-methyl modified nucleoside
  modified_base 4: mod_base = OTHER; note = 2' O-methyl modified nucleoside
  modified_base 5: mod_base = OTHER; note = 2' O-methyl modified nucleoside
  modified_base 6: mod_base = OTHER; note = 2' fluoro-modified nucleoside
  modified_base 7: mod_base = OTHER; note = 2' O-methyl modified nucleoside
  modified_base 8: mod_base = OTHER; note = 2' O-methyl modified nucleoside
  modified_base 9: mod_base = OTHER; note = 2' O-methyl modified nucleoside
  modified_base 10: mod_base = OTHER; note = 2' O-methyl modified nucleoside
  modified_base 11: mod_base = OTHER; note = 2' O-methyl modified nucleoside
  modified_base 12: mod_base = OTHER; note = 2' O-methyl modified nucleoside
  modified_base 13: mod_base = OTHER; note = 2' O-methyl modified nucleoside
  modified_base 14: mod_base = OTHER; note = 2' fluoro-modified nucleoside
  modified_base 15: mod_base = OTHER; note = 2' O-methyl modified nucleoside
  modified_base 16: mod_base = OTHER; note = 2' fluoro-modified nucleoside
  modified_base 17: mod_base = OTHER; note = 2' O-methyl modified nucleoside
  modified_base 18: mod_base = OTHER; note = 2' O-methyl modified nucleoside
  modified_base 19: mod_base = OTHER; note = 2' O-methyl modified nucleoside
  modified_base 19..20: mod_base = OTHER; note = Phosphorothioate linkage
  modified_base 20: mod_base = OTHER; note = 2' O-methyl modified nucleoside
  modified_base 20..21: mod_base = OTHER; note = Phosphorothioate linkage
  modified_base 21: mod_base = OTHER; note = 2' O-methyl modified nucleoside
  source 1..21: mol_type = other RNA
catcctgtttactgtaacatt

SEQ ID NO: 11432 - RNA, 21 nt, synthetic construct
  misc_feature 1..21: note = Description of Artificial Sequence: Synthetic oligonucleotide
  modified_base 1: mod_base = OTHER; note = 2' O-methyl modified nucleoside
  modified_base 1..2: mod_base = OTHER; note = Phosphorothioate linkage
  modified_base 2: mod_base = OTHER; note = 2' fluoro-modified nucleoside
  modified_base 2..3: mod_base = OTHER; note = Phosphorothioate linkage
  modified_base 3: mod_base = OTHER; note = 2' O-methyl modified nucleoside
  modified_base 4: mod_base = OTHER; note = 2' O-methyl modified nucleoside
  modified_base 5: mod_base = OTHER; note = 2' O-methyl modified nucleoside
  modified_base 6: mod_base = OTHER; note = 2' fluoro-modified nucleoside
  modified_base 7: mod_base = OTHER; note = 2' O-methyl modified nucleoside
  modified_base 8: mod_base = OTHER; note = 2' O-methyl modified nucleoside
  modified_base 9: mod_base = OTHER; note = 2' O-methyl modified nucleoside
  modified_base 10: mod_base = OTHER; note = 2' O-methyl modified nucleoside
  modified_base 11: mod_base = OTHER; note = 2' O-methyl modified nucleoside
  modified_base 12: mod_base = OTHER; note = 2' O-methyl modified nucleoside
  modified_base 13: mod_base = OTHER; note = 2' O-methyl modified nucleoside
  modified_base 14: mod_base = OTHER; note = 2' fluoro-modified nucleoside
  modified_base 15: mod_base = OTHER; note = 2' O-methyl modified nucleoside
  modified_base 16: mod_base = OTHER; note = 2' fluoro-modified nucleoside
  modified_base 17: mod_base = OTHER; note = 2' O-methyl modified nucleoside
  modified_base 18: mod_base = OTHER; note = 2' O-methyl modified nucleoside
  modified_base 19: mod_base = OTHER; note = 2' O-methyl modified nucleoside
  modified_base 19..20: mod_base = OTHER; note = Phosphorothioate linkage
  modified_base 20: mod_base = OTHER; note = 2' O-methyl modified nucleoside
  modified_base 20..21: mod_base = OTHER; note = Phosphorothioate linkage
  modified_base 21: mod_base = OTHER; note = 2' O-methyl modified nucleoside
  source 1..21: mol_type = other RNA
aatatggttctttttagcatt

SEQ ID NO: 11433 - RNA, 21 nt, synthetic construct
  misc_feature 1..21: note = Description of Artificial Sequence: Synthetic oligonucleotide
  modified_base 1: mod_base = OTHER; note = 2' O-methyl modified nucleoside
  modified_base 1..2: mod_base = OTHER; note = Phosphorothioate linkage
  modified_base 2: mod_base = OTHER; note = 2' fluoro-modified nucleoside
  modified_base 2..3: mod_base = OTHER; note = Phosphorothioate linkage
  modified_base 3: mod_base = OTHER; note = 2' O-methyl modified nucleoside
  modified_base 4: mod_base = OTHER; note = 2' O-methyl modified nucleoside
  modified_base 5: mod_base = OTHER; note = 2' O-methyl modified nucleoside
  modified_base 6: mod_base = OTHER; note = 2' fluoro-modified nucleoside
  modified_base 7: mod_base = OTHER; note = 2' O-methyl modified nucleoside
  modified_base 8: mod_base = OTHER; note = 2' O-methyl modified nucleoside
  modified_base 9: mod_base = OTHER; note = 2' O-methyl modified nucleoside
  modified_base 10: mod_base = OTHER; note = 2' O-methyl modified nucleoside
  modified_base 11: mod_base = OTHER; note = 2' O-methyl modified nucleoside
  modified_base 12: mod_base = OTHER; note = 2' O-methyl modified nucleoside
  modified_base 13: mod_base = OTHER; note = 2' O-methyl modified nucleoside
  modified_base 14: mod_base = OTHER; note = 2' fluoro-modified nucleoside
  modified_base 15: mod_base = OTHER; note = 2' O-methyl modified nucleoside
  modified_base 16: mod_base = OTHER; note = 2' fluoro-modified nucleoside
  modified_base 17: mod_base = OTHER; note = 2' O-methyl modified nucleoside
  modified_base 18: mod_base = OTHER; note = 2' O-methyl modified nucleoside
  modified_base 19: mod_base = OTHER; note = 2' O-methyl modified nucleoside
  modified_base 19..20: mod_base = OTHER; note = Phosphorothioate linkage
  modified_base 20: mod_base = OTHER; note = 2' O-methyl modified nucleoside
  modified_base 20..21: mod_base = OTHER; note = Phosphorothioate linkage
  modified_base 21: mod_base = OTHER; note = 2' O-methyl modified nucleoside
  source 1..21: mol_type = other RNA
tctctaacactcaaaggcctt

SEQ ID NO: 11434 - RNA, 21 nt, synthetic construct
  misc_feature 1..21: note = Description of Artificial Sequence: Synthetic oligonucleotide
  modified_base 1: mod_base = OTHER; note = 2' O-methyl modified nucleoside
  modified_base 1..2: mod_base = OTHER; note = Phosphorothioate linkage
  modified_base 2: mod_base = OTHER; note = 2' fluoro-modified nucleoside
  modified_base 2..3: mod_base = OTHER; note = Phosphorothioate linkage
  modified_base 3: mod_base = OTHER; note = 2' O-methyl modified nucleoside
  modified_base 4: mod_base = OTHER; note = 2' O-methyl modified nucleoside
  modified_base 5: mod_base = OTHER; note = 2' O-methyl modified nucleoside
  modified_base 6: mod_base = OTHER; note = 2' fluoro-modified nucleoside
  modified_base 7: mod_base = OTHER; note = 2' O-methyl modified nucleoside
  modified_base 8: mod_base = OTHER; note = 2' O-methyl modified nucleoside
  modified_base 9: mod_base = OTHER; note = 2' O-methyl modified nucleoside
  modified_base 10: mod_base = OTHER; note = 2' O-methyl modified nucleoside
  modified_base 11: mod_base = OTHER; note = 2' O-methyl modified nucleoside
  modified_base 12: mod_base = OTHER; note = 2' O-methyl modified nucleoside
  modified_base 13: mod_base = OTHER; note = 2' O-methyl modified nucleoside
  modified_base 14: mod_base = OTHER; note = 2' fluoro-modified nucleoside
  modified_base 15: mod_base = OTHER; note = 2' O-methyl modified nucleoside
  modified_base 16: mod_base = OTHER; note = 2' fluoro-modified nucleoside
  modified_base 17: mod_base = OTHER; note = 2' O-methyl modified nucleoside
  modified_base 18: mod_base = OTHER; note = 2' O-methyl modified nucleoside
  modified_base 19: mod_base = OTHER; note = 2' O-methyl modified nucleoside
  modified_base 19..20: mod_base = OTHER; note = Phosphorothioate linkage
  modified_base 20: mod_base = OTHER; note = 2' O-methyl modified nucleoside
  modified_base 20..21: mod_base = OTHER; note = Phosphorothioate linkage
  modified_base 21: mod_base = OTHER; note = 2' O-methyl modified nucleoside
  source 1..21: mol_type = other RNA
tttaaggcagttttgtgcctt

SEQ ID NO: 11435 - RNA, 21 nt, synthetic construct
  misc_feature 1..21: note = Description of Artificial Sequence: Synthetic oligonucleotide
  modified_base 1: mod_base = OTHER; note = 2' O-methyl modified nucleoside
  modified_base 1..2: mod_base = OTHER; note = Phosphorothioate linkage
  modified_base 2: mod_base = OTHER; note = 2' fluoro-modified nucleoside
  modified_base 2..3: mod_base = OTHER; note = Phosphorothioate linkage
  modified_base 3: mod_base = OTHER; note = 2' O-methyl modified nucleoside
  modified_base 4: mod_base = OTHER; note = 2' O-methyl modified nucleoside
  modified_base 5: mod_base = OTHER; note = 2' O-methyl modified nucleoside
  modified_base 6: mod_base = OTHER; note = 2' fluoro-modified nucleoside
  modified_base 7: mod_base = OTHER; note = 2' O-methyl modified nucleoside
  modified_base 8: mod_base = OTHER; note = 2' O-methyl modified nucleoside
  modified_base 9: mod_base = OTHER; note = 2' O-methyl modified nucleoside
  modified_base 10: mod_base = OTHER; note = 2' O-methyl modified nucleoside
  modified_base 11: mod_base = OTHER; note = 2' O-methyl modified nucleoside
  modified_base 12: mod_base = OTHER; note = 2' O-methyl modified nucleoside
  modified_base 13: mod_base = OTHER; note = 2' O-methyl modified nucleoside
  modified_base 14: mod_base = OTHER; note = 2' fluoro-modified nucleoside
  modified_base 15: mod_base = OTHER; note = 2' O-methyl modified nucleoside
  modified_base 16: mod_base = OTHER; note = 2' fluoro-modified nucleoside
  modified_base 17: mod_base = OTHER; note = 2' O-methyl modified nucleoside
  modified_base 18: mod_base = OTHER; note = 2' O-methyl modified nucleoside
  modified_base 19: mod_base = OTHER; note = 2' O-methyl modified nucleoside
  modified_base 19..20: mod_base = OTHER; note = Phosphorothioate linkage
  modified_base 20: mod_base = OTHER; note = 2' O-methyl modified nucleoside
  modified_base 20..21: mod_base = OTHER; note = Phosphorothioate linkage
  modified_base 21: mod_base = OTHER; note = 2' O-methyl modified nucleoside
  source 1..21: mol_type = other RNA
ccttgagcttgtttcttactt

SEQ ID NO: 11436 - RNA, 21 nt, synthetic construct
  misc_feature 1..21: note = Description of Artificial Sequence: Synthetic oligonucleotide
  modified_base 1: mod_base = OTHER; note = 2' O-methyl modified nucleoside
  modified_base 1..2: mod_base = OTHER; note = Phosphorothioate linkage
  modified_base 2: mod_base = OTHER; note = 2' fluoro-modified nucleoside
  modified_base 2..3: mod_base = OTHER; note = Phosphorothioate linkage
  modified_base 3: mod_base = OTHER; note = 2' O-methyl modified nucleoside
  modified_base 4: mod_base = OTHER; note = 2' O-methyl modified nucleoside
  modified_base 5: mod_base = OTHER; note = 2' O-methyl modified nucleoside
  modified_base 6: mod_base = OTHER; note = 2' fluoro-modified nucleoside
  modified_base 7: mod_base = OTHER; note = 2' O-methyl modified nucleoside
  modified_base 8: mod_base = OTHER; note = 2' O-methyl modified nucleoside
  modified_base 9: mod_base = OTHER; note = 2' O-methyl modified nucleoside
  modified_base 10: mod_base = OTHER; note = 2' O-methyl modified nucleoside
  modified_base 11: mod_base = OTHER; note = 2' O-methyl modified nucleoside
  modified_base 12: mod_base = OTHER; note = 2' O-methyl modified nucleoside
  modified_base 13: mod_base = OTHER; note = 2' O-methyl modified nucleoside
  modified_base 14: mod_base = OTHER; note = 2' fluoro-modified nucleoside
  modified_base 15: mod_base = OTHER; note = 2' O-methyl modified nucleoside
  modified_base 16: mod_base = OTHER; note = 2' fluoro-modified nucleoside
  modified_base 17: mod_base = OTHER; note = 2' O-methyl modified nucleoside
  modified_base 18: mod_base = OTHER; note = 2' O-methyl modified nucleoside
  modified_base 19: mod_base = OTHER; note = 2' O-methyl modified nucleoside
  modified_base 19..20: mod_base = OTHER; note = Phosphorothioate linkage
  modified_base 20: mod_base = OTHER; note = 2' O-methyl modified nucleoside
  modified_base 20..21: mod_base = OTHER; note = Phosphorothioate linkage
  modified_base 21: mod_base = OTHER; note = 2' O-methyl modified nucleoside
  source 1..21: mol_type = other RNA
accatctaccttcagtttttt

SEQ ID NO: 11437 - RNA, 21 nt, synthetic construct
  misc_feature 1..21: note = Description of Artificial Sequence: Synthetic oligonucleotide
  modified_base 1: mod_base = OTHER; note = 2' O-methyl modified nucleoside
  modified_base 1..2: mod_base = OTHER; note = Phosphorothioate linkage
  modified_base 2: mod_base = OTHER; note = 2' fluoro-modified nucleoside
  modified_base 2..3: mod_base = OTHER; note = Phosphorothioate linkage
  modified_base 3: mod_base = OTHER; note = 2' O-methyl modified nucleoside
  modified_base 4: mod_base = OTHER; note = 2' O-methyl modified nucleoside
  modified_base 5: mod_base = OTHER; note = 2' O-methyl modified nucleoside
  modified_base 6: mod_base = OTHER; note = 2' fluoro-modified nucleoside
  modified_base 7: mod_base = OTHER; note = 2' O-methyl modified nucleoside
  modified_base 8: mod_base = OTHER; note = 2' O-methyl modified nucleoside
  modified_base 9: mod_base = OTHER; note = 2' O-methyl modified nucleoside
  modified_base 10: mod_base = OTHER; note = 2' O-methyl modified nucleoside
  modified_base 11: mod_base = OTHER; note = 2' O-methyl modified nucleoside
  modified_base 12: mod_base = OTHER; note = 2' O-methyl modified nucleoside
  modified_base 13: mod_base = OTHER; note = 2' O-methyl modified nucleoside
  modified_base 14: mod_base = OTHER; note = 2' fluoro-modified nucleoside
  modified_base 15: mod_base = OTHER; note = 2' O-methyl modified nucleoside
  modified_base 16: mod_base = OTHER; note = 2' fluoro-modified nucleoside
  modified_base 17: mod_base = OTHER; note = 2' O-methyl modified nucleoside
  modified_base 18: mod_base = OTHER; note = 2' O-methyl modified nucleoside
  modified_base 19: mod_base = OTHER; note = 2' O-methyl modified nucleoside
  modified_base 19..20: mod_base = OTHER; note = Phosphorothioate linkage
  modified_base 20: mod_base = OTHER; note = 2' O-methyl modified nucleoside
  modified_base 20..21: mod_base = OTHER; note = Phosphorothioate linkage
  modified_base 21: mod_base = OTHER; note = 2' O-methyl modified nucleoside
  source 1..21: mol_type = other RNA
acaccatctaccttcagtttt

SEQ ID NO: 11438 - RNA, 21 nt, synthetic construct
  misc_feature 1..21: note = Description of Artificial Sequence: Synthetic oligonucleotide
  modified_base 1: mod_base = OTHER; note = 2' O-methyl modified nucleoside
  modified_base 1..2: mod_base = OTHER; note = Phosphorothioate linkage
  modified_base 2: mod_base = OTHER; note = 2' fluoro-modified nucleoside
  modified_base 2..3: mod_base = OTHER; note = Phosphorothioate linkage
  modified_base 3: mod_base = OTHER; note = 2' O-methyl modified nucleoside
  modified_base 4: mod_base = OTHER; note = 2' O-methyl modified nucleoside
  modified_base 5: mod_base = OTHER; note = 2' O-methyl modified nucleoside
  modified_base 6: mod_base = OTHER; note = 2' fluoro-modified nucleoside
  modified_base 7: mod_base = OTHER; note = 2' O-methyl modified nucleoside
  modified_base 8: mod_base = OTHER; note = 2' O-methyl modified nucleoside
  modified_base 9: mod_base = OTHER; note = 2' O-methyl modified nucleoside
  modified_base 10: mod_base = OTHER; note = 2' O-methyl modified nucleoside
  modified_base 11: mod_base = OTHER; note = 2' O-methyl modified nucleoside
  modified_base 12: mod_base = OTHER; note = 2' O-methyl modified nucleoside
  modified_base 13: mod_base = OTHER; note = 2' O-methyl modified nucleoside
  modified_base 14: mod_base = OTHER; note = 2' fluoro-modified nucleoside
  modified_base 15: mod_base = OTHER; note = 2' O-methyl modified nucleoside
  modified_base 16: mod_base = OTHER; note = 2' fluoro-modified nucleoside
  modified_base 17: mod_base = OTHER; note = 2' O-methyl modified nucleoside
  modified_base 18: mod_base = OTHER; note = 2' O-methyl modified nucleoside
  modified_base 19: mod_base = OTHER; note = 2' O-methyl modified nucleoside
  modified_base 19..20: mod_base = OTHER; note = Phosphorothioate linkage
  modified_base 20: mod_base = OTHER; note = 2' O-methyl modified nucleoside
  modified_base 20..21: mod_base = OTHER; note = Phosphorothioate linkage
  modified_base 21: mod_base = OTHER; note = 2' O-methyl modified nucleoside
  source 1..21: mol_type = other RNA
ttattaactataacaccattt

SEQ ID NO: 11439 - RNA, 21 nt, synthetic construct
  misc_feature 1..21: note = Description of Artificial Sequence: Synthetic oligonucleotide
  modified_base 1: mod_base = OTHER; note = 2' O-methyl modified nucleoside
  modified_base 1..2: mod_base = OTHER; note = Phosphorothioate linkage
  modified_base 2: mod_base = OTHER; note = 2' fluoro-modified nucleoside
  modified_base 2..3: mod_base = OTHER; note = Phosphorothioate linkage
  modified_base 3: mod_base = OTHER; note = 2' O-methyl modified nucleoside
  modified_base 4: mod_base = OTHER; note = 2' O-methyl modified nucleoside
  modified_base 5: mod_base = OTHER; note = 2' O-methyl modified nucleoside
  modified_base 6: mod_base = OTHER; note = 2' fluoro-modified nucleoside
  modified_base 7: mod_base = OTHER; note = 2' O-methyl modified nucleoside
  modified_base 8: mod_base = OTHER; note = 2' O-methyl modified nucleoside
  modified_base 9: mod_base = OTHER; note = 2' O-methyl modified nucleoside
  modified_base 10: mod_base = OTHER; note = 2' O-methyl modified nucleoside
  modified_base 11: mod_base = OTHER; note = 2' O-methyl modified nucleoside
  modified_base 12: mod_base = OTHER; note = 2' O-methyl modified nucleoside
  modified_base 13: mod_base = OTHER; note = 2' O-methyl modified nucleoside
  modified_base 14: mod_base = OTHER; note = 2' fluoro-modified nucleoside
  modified_base 15: mod_base = OTHER; note = 2' O-methyl modified nucleoside
  modified_base 16: mod_base = OTHER; note = 2' fluoro-modified nucleoside
  modified_base 17: mod_base = OTHER; note = 2' O-methyl modified nucleoside
  modified_base 18: mod_base = OTHER; note = 2' O-methyl modified nucleoside
  modified_base 19: mod_base = OTHER; note = 2' O-methyl modified nucleoside
  modified_base 19..20: mod_base = OTHER; note = Phosphorothioate linkage
  modified_base 20: mod_base = OTHER; note = 2' O-methyl modified nucleoside
  modified_base 20..21: mod_base = OTHER; note = Phosphorothioate linkage
  modified_base 21: mod_base = OTHER; note = 2' O-methyl modified nucleoside
  source 1..21: mol_type = other RNA
tgtttattgtagaaggaaatt

SEQ ID NO: 11440 - RNA, 21 nt, synthetic construct
  misc_feature 1..21: note = Description of Artificial Sequence: Synthetic oligonucleotide
  modified_base 1: mod_base = OTHER; note = 2' O-methyl modified nucleoside
  modified_base 1..2: mod_base = OTHER; note = Phosphorothioate linkage
  modified_base 2: mod_base = OTHER; note = 2' fluoro-modified nucleoside
  modified_base 2..3: mod_base = OTHER; note = Phosphorothioate linkage
  modified_base 3: mod_base = OTHER; note = 2' O-methyl modified nucleoside
  modified_base 4: mod_base = OTHER; note = 2' O-methyl modified nucleoside
  modified_base 5: mod_base = OTHER; note = 2' O-methyl modified nucleoside
  modified_base 6: mod_base = OTHER; note = 2' fluoro-modified nucleoside
  modified_base 7: mod_base = OTHER; note = 2' O-methyl modified nucleoside
  modified_base 8: mod_base = OTHER; note = 2' O-methyl modified nucleoside
  modified_base 9: mod_base = OTHER; note = 2' O-methyl modified nucleoside
  modified_base 10: mod_base = OTHER; note = 2' O-methyl modified nucleoside
  modified_base 11: mod_base = OTHER; note = 2' O-methyl modified nucleoside
  modified_base 12: mod_base = OTHER; note = 2' O-methyl modified nucleoside
  modified_base 13: mod_base = OTHER; note = 2' O-methyl modified nucleoside
  modified_base 14: mod_base = OTHER; note = 2' fluoro-modified nucleoside
  modified_base 15: mod_base = OTHER; note = 2' O-methyl modified nucleoside
  modified_base 16: mod_base = OTHER; note = 2' fluoro-modified nucleoside
  modified_base 17: mod_base = OTHER; note = 2' O-methyl modified nucleoside
  modified_base 18: mod_base = OTHER; note = 2' O-methyl modified nucleoside
  modified_base 19: mod_base = OTHER; note = 2' O-methyl modified nucleoside
  modified_base 19..20: mod_base = OTHER; note = Phosphorothioate linkage
  modified_base 20: mod_base = OTHER; note = 2' O-methyl modified nucleoside
  modified_base 20..21: mod_base = OTHER; note = Phosphorothioate linkage
  modified_base 21: mod_base = OTHER; note = 2' O-methyl modified nucleoside
  source 1..21: mol_type = other RNA
atagctgttgagttcattgtt

SEQ ID NO: 11441 - RNA, 21 nt, synthetic construct
  misc_feature 1..21: note = Description of Artificial Sequence: Synthetic oligonucleotide
  modified_base 1: mod_base = OTHER; note = 2' O-methyl modified nucleoside
  modified_base 1..2: mod_base = OTHER; note = Phosphorothioate linkage
  modified_base 2: mod_base = OTHER; note = 2' fluoro-modified nucleoside
  modified_base 2..3: mod_base = OTHER; note = Phosphorothioate linkage
  modified_base 3: mod_base = OTHER; note = 2' O-methyl modified nucleoside
  modified_base 4: mod_base = OTHER; note = 2' O-methyl modified nucleoside
  modified_base 5: mod_base = OTHER; note = 2' O-methyl modified nucleoside
  modified_base 6: mod_base = OTHER; note = 2' fluoro-modified nucleoside
  modified_base 7: mod_base = OTHER; note = 2' O-methyl modified nucleoside
  modified_base 8: mod_base = OTHER; note = 2' O-methyl modified nucleoside
  modified_base 9: mod_base = OTHER; note = 2' O-methyl modified nucleoside
  modified_base 10: mod_base = OTHER; note = 2' O-methyl modified nucleoside
  modified_base 11: mod_base = OTHER; note = 2' O-methyl modified nucleoside
  modified_base 12: mod_base = OTHER; note = 2' O-methyl modified nucleoside
  modified_base 13: mod_base = OTHER; note = 2' O-methyl modified nucleoside
  modified_base 14: mod_base = OTHER; note = 2' fluoro-modified nucleoside
  modified_base 15: mod_base = OTHER; note = 2' O-methyl modified nucleoside
  modified_base 16: mod_base = OTHER; note = 2' fluoro-modified nucleoside
  modified_base 17: mod_base = OTHER; note = 2' O-methyl modified nucleoside
  modified_base 18: mod_base = OTHER; note = 2' O-methyl modified nucleoside
  modified_base 19: mod_base = OTHER; note = 2' O-methyl modified nucleoside
  modified_base 19..20: mod_base = OTHER; note = Phosphorothioate linkage
  modified_base 20: mod_base = OTHER; note = 2' O-methyl modified nucleoside
  modified_base 20..21: mod_base = OTHER; note = Phosphorothioate linkage
  modified_base 21: mod_base = OTHER; note = 2' O-methyl modified nucleoside
  source 1..21: mol_type = other RNA
tagactcaagataatttcatt

SEQ ID NO: 11442 - RNA, 21 nt, synthetic construct
  misc_feature 1..21: note = Description of Artificial Sequence: Synthetic oligonucleotide
  modified_base 1: mod_base = OTHER; note = 2' fluoro-modified nucleoside
  modified_base 1..2: mod_base = OTHER; note = Phosphorothioate linkage
  modified_base 2: mod_base = OTHER; note = 2' O-methyl modified nucleoside
  modified_base 2..3: mod_base = OTHER; note = Phosphorothioate linkage
  modified_base 3: mod_base = OTHER; note = 2' fluoro-modified nucleoside
  modified_base 4: mod_base = OTHER; note = 2' O-methyl modified nucleoside
  modified_base 5: mod_base = OTHER; note = 2' fluoro-modified nucleoside
  modified_base 6: mod_base = OTHER; note = 2' O-methyl modified nucleoside
  modified_base 7: mod_base = OTHER; note = 2' fluoro-modified nucleoside
  modified_base 8: mod_base = OTHER; note = 2' fluoro-modified nucleoside
  modified_base 9: mod_base = OTHER; note = 2' fluoro-modified nucleoside
  modified_base 10: mod_base = OTHER; note = 2' O-methyl modified nucleoside
  modified_base 11: mod_base = OTHER; note = 2' fluoro-modified nucleoside
  modified_base 12: mod_base = OTHER; note = 2' O-methyl modified nucleoside
  modified_base 13: mod_base = OTHER; note = 2' fluoro-modified nucleoside
  modified_base 14: mod_base = OTHER; note = 2' O-methyl modified nucleoside
  modified_base 15: mod_base = OTHER; note = 2' fluoro-modified nucleoside
  modified_base 16: mod_base = OTHER; note = 2' O-methyl modified nucleoside
  modified_base 17: mod_base = OTHER; note = 2' fluoro-modified nucleoside
  modified_base 18: mod_base = OTHER; note = 2' O-methyl modified nucleoside
  modified_base 19: mod_base = OTHER; note = 2' fluoro-modified nucleoside
  modified_base 19..20: mod_base = OTHER; note = Phosphorothioate linkage
  modified_base 20: mod_base = OTHER; note = 2' O-methyl modified nucleoside
  modified_base 20..21: mod_base = OTHER; note = Phosphorothioate linkage
  modified_base 21: mod_base = OTHER; note = 2' O-methyl modified nucleoside
  source 1..21: mol_type = other RNA
agcagtagcttgtcttttatt

SEQ ID NO: 11443 - RNA, 21 nt, synthetic construct
  misc_feature 1..21: note = Description of Artificial Sequence: Synthetic oligonucleotide
  modified_base 1: mod_base = OTHER; note = 2' fluoro-modified nucleoside
  modified_base 1..2: mod_base = OTHER; note = Phosphorothioate linkage
  modified_base 2: mod_base = OTHER; note = 2' O-methyl modified nucleoside
  modified_base 2..3: mod_base = OTHER; note = Phosphorothioate linkage
  modified_base 3: mod_base = OTHER; note = 2' fluoro-modified nucleoside
  modified_base 4: mod_base = OTHER; note = 2' O-methyl modified nucleoside
  modified_base 5: mod_base = OTHER; note = 2' fluoro-modified nucleoside
  modified_base 6: mod_base = OTHER; note = 2' O-methyl modified nucleoside
  modified_base 7: mod_base = OTHER; note = 2' fluoro-modified nucleoside
  modified_base 8: mod_base = OTHER; note = 2' fluoro-modified nucleoside
  modified_base 9: mod_base = OTHER; note = 2' fluoro-modified nucleoside
  modified_base 10: mod_base = OTHER; note = 2' O-methyl modified nucleoside
  modified_base 11: mod_base = OTHER; note = 2' fluoro-modified nucleoside
  modified_base 12: mod_base = OTHER; note = 2' O-methyl modified nucleoside
  modified_base 13: mod_base = OTHER; note = 2' fluoro-modified nucleoside
  modified_base 14: mod_base = OTHER; note = 2' O-methyl modified nucleoside
  modified_base 15: mod_base = OTHER; note = 2' fluoro-modified nucleoside
  modified_base 16: mod_base = OTHER; note = 2' O-methyl modified nucleoside
  modified_base 17: mod_base = OTHER; note = 2' fluoro-modified nucleoside
  modified_base 18: mod_base = OTHER; note = 2' O-methyl modified nucleoside
  modified_base 19: mod_base = OTHER; note = 2' fluoro-modified nucleoside
  modified_base 19..20: mod_base = OTHER; note = Phosphorothioate linkage
  modified_base 20: mod_base = OTHER; note = 2' O-methyl modified nucleoside
  modified_base 20..21: mod_base = OTHER; note = Phosphorothioate linkage
  modified_base 21: mod_base = OTHER; note = 2' O-methyl modified nucleoside
  source 1..21: mol_type = other RNA
acacaaaaattgttcggcatt

SEQ ID NO: 11444 - RNA, 21 nt, synthetic construct
  misc_feature 1..21: note = Description of Artificial Sequence: Synthetic oligonucleotide
  modified_base 1: mod_base = OTHER; note = 2' fluoro-modified nucleoside
  modified_base 1..2: mod_base = OTHER; note = Phosphorothioate linkage
  modified_base 2: mod_base = OTHER; note = 2' O-methyl modified nucleoside
  modified_base 2..3: mod_base = OTHER; note = Phosphorothioate linkage
  modified_base 3: mod_base = OTHER; note = 2' fluoro-modified nucleoside
  modified_base 4: mod_base = OTHER; note = 2' O-methyl modified nucleoside
  modified_base 5: mod_base = OTHER; note = 2' fluoro-modified nucleoside
  modified_base 6: mod_base = OTHER; note = 2' O-methyl modified nucleoside
  modified_base 7: mod_base = OTHER; note = 2' fluoro-modified nucleoside
  modified_base 8: mod_base = OTHER; note = 2' fluoro-modified nucleoside
  modified_base 9: mod_base = OTHER; note = 2' fluoro-modified nucleoside
  modified_base 10: mod_base = OTHER; note = 2' O-methyl modified nucleoside
  modified_base 11: mod_base = OTHER; note = 2' fluoro-modified nucleoside
  modified_base 12: mod_base = OTHER; note = 2' O-methyl modified nucleoside
  modified_base 13: mod_base = OTHER; note = 2' fluoro-modified nucleoside
  modified_base 14: mod_base = OTHER; note = 2' O-methyl modified nucleoside
  modified_base 15: mod_base = OTHER; note = 2' fluoro-modified nucleoside
  modified_base 16: mod_base = OTHER; note = 2' O-methyl modified nucleoside
  modified_base 17: mod_base = OTHER; note = 2' fluoro-modified nucleoside
  modified_base 18: mod_base = OTHER; note = 2' O-methyl modified nucleoside
  modified_base 19: mod_base = OTHER; note = 2' fluoro-modified nucleoside
  modified_base 19..20: mod_base = OTHER; note = Phosphorothioate linkage
  modified_base 20: mod_base = OTHER; note = 2' O-methyl modified nucleoside
  modified_base 20..21: mod_base = OTHER; note = Phosphorothioate linkage
  modified_base 21: mod_base = OTHER; note = 2' O-methyl modified nucleoside
  source 1..21: mol_type = other RNA
cacaaaaattgttcggctatt

SEQ ID NO: 11445 - RNA, 21 nt, synthetic construct
  misc_feature 1..21: note = Description of Artificial Sequence: Synthetic oligonucleotide
  modified_base 1: mod_base = OTHER; note = 2' fluoro-modified nucleoside
  modified_base 1..2: mod_base = OTHER; note = Phosphorothioate linkage
  modified_base 2: mod_base = OTHER; note = 2' O-methyl modified nucleoside
  modified_base 2..3: mod_base = OTHER; note = Phosphorothioate linkage
  modified_base 3: mod_base = OTHER; note = 2' fluoro-modified nucleoside
  modified_base 4: mod_base = OTHER; note = 2' O-methyl modified nucleoside
  modified_base 5: mod_base = OTHER; note = 2' fluoro-modified nucleoside
  modified_base 6: mod_base = OTHER; note = 2' O-methyl modified nucleoside
  modified_base 7: mod_base = OTHER; note = 2' fluoro-modified nucleoside
  modified_base 8: mod_base = OTHER; note = 2' fluoro-modified nucleoside
  modified_base 9: mod_base = OTHER; note = 2' fluoro-modified nucleoside
  modified_base 10: mod_base = OTHER; note = 2' O-methyl modified nucleoside
  modified_base 11: mod_base = OTHER; note = 2' fluoro-modified nucleoside
  modified_base 12: mod_base = OTHER; note = 2' O-methyl modified nucleoside
  modified_base 13: mod_base = OTHER; note = 2' fluoro-modified nucleoside
  modified_base 14: mod_base = OTHER; note = 2' O-methyl modified nucleoside
  modified_base 15: mod_base = OTHER; note = 2' fluoro-modified nucleoside
  modified_base 16: mod_base = OTHER; note = 2' O-methyl modified nucleoside
  modified_base 17: mod_base = OTHER; note = 2' fluoro-modified nucleoside
  modified_base 18: mod_base = OTHER; note = 2' O-methyl modified nucleoside
  modified_base 19: mod_base = OTHER; note = 2' fluoro-modified nucleoside
  modified_base 19..20: mod_base = OTHER; note = Phosphorothioate linkage
  modified_base 20: mod_base = OTHER; note = 2' O-methyl modified nucleoside
  modified_base 20..21: mod_base = OTHER; note = Phosphorothioate linkage
  modified_base 21: mod_base = OTHER; note = 2' O-methyl modified nucleoside
  source 1..21: mol_type = other RNA
gaaggtagatggtgttatatt

SEQ ID NO: 11446 - RNA, 21 nt, synthetic construct
  misc_feature 1..21: note = Description of Artificial Sequence: Synthetic oligonucleotide
  modified_base 1: mod_base = OTHER; note = 2' O-methyl modified nucleoside
  modified_base 1..2: mod_base = OTHER; note = Phosphorothioate linkage
  modified_base 2: mod_base = OTHER; note = 2' fluoro-modified nucleoside
  modified_base 2..3: mod_base = OTHER; note = Phosphorothioate linkage
  modified_base 3: mod_base = OTHER; note = 2' O-methyl modified nucleoside
  modified_base 4: mod_base = OTHER; note = 2' fluoro-modified nucleoside
  modified_base 5: mod_base = OTHER; note = 2' O-methyl modified nucleoside
  modified_base 6: mod_base = OTHER; note = 2' fluoro-modified nucleoside
  modified_base 7: mod_base = OTHER; note = 2' O-methyl modified nucleoside
  modified_base 8: mod_base = OTHER; note = 2' fluoro-modified nucleoside
  modified_base 9: mod_base = OTHER; note = 2' O-methyl modified nucleoside
  modified_base 10: mod_base = OTHER; note = 2' fluoro-modified nucleoside
  modified_base 11: mod_base = OTHER; note = 2' O-methyl modified nucleoside
  modified_base 12: mod_base = OTHER; note = 2' O-methyl modified nucleoside
  modified_base 13: mod_base = OTHER; note = 2' O-methyl modified nucleoside
  modified_base 14: mod_base = OTHER; note = 2' fluoro-modified nucleoside
  modified_base 15: mod_base = OTHER; note = 2' O-methyl modified nucleoside
  modified_base 16: mod_base = OTHER; note = 2' fluoro-modified nucleoside
  modified_base 17: mod_base = OTHER; note = 2' O-methyl modified nucleoside
  modified_base 18: mod_base = OTHER; note = 2' fluoro-modified nucleoside
  modified_base 19: mod_base = OTHER; note = 2' O-methyl modified nucleoside
  modified_base 19..20: mod_base = OTHER; note = Phosphorothioate linkage
  modified_base 20: mod_base = OTHER; note = 2' O-methyl modified nucleoside
  modified_base 20..21: mod_base = OTHER; note = Phosphorothioate linkage
  modified_base 21: mod_base = OTHER; note = 2' O-methyl modified nucleoside
  source 1..21: mol_type = other RNA
taaaagacaagctactgcttt

SEQ ID NO: 11447 - RNA, 21 nt, synthetic construct
  misc_feature 1..21: note = Description of Artificial Sequence: Synthetic oligonucleotide
  modified_base 1: mod_base = OTHER; note = 2' O-methyl modified nucleoside
  modified_base 1..2: mod_base = OTHER; note = Phosphorothioate linkage
  modified_base 2: mod_base = OTHER; note = 2' fluoro-modified nucleoside
  modified_base 2..3: mod_base = OTHER; note = Phosphorothioate linkage
  modified_base 3: mod_base = OTHER; note = 2' O-methyl modified nucleoside
  modified_base 4: mod_base = OTHER; note = 2' fluoro-modified nucleoside
  modified_base 5: mod_base = OTHER; note = 2' O-methyl modified nucleoside
  modified_base 6: mod_base = OTHER; note = 2' fluoro-modified nucleoside
  modified_base 7: mod_base = OTHER; note = 2' O-methyl modified nucleoside
  modified_base 8: mod_base = OTHER; note = 2' fluoro-modified nucleoside
  modified_base 9: mod_base = OTHER; note = 2' O-methyl modified nucleoside
  modified_base 10: mod_base = OTHER; note = 2' fluoro-modified nucleoside
  modified_base 11: mod_base = OTHER; note = 2' O-methyl modified nucleoside
  modified_base 12: mod_base = OTHER; note = 2' O-methyl modified nucleoside
  modified_base 13: mod_base = OTHER; note = 2' O-methyl modified nucleoside
  modified_base 14: mod_base = OTHER; note = 2' fluoro-modified nucleoside
  modified_base 15: mod_base = OTHER; note = 2' O-methyl modified nucleoside
  modified_base 16: mod_base = OTHER; note = 2' fluoro-modified nucleoside
  modified_base 17: mod_base = OTHER; note = 2' O-methyl modified nucleoside
  modified_base 18: mod_base = OTHER; note = 2' fluoro-modified nucleoside
  modified_base 19: mod_base = OTHER; note = 2' O-methyl modified nucleoside
  modified_base 19..20: mod_base = OTHER; note = Phosphorothioate linkage
  modified_base 20: mod_base = OTHER; note = 2' O-methyl modified nucleoside
  modified_base 20..21: mod_base = OTHER; note = Phosphorothioate linkage
  modified_base 21: mod_base = OTHER; note = 2' O-methyl modified nucleoside
  source 1..21: mol_type = other RNA
tgccgaacaatttttgtgttt

SEQ ID NO: 11448 - RNA, 21 nt, synthetic construct
  misc_feature 1..21: note = Description of Artificial Sequence: Synthetic oligonucleotide
  modified_base 1: mod_base = OTHER; note = 2' O-methyl modified nucleoside
  modified_base 1..2: mod_base = OTHER; note = Phosphorothioate linkage
  modified_base 2: mod_base = OTHER; note = 2' fluoro-modified nucleoside
  modified_base 2..3: mod_base = OTHER; note = Phosphorothioate linkage
  modified_base 3: mod_base = OTHER; note = 2' O-methyl modified nucleoside
  modified_base 4: mod_base = OTHER; note = 2' fluoro-modified nucleoside
  modified_base 5: mod_base = OTHER; note = 2' O-methyl modified nucleoside
  modified_base 6: mod_base = OTHER; note = 2' fluoro-modified nucleoside
  modified_base 7: mod_base = OTHER; note = 2' O-methyl modified nucleoside
  modified_base 8: mod_base = OTHER; note = 2' fluoro-modified nucleoside
  modified_base 9: mod_base = OTHER; note = 2' O-methyl modified nucleoside
  modified_base 10: mod_base = OTHER; note = 2' fluoro-modified nucleoside
  modified_base 11: mod_base = OTHER; note = 2' O-methyl modified nucleoside
  modified_base 12: mod_base = OTHER; note = 2' O-methyl modified nucleoside
  modified_base 13: mod_base = OTHER; note = 2' O-methyl modified nucleoside
  modified_base 14: mod_base = OTHER; note = 2' fluoro-modified nucleoside
  modified_base 15: mod_base = OTHER; note = 2' O-methyl modified nucleoside
  modified_base 16: mod_base = OTHER; note = 2' fluoro-modified nucleoside
  modified_base 17: mod_base = OTHER; note = 2' O-methyl modified nucleoside
  modified_base 18: mod_base = OTHER; note = 2' fluoro-modified nucleoside
  modified_base 19: mod_base = OTHER; note = 2' O-methyl modified nucleoside
  modified_base 19..20: mod_base = OTHER; note = Phosphorothioate linkage
  modified_base 20: mod_base = OTHER; note = 2' O-methyl modified nucleoside
  modified_base 20..21: mod_base = OTHER; note = Phosphorothioate linkage
  modified_base 21: mod_base = OTHER; note = 2' O-methyl modified nucleoside
  source 1..21: mol_type = other RNA
tagccgaacaatttttgtgtt

SEQ ID NO: 11449 - RNA, 21 nt, synthetic construct
  misc_feature 1..21: note = Description of Artificial Sequence: Synthetic oligonucleotide
  modified_base 1: mod_base = OTHER; note = 2' O-methyl modified nucleoside
  modified_base 1..2: mod_base = OTHER; note = Phosphorothioate linkage
  modified_base 2: mod_base = OTHER; note = 2' fluoro-modified nucleoside
  modified_base 2..3: mod_base = OTHER; note = Phosphorothioate linkage
  modified_base 3: mod_base = OTHER; note = 2' O-methyl modified nucleoside
  modified_base 4: mod_base = OTHER; note = 2' fluoro-modified nucleoside
  modified_base 5: mod_base = OTHER; note = 2' O-methyl modified nucleoside
  modified_base 6: mod_base = OTHER; note = 2' fluoro-modified nucleoside
  modified_base 7: mod_base = OTHER; note = 2' O-methyl modified nucleoside
  modified_base 8: mod_base = OTHER; note = 2' fluoro-modified nucleoside
  modified_base 9: mod_base = OTHER; note = 2' O-methyl modified nucleoside
  modified_base 10: mod_base = OTHER; note = 2' fluoro-modified nucleoside
  modified_base 11: mod_base = OTHER; note = 2' O-methyl modified nucleoside
  modified_base 12: mod_base = OTHER; note = 2' O-methyl modified nucleoside
  modified_base 13: mod_base = OTHER; note = 2' O-methyl modified nucleoside
  modified_base 14: mod_base = OTHER; note = 2' fluoro-modified nucleoside
  modified_base 15: mod_base = OTHER; note = 2' O-methyl modified nucleoside
  modified_base 16: mod_base = OTHER; note = 2' fluoro-modified nucleoside
  modified_base 17: mod_base = OTHER; note = 2' O-methyl modified nucleoside
  modified_base 18: mod_base = OTHER; note = 2' fluoro-modified nucleoside
  modified_base 19: mod_base = OTHER; note = 2' O-methyl modified nucleoside
  modified_base 19..20: mod_base = OTHER; note = Phosphorothioate linkage
  modified_base 20: mod_base = OTHER; note = 2' O-methyl modified nucleoside
  modified_base 20..21: mod_base = OTHER; note = Phosphorothioate linkage
  modified_base 21: mod_base = OTHER; note = 2' O-methyl modified nucleoside
  source 1..21: mol_type = other RNA
tataacaccatctaccttctt

SEQ ID NO: 11450 - RNA, 21 nt, synthetic construct
  misc_feature 1..21: note = Description of Artificial Sequence: Synthetic oligonucleotide
  source 1..21: mol_type = other RNA
aaaacaacaaagtggcgagtt

SEQ ID NO: 11451 - RNA, 21 nt, synthetic construct
  misc_feature 1..21: note = Description of Artificial Sequence: Synthetic oligonucleotide
  source 1..21: mol_type = other RNA
ctcacccaaacccacaaaatt

SEQ ID NO: 11452 - RNA, 21 nt, synthetic construct
  misc_feature 1..21: note = Description of Artificial Sequence: Synthetic oligonucleotide
  source 1..21: mol_type = other RNA
gtataagcttcctcctgattt

SEQ ID NO: 11453 - RNA, 21 nt, synthetic construct
  misc_feature 1..21: note = Description of Artificial Sequence: Synthetic oligonucleotide
  source 1..21: mol_type = other RNA
ctgagtatagccactttgttt

SEQ ID NO: 11454 - RNA, 21 nt, synthetic construct
  misc_feature 1..21: note = Description of Artificial Sequence: Synthetic oligonucleotide
  source 1..21: mol_type = other RNA
ttgggcaatgaactcaacatt

SEQ ID NO: 11455 - RNA, 21 nt, synthetic construct
  misc_feature 1..21: note = Description of Artificial Sequence: Synthetic oligonucleotide
  source 1..21: mol_type = other RNA
cataacaacacagccttcatt

SEQ ID NO: 11456 - RNA, 21 nt, synthetic construct
  misc_feature 1..21: note = Description of Artificial Sequence: Synthetic oligonucleotide
  source 1..21: mol_type = other RNA
tatgtaccaaggatgttactt

SEQ ID NO: 11457 - RNA, 21 nt, synthetic construct
  misc_feature 1..21: note = Description of Artificial Sequence: Synthetic oligonucleotide
  source 1..21: mol_type = other RNA
taccaaggatgttacagtatt

SEQ ID NO: 11458 - RNA, 21 nt, synthetic construct
  misc_feature 1..21: note = Description of Artificial Sequence: Synthetic oligonucleotide
  source 1..21: mol_type = other RNA
gatgttacagtaaacaggatt

SEQ ID NO: 11459 - RNA, 21 nt, synthetic construct
  misc_feature 1..21: note = Description of Artificial Sequence: Synthetic oligonucleotide
  source 1..21: mol_type = other RNA
tgttacagtaaacaggatgtt

SEQ ID NO: 11460 - RNA, 21 nt, synthetic construct
  misc_feature 1..21: note = Description of Artificial Sequence: Synthetic oligonucleotide
  source 1..21: mol_type = other RNA
tgctaaaaagaaccatatttt

SEQ ID NO: 11461 - RNA, 21 nt, synthetic construct
  misc_feature 1..21: note = Description of Artificial Sequence: Synthetic oligonucleotide
  source 1..21: mol_type = other RNA
ggcctttgagtgttagagatt

SEQ ID NO: 11462 - RNA, 21 nt, synthetic construct
  misc_feature 1..21: note = Description of Artificial Sequence: Synthetic oligonucleotide
  source 1..21: mol_type = other RNA
ggcacaaaactgccttaaatt

SEQ ID NO: 11463 - RNA, 21 nt, synthetic construct
  misc_feature 1..21: note = Description of Artificial Sequence: Synthetic oligonucleotide
  source 1..21: mol_type = other RNA
gtaagaaacaagctcaaggtt

SEQ ID NO: 11464 - RNA, 21 nt, synthetic construct
  misc_feature 1..21: note = Description of Artificial Sequence: Synthetic oligonucleotide
  source 1..21: mol_type = other RNA
aaaactgaaggtagatggttt

SEQ ID NO: 11465 - RNA, 21 nt, synthetic construct
  misc_feature 1..21: note = Description of Artificial Sequence: Synthetic oligonucleotide
  source 1..21: mol_type = other RNA
aactgaaggtagatggtgttt

SEQ ID NO: 11466 - RNA, 21 nt, synthetic construct
  misc_feature 1..21: note = Description of Artificial Sequence: Synthetic oligonucleotide
  source 1..21: mol_type = other RNA
atggtgttatagttaataatt

SEQ ID NO: 11467 - RNA, 21 nt, synthetic construct
  misc_feature 1..21: note = Description of Artificial Sequence: Synthetic oligonucleotide
  source 1..21: mol_type = other RNA
tttccttctacaataaacatt

SEQ ID NO: 11468 - RNA, 21 nt, synthetic construct
  misc_feature 1..21: note = Description of Artificial Sequence: Synthetic oligonucleotide
  source 1..21: mol_type = other RNA
caatgaactcaacagctattt

SEQ ID NO: 11469 - RNA, 21 nt, synthetic construct
  misc_feature 1..21: note = Description of Artificial Sequence: Synthetic oligonucleotide
  source 1..21: mol_type = other RNA
tgaaattatcttgagtctatt

SEQ ID NO: 11470 - RNA, 21 nt, synthetic construct
  misc_feature 1..21: note = Description of Artificial Sequence: Synthetic oligonucleotide
  source 1..21: mol_type = other RNA
agcagtagcttgtcttttatt

SEQ ID NO: 11471 - RNA, 21 nt, synthetic construct
  misc_feature 1..21: note = Description of Artificial Sequence: Synthetic oligonucleotide
  source 1..21: mol_type = other RNA
acacaaaaattgttcggcatt

SEQ ID NO: 11472 - RNA, 21 nt, synthetic construct
  misc_feature 1..21: note = Description of Artificial Sequence: Synthetic oligonucleotide
  source 1..21: mol_type = other RNA
cacaaaaattgttcggctatt

SEQ ID NO: 11473 - RNA, 21 nt, synthetic construct
  misc_feature 1..21: note = Description of Artificial Sequence: Synthetic oligonucleotide
  source 1..21: mol_type = other RNA
gaaggtagatggtgttatatt

SEQ ID NO: 11474 - RNA, 21 nt, synthetic construct
  misc_feature 1..21: note = Description of Artificial Sequence: Synthetic oligonucleotide
  source 1..21: mol_type = other RNA
atatgtaccaaggatgttatt

SEQ ID NO: 11475 - RNA, 20 nt, synthetic construct
  misc_feature 1..20: note = Description of Artificial Sequence: Synthetic oligonucleotide
  source 1..20: mol_type = other RNA
ctcgccactttgttgttttt

SEQ ID NO: 11476 - RNA, 21 nt, synthetic construct
  misc_feature 1..21: note = Description of Artificial Sequence: Synthetic oligonucleotide
  source 1..21: mol_type = other RNA
ttttgtgggtttgggtgagtt

SEQ ID NO: 11477 - RNA, 21 nt, synthetic construct
  misc_feature 1..21: note = Description of Artificial Sequence: Synthetic oligonucleotide
  source 1..21: mol_type = other RNA
atcaggaggaagcttatactt

SEQ ID NO: 11478 - RNA, 21 nt, synthetic construct
  misc_feature 1..21: note = Description of Artificial Sequence: Synthetic oligonucleotide
  source 1..21: mol_type = other RNA
acaaagtggctatactcagtt

SEQ ID NO: 11479 - RNA, 21 nt, synthetic construct
  misc_feature 1..21: note = Description of Artificial Sequence: Synthetic oligonucleotide
  source 1..21: mol_type = other RNA
tgttgagttcattgcccaatt

SEQ ID NO: 11480 - RNA, 21 nt, synthetic construct
  misc_feature 1..21: note = Description of Artificial Sequence: Synthetic oligonucleotide
  source 1..21: mol_type = other RNA
tgaaggctgtgttgttatgtt

SEQ ID NO: 11481 - RNA, 21 nt, synthetic construct
  misc_feature 1..21: note = Description of Artificial Sequence: Synthetic oligonucleotide
  source 1..21: mol_type = other RNA
gtaacatccttggtacatatt

SEQ ID NO: 11482 - RNA, 21 nt, synthetic construct
  misc_feature 1..21: note = Description of Artificial Sequence: Synthetic oligonucleotide
  source 1..21: mol_type = other RNA
tactgtaacatccttggtatt

SEQ ID NO: 11483 - RNA, 21 nt, synthetic construct
  misc_feature 1..21: note = Description of Artificial Sequence: Synthetic oligonucleotide
  source 1..21: mol_type = other RNA
tcctgtttactgtaacatctt

SEQ ID NO: 11484 - RNA, 21 nt, synthetic construct
  misc_feature 1..21: note = Description of Artificial Sequence: Synthetic oligonucleotide
  source 1..21: mol_type = other RNA
catcctgtttactgtaacatt

SEQ ID NO: 11485 - RNA, 21 nt, synthetic construct
  misc_feature 1..21: note = Description of Artificial Sequence: Synthetic oligonucleotide
  source 1..21: mol_type = other RNA
aatatggttctttttagcatt

SEQ ID NO: 11486 - RNA, 21 nt, synthetic construct
  misc_feature 1..21: note = Description of Artificial Sequence: Synthetic oligonucleotide
  source 1..21: mol_type = other RNA
tctctaacactcaaaggcctt

SEQ ID NO: 11487 - RNA, 21 nt, synthetic construct
  misc_feature 1..21: note = Description of Artificial Sequence: Synthetic oligonucleotide
  source 1..21: mol_type = other RNA
tttaaggcagttttgtgcctt

SEQ ID NO: 11488 - RNA, 21 nt, synthetic construct
  misc_feature 1..21: note = Description of Artificial Sequence: Synthetic oligonucleotide
  source 1..21: mol_type = other RNA
ccttgagcttgtttcttactt

SEQ ID NO: 11489 - RNA, 21 nt, synthetic construct
  misc_feature 1..21: note = Description of Artificial Sequence: Synthetic oligonucleotide
  source 1..21: mol_type = other RNA
accatctaccttcagtttttt

SEQ ID NO: 11490 - RNA, 21 nt, synthetic construct
  misc_feature 1..21: note = Description of Artificial Sequence: Synthetic oligonucleotide
  source 1..21: mol_type = other RNA
acaccatctaccttcagtttt

SEQ ID NO: 11491 - RNA, 21 nt, synthetic construct
  misc_feature 1..21: note = Description of Artificial Sequence: Synthetic oligonucleotide
  source 1..21: mol_type = other RNA
ttattaactataacaccattt

SEQ ID NO: 11492 - RNA, 21 nt, synthetic construct
  misc_feature 1..21: note = Description of Artificial Sequence: Synthetic oligonucleotide
  source 1..21: mol_type = other RNA
tgtttattgtagaaggaaatt

SEQ ID NO: 11493 - RNA, 21 nt, synthetic construct
  misc_feature 1..21: note = Description of Artificial Sequence: Synthetic oligonucleotide
  source 1..21: mol_type = other RNA
atagctgttgagttcattgtt

SEQ ID NO: 11494 - RNA, 21 nt, synthetic construct
  misc_feature 1..21: note = Description of Artificial Sequence: Synthetic oligonucleotide
  source 1..21: mol_type = other RNA
tagactcaagataatttcatt

SEQ ID NO: 11495 - RNA, 21 nt, synthetic construct
  misc_feature 1..21: note = Description of Artificial Sequence: Synthetic oligonucleotide
  source 1..21: mol_type = other RNA
taaaagacaagctactgcttt

SEQ ID NO: 11496 - RNA, 21 nt, synthetic construct
  misc_feature 1..21: note = Description of Artificial Sequence: Synthetic oligonucleotide
  source 1..21: mol_type = other RNA
tgccgaacaatttttgtgttt

SEQ ID NO: 11497 - RNA, 21 nt, synthetic construct
  misc_feature 1..21: note = Description of Artificial Sequence: Synthetic oligonucleotide
  source 1..21: mol_type = other RNA
tagccgaacaatttttgtgtt

SEQ ID NO: 11498 - RNA, 21 nt, synthetic construct
  misc_feature 1..21: note = Description of Artificial Sequence: Synthetic oligonucleotide
  source 1..21: mol_type = other RNA
tataacaccatctaccttctt

SEQ ID NO: 11499 - RNA, 21 nt, synthetic construct
  misc_feature 1..21: note = Description of Artificial Sequence: Synthetic oligonucleotide
  source 1..21: mol_type = other RNA
taacatccttggtacatattt

SEQ ID NO: 11500 - RNA, 21 nt, synthetic construct
  misc_feature 1..21: note = Description of Artificial Sequence: Synthetic oligonucleotide
  modified_base 1: mod_base = OTHER; note = 2' fluoro-modified nucleoside
  modified_base 1..2: mod_base = OTHER; note = Phosphorothioate linkage
  modified_base 2: mod_base = OTHER; note = 2' O-methyl modified nucleoside
  modified_base 2..3: mod_base = OTHER; note = Phosphorothioate linkage
  modified_base 3: mod_base = OTHER; note = 2' fluoro-modified nucleoside
  modified_base 4: mod_base = OTHER; note = 2' O-methyl modified nucleoside
  modified_base 5: mod_base = OTHER; note = 2' fluoro-modified nucleoside
  modified_base 6: mod_base = OTHER; note = 2' O-methyl modified nucleoside
  modified_base 7: mod_base = OTHER; note = 2' fluoro-modified nucleoside
  modified_base 8: mod_base = OTHER; note = 2' O-methyl modified nucleoside
  modified_base 9: mod_base = OTHER; note = 2' fluoro-modified nucleoside
  modified_base 10: mod_base = OTHER; note = 2' O-methyl modified nucleoside
  modified_base 11: mod_base = OTHER; note = 2' fluoro-modified nucleoside
  modified_base 12: mod_base = OTHER; note = 2' O-methyl modified nucleoside
  modified_base 13: mod_base = OTHER; note = 2' fluoro-modified nucleoside
  modified_base 14: mod_base = OTHER; note = 2' O-methyl modified nucleoside
  modified_base 15: mod_base = OTHER; note = 2' fluoro-modified nucleoside
  modified_base 16: mod_base = OTHER; note = 2' O-methyl modified nucleoside
  modified_base 17: mod_base = OTHER; note = 2' fluoro-modified nucleoside
  modified_base 18: mod_base = OTHER; note = 2' O-methyl modified nucleoside
  modified_base 19: mod_base = OTHER; note = 2' fluoro-modified nucleoside
  modified_base 19..20: mod_base = OTHER; note = Phosphorothioate linkage
  modified_base 20: mod_base = OTHER; note = 2' O-methyl modified nucleoside
  modified_base 20..21: mod_base = OTHER; note = Phosphorothioate linkage
  modified_base 21: mod_base = OTHER; note = 2' O-methyl modified nucleoside
  source 1..21: mol_type = other RNA
atatgtaccaaggatgttatt

SEQ ID NO: 11501 - RNA, 21 nt, synthetic construct
  misc_feature 1..21: note = Description of Artificial Sequence: Synthetic oligonucleotide
  modified_base 1: mod_base = OTHER; note = 2' fluoro-modified nucleoside
  modified_base 1..2: mod_base = OTHER; note = Phosphorothioate linkage
  modified_base 2: mod_base = OTHER; note = 2' O-methyl modified nucleoside
  modified_base 2..3: mod_base = OTHER; note = Phosphorothioate linkage
  modified_base 3: mod_base = OTHER; note = 2' fluoro-modified nucleoside
  modified_base 4: mod_base = OTHER; note = 2' O-methyl modified nucleoside
  modified_base 5: mod_base = OTHER; note = 2' fluoro-modified nucleoside
  modified_base 6: mod_base = OTHER; note = 2' O-methyl modified nucleoside
  modified_base 7: mod_base = OTHER; note = 2' fluoro-modified nucleoside
  modified_base 8: mod_base = OTHER; note = 2' O-methyl modified nucleoside
  modified_base 9: mod_base = OTHER; note = 2' fluoro-modified nucleoside
  modified_base 10: mod_base = OTHER; note = 2' O-methyl modified nucleoside
  modified_base 11: mod_base = OTHER; note = 2' fluoro-modified nucleoside
  modified_base 12: mod_base = OTHER; note = 2' O-methyl modified nucleoside
  modified_base 13: mod_base = OTHER; note = 2' fluoro-modified nucleoside
  modified_base 14: mod_base = OTHER; note = 2' O-methyl modified nucleoside
  modified_base 15: mod_base = OTHER; note = 2' fluoro-modified nucleoside
  modified_base 16: mod_base = OTHER; note = 2' O-methyl modified nucleoside
  modified_base 17: mod_base = OTHER; note = 2' fluoro-modified nucleoside
  modified_base 18: mod_base = OTHER; note = 2' O-methyl modified nucleoside
  modified_base 19: mod_base = OTHER; note = 2' fluoro-modified nucleoside
  modified_base 19..20: mod_base = OTHER; note = Phosphorothioate linkage
  modified_base 20: mod_base = OTHER; note = 2' O-methyl modified nucleoside
  modified_base 20..21: mod_base = OTHER; note = Phosphorothioate linkage
  modified_base 21: mod_base = OTHER; note = 2' O-methyl modified nucleoside
  source 1..21: mol_type = other RNA
atatgtaccaaggatgttatt

SEQ ID NO: 11502 - RNA, 21 nt, synthetic construct
  misc_feature 1..21: note = Description of Artificial Sequence: Synthetic oligonucleotide
  modified_base 1: mod_base = OTHER; note = 2' fluoro-modified nucleoside
  modified_base 1..2: mod_base = OTHER; note = Phosphorothioate linkage
  modified_base 2: mod_base = OTHER; note = 2' O-methyl modified nucleoside
  modified_base 2..3: mod_base = OTHER; note = Phosphorothioate linkage
  modified_base 3: mod_base = OTHER; note = 2' fluoro-modified nucleoside
  modified_base 4: mod_base = OTHER; note = 2' O-methyl modified nucleoside
  modified_base 5: mod_base = OTHER; note = 2' fluoro-modified nucleoside
  modified_base 6: mod_base = OTHER; note = 2' O-methyl modified nucleoside
  modified_base 7: mod_base = OTHER; note = 2' fluoro-modified nucleoside
  modified_base 8: mod_base = OTHER; note = 2' O-methyl modified nucleoside
  modified_base 9: mod_base = OTHER; note = 2' fluoro-modified nucleoside
  modified_base 10: mod_base = OTHER; note = 2' O-methyl modified nucleoside
  modified_base 11: mod_base = OTHER; note = 2' fluoro-modified nucleoside
  modified_base 12: mod_base = OTHER; note = 2' O-methyl modified nucleoside
  modified_base 13: mod_base = OTHER; note = 2' fluoro-modified nucleoside
  modified_base 14: mod_base = OTHER; note = 2' O-methyl modified nucleoside
  modified_base 15: mod_base = OTHER; note = 2' fluoro-modified nucleoside
  modified_base 16: mod_base = OTHER; note = 2' O-methyl modified nucleoside
  modified_base 17: mod_base = OTHER; note = 2' fluoro-modified nucleoside
  modified_base 18: mod_base = OTHER; note = 2' O-methyl modified nucleoside
  modified_base 19: mod_base = OTHER; note = 2' fluoro-modified nucleoside
  modified_base 19..20: mod_base = OTHER; note = Phosphorothioate linkage
  modified_base 20: mod_base = OTHER; note = 2' O-methyl modified nucleoside
  modified_base 20..21: mod_base = OTHER; note = Phosphorothioate linkage
  modified_base 21: mod_base = OTHER; note = 2' O-methyl modified nucleoside
  source 1..21: mol_type = other RNA
agcagtagcttgtcttttatt

SEQ ID NO: 11503 - RNA, 21 nt, synthetic construct
  misc_feature 1..21: note = Description of Artificial Sequence: Synthetic oligonucleotide
  modified_base 1: mod_base = OTHER; note = 2' fluoro-modified nucleoside
  modified_base 1..2: mod_base = OTHER; note = Phosphorothioate linkage
  modified_base 2: mod_base = OTHER; note = 2' O-methyl modified nucleoside
  modified_base 2..3: mod_base = OTHER; note = Phosphorothioate linkage
  modified_base 3: mod_base = OTHER; note = 2' fluoro-modified nucleoside
  modified_base 4: mod_base = OTHER; note = 2' O-methyl modified nucleoside
  modified_base 5: mod_base = OTHER; note = 2' fluoro-modified nucleoside
  modified_base 6: mod_base = OTHER; note = 2' O-methyl modified nucleoside
  modified_base 7: mod_base = OTHER; note = 2' fluoro-modified nucleoside
  modified_base 8: mod_base = OTHER; note = 2' O-methyl modified nucleoside
  modified_base 9: mod_base = OTHER; note = 2' fluoro-modified nucleoside
  modified_base 10: mod_base = OTHER; note = 2' O-methyl modified nucleoside
  modified_base 11: mod_base = OTHER; note = 2' fluoro-modified nucleoside
  modified_base 12: mod_base = OTHER; note = 2' O-methyl modified nucleoside
  modified_base 13: mod_base = OTHER; note = 2' fluoro-modified nucleoside
  modified_base 14: mod_base = OTHER; note = 2' O-methyl modified nucleoside
  modified_base 15: mod_base = OTHER; note = 2' fluoro-modified nucleoside
  modified_base 16: mod_base = OTHER; note = 2' O-methyl modified nucleoside
  modified_base 17: mod_base = OTHER; note = 2' fluoro-modified nucleoside
  modified_base 18: mod_base = OTHER; note = 2' O-methyl modified nucleoside
  modified_base 19: mod_base = OTHER; note = 2' fluoro-modified nucleoside
  modified_base 19..20: mod_base = OTHER; note = Phosphorothioate linkage
  modified_base 20: mod_base = OTHER; note = 2' O-methyl modified nucleoside
  modified_base 20..21: mod_base = OTHER; note = Phosphorothioate linkage
  modified_base 21: mod_base = OTHER; note = 2' O-methyl modified nucleoside
  source 1..21: mol_type = other RNA
gaaggtagatggtgttatatt

SEQ ID NO: 11504 - RNA, 21 nt, synthetic construct
  misc_feature 1..21: note = Description of Artificial Sequence: Synthetic oligonucleotide
  modified_base 1: mod_base = OTHER; note = 2' O-methyl modified nucleoside
  modified_base 1..2: mod_base = OTHER; note = Phosphorothioate linkage
  modified_base 2: mod_base = OTHER; note = 2' fluoro-modified nucleoside
  modified_base 2..3: mod_base = OTHER; note = Phosphorothioate linkage
  modified_base 3: mod_base = OTHER; note = 2' O-methyl modified nucleoside
  modified_base 4: mod_base = OTHER; note = 2' fluoro-modified nucleoside
  modified_base 5: mod_base = OTHER; note = 2' O-methyl modified nucleoside
  modified_base 6: mod_base = OTHER; note = 2' fluoro-modified nucleoside
  modified_base 7: mod_base = OTHER; note = 2' O-methyl modified nucleoside
  modified_base 8: mod_base = OTHER; note = 2' fluoro-modified nucleoside
  modified_base 9: mod_base = OTHER; note = 2' O-methyl modified nucleoside
  modified_base 10: mod_base = OTHER; note = 2' fluoro-modified nucleoside
  modified_base 11: mod_base = OTHER; note = 2' O-methyl modified nucleoside
  modified_base 12: mod_base = OTHER; note = 2' fluoro-modified nucleoside
  modified_base 13: mod_base = OTHER; note = 2' O-methyl modified nucleoside
  modified_base 14: mod_base = OTHER; note = 2' fluoro-modified nucleoside
  modified_base 15: mod_base = OTHER; note = 2' O-methyl modified nucleoside
  modified_base 16: mod_base = OTHER; note = 2' fluoro-modified nucleoside
  modified_base 17: mod_base = OTHER; note = 2' O-methyl modified nucleoside
  modified_base 18: mod_base = OTHER; note = 2' fluoro-modified nucleoside
  modified_base 19: mod_base = OTHER; note = 2' O-methyl modified nucleoside
  modified_base 19..20: mod_base = OTHER; note = Phosphorothioate linkage
  modified_base 20: mod_base = OTHER; note = 2' O-methyl modified nucleoside
  modified_base 20..21: mod_base = OTHER; note = Phosphorothioate linkage
  modified_base 21: mod_base = OTHER; note = 2' O-methyl modified nucleoside
  source 1..21: mol_type = other RNA
taacatccttggtacatattt

SEQ ID NO: 11505 - RNA, 21 nt, synthetic construct
  misc_feature 1..21: note = Description of Artificial Sequence: Synthetic oligonucleotide
  modified_base 1: mod_base = OTHER; note = 2' O-methyl modified nucleoside
  modified_base 1..2: mod_base = OTHER; note = Phosphorothioate linkage
  modified_base 2: mod_base = OTHER; note = 2' fluoro-modified nucleoside
  modified_base 2..3: mod_base = OTHER; note = Phosphorothioate linkage
  modified_base 3: mod_base = OTHER; note = 2' O-methyl modified nucleoside
  modified_base 4: mod_base = OTHER; note = 2' fluoro-modified nucleoside
  modified_base 5: mod_base = OTHER; note = 2' O-methyl modified nucleoside
  modified_base 6: mod_base = OTHER; note = 2' fluoro-modified nucleoside
  modified_base 7: mod_base = OTHER; note = 2' O-methyl modified nucleoside
  modified_base 8: mod_base = OTHER; note = 2' fluoro-modified nucleoside
  modified_base 9: mod_base = OTHER; note = 2' O-methyl modified nucleoside
  modified_base 10: mod_base = OTHER; note = 2' fluoro-modified nucleoside
  modified_base 11: mod_base = OTHER; note = 2' O-methyl modified nucleoside
  modified_base 12: mod_base = OTHER; note = 2' fluoro-modified nucleoside
  modified_base 13: mod_base = OTHER; note = 2' O-methyl modified nucleoside
  modified_base 14: mod_base = OTHER; note = 2' fluoro-modified nucleoside
  modified_base 15: mod_base = OTHER; note = 2' O-methyl modified nucleoside
  modified_base 16: mod_base = OTHER; note = 2' fluoro-modified nucleoside
  modified_base 17: mod_base = OTHER; note = 2' O-methyl modified nucleoside
  modified_base 18: mod_base = OTHER; note = 2' fluoro-modified nucleoside
  modified_base 19: mod_base = OTHER; note = 2' O-methyl modified nucleoside
  modified_base 19..20: mod_base = OTHER; note = Phosphorothioate linkage
  modified_base 20: mod_base = OTHER; note = 2' O-methyl modified nucleoside
  modified_base 20..21: mod_base = OTHER; note = Phosphorothioate linkage
  modified_base 21: mod_base = OTHER; note = 2' O-methyl modified nucleoside
  source 1..21: mol_type = other RNA
taacatccttggtacatattt

SEQ ID NO: 11506 - RNA, 21 nt, synthetic construct
  misc_feature 1..21: note = Description of Artificial Sequence: Synthetic oligonucleotide
  modified_base 1: mod_base = OTHER; note = 2' O-methyl modified nucleoside
  modified_base 1..2: mod_base = OTHER; note = Phosphorothioate linkage
  modified_base 2: mod_base = OTHER; note = 2' fluoro-modified nucleoside
  modified_base 2..3: mod_base = OTHER; note = Phosphorothioate linkage
  modified_base 3: mod_base = OTHER; note = 2' O-methyl modified nucleoside
  modified_base 4: mod_base = OTHER; note = 2' fluoro-modified nucleoside
  modified_base 5: mod_base = OTHER; note = 2' O-methyl modified nucleoside
  modified_base 6: mod_base = OTHER; note = 2' fluoro-modified nucleoside
  modified_base 7: mod_base = OTHER; note = 2' O-methyl modified nucleoside
  modified_base 8: mod_base = OTHER; note = 2' fluoro-modified nucleoside
  modified_base 9: mod_base = OTHER; note = 2' O-methyl modified nucleoside
  modified_base 10: mod_base = OTHER; note = 2' fluoro-modified nucleoside
  modified_base 11: mod_base = OTHER; note = 2' O-methyl modified nucleoside
  modified_base 12: mod_base = OTHER; note = 2' fluoro-modified nucleoside
  modified_base 13: mod_base = OTHER; note = 2' O-methyl modified nucleoside
  modified_base 14: mod_base = OTHER; note = 2' fluoro-modified nucleoside
  modified_base 15: mod_base = OTHER; note = 2' O-methyl modified nucleoside
  modified_base 16: mod_base = OTHER; note = 2' fluoro-modified nucleoside
  modified_base 17: mod_base = OTHER; note = 2' O-methyl modified nucleoside
  modified_base 18: mod_base = OTHER; note = 2' fluoro-modified nucleoside
  modified_base 19: mod_base = OTHER; note = 2' O-methyl modified nucleoside
  modified_base 19..20: mod_base = OTHER; note = Phosphorothioate linkage
  modified_base 20: mod_base = OTHER; note = 2' O-methyl modified nucleoside
  modified_base 20..21: mod_base = OTHER; note = Phosphorothioate linkage
  modified_base 21: mod_base = OTHER; note = 2' O-methyl modified nucleoside
  source 1..21: mol_type = other RNA
taaaagacaagctactgcttt

SEQ ID NO: 11507 - RNA, 21 nt, synthetic construct
  misc_feature 1..21: note = Description of Artificial Sequence: Synthetic oligonucleotide
  modified_base 1: mod_base = OTHER; note = 2' O-methyl modified nucleoside
  modified_base 1..2: mod_base = OTHER; note = Phosphorothioate linkage
  modified_base 2: mod_base = OTHER; note = 2' fluoro-modified nucleoside
  modified_base 2..3: mod_base = OTHER; note = Phosphorothioate linkage
  modified_base 3: mod_base = OTHER; note = 2' O-methyl modified nucleoside
  modified_base 4: mod_base = OTHER; note = 2' fluoro-modified nucleoside
  modified_base 5: mod_base = OTHER; note = 2' O-methyl modified nucleoside
  modified_base 6: mod_base = OTHER; note = 2' fluoro-modified nucleoside
  modified_base 7: mod_base = OTHER; note = 2' O-methyl modified nucleoside
  modified_base 8: mod_base = OTHER; note = 2' fluoro-modified nucleoside
  modified_base 9: mod_base = OTHER; note = 2' O-methyl modified nucleoside
  modified_base 10: mod_base = OTHER; note = 2' fluoro-modified nucleoside
  modified_base 11: mod_base = OTHER; note = 2' O-methyl modified nucleoside
  modified_base 12: mod_base = OTHER; note = 2' fluoro-modified nucleoside
  modified_base 13: mod_base = OTHER; note = 2' O-methyl modified nucleoside
  modified_base 14: mod_base = OTHER; note = 2' fluoro-modified nucleoside
  modified_base 15: mod_base = OTHER; note = 2' O-methyl modified nucleoside
  modified_base 16: mod_base = OTHER; note = 2' fluoro-modified nucleoside
  modified_base 17: mod_base = OTHER; note = 2' O-methyl modified nucleoside
  modified_base 18: mod_base = OTHER; note = 2' fluoro-modified nucleoside
  modified_base 19: mod_base = OTHER; note = 2' O-methyl modified nucleoside
  modified_base 19..20: mod_base = OTHER; note = Phosphorothioate linkage
  modified_base 20: mod_base = OTHER; note = 2' O-methyl modified nucleoside
  modified_base 20..21: mod_base = OTHER; note = Phosphorothioate linkage
  modified_base 21: mod_base = OTHER; note = 2' O-methyl modified nucleoside
  source 1..21: mol_type = other RNA
tataacaccatctaccttctt

SEQ ID NO: 11508-11511 - skipped (4 entries)

SEQ ID NO: 11512 - RNA, 21 nt, synthetic construct
  misc_feature 1..21: note = Description of Artificial Sequence: Synthetic oligonucleotide
  source 1..21: mol_type = other RNA
caaccagattgacatcatgtt

SEQ ID NO: 11513 - RNA, 21 nt, synthetic construct
  misc_feature 1..21: note = Description of Artificial Sequence: Synthetic oligonucleotide
  source 1..21: mol_type = other RNA
caaacatcctcagtcaaaatt

SEQ ID NO: 11514 - RNA, 21 nt, synthetic construct
  misc_feature 1..21: note = Description of Artificial Sequence: Synthetic oligonucleotide
  source 1..21: mol_type = other RNA
cacacagtatgaactactgtt

SEQ ID NO: 11515 - RNA, 21 nt, synthetic construct
  misc_feature 1..21: note = Description of Artificial Sequence: Synthetic oligonucleotide
  source 1..21: mol_type = other RNA
cttacgctgagtacttcgatt

SEQ ID NO: 11516 - RNA, 21 nt, synthetic construct
  misc_feature 1..21: note = Description of Artificial Sequence: Synthetic oligonucleotide
  source 1..21: mol_type = other RNA
catgatgtcaatctggttgtt

SEQ ID NO: 11517 - RNA, 21 nt, synthetic construct
  misc_feature 1..21: note = Description of Artificial Sequence: Synthetic oligonucleotide
  source 1..21: mol_type = other RNA
ttttgactgaggatgtttgtt

SEQ ID NO: 11518 - RNA, 21 nt, synthetic construct
  misc_feature 1..21: note = Description of Artificial Sequence: Synthetic oligonucleotide
  source 1..21: mol_type = other RNA
cagtagttcatactgtgtgtt

SEQ ID NO: 11519 - RNA, 21 nt, synthetic construct
  misc_feature 1..21: note = Description of Artificial Sequence: Synthetic oligonucleotide
  source 1..21: mol_type = other RNA
tcgaagtactcagcgtaagtt

SEQ ID NO: 11520 - RNA, 21 nt, synthetic construct
  misc_feature 1..21: note = Description of Artificial Sequence: Synthetic oligonucleotide
  modified_base 1: mod_base = OTHER; note = 2' fluoro-modified nucleoside
  modified_base 1..2: mod_base = OTHER; note = Phosphorothioate linkage
  modified_base 2: mod_base = OTHER; note = 2' O-methyl modified nucleoside
  modified_base 2..3: mod_base = OTHER; note = Phosphorothioate linkage
  modified_base 3: mod_base = OTHER; note = 2' fluoro-modified nucleoside
  modified_base 4: mod_base = OTHER; note = 2' O-methyl modified nucleoside
  modified_base 5: mod_base = OTHER; note = 2' fluoro-modified nucleoside
  modified_base 6: mod_base = OTHER; note = 2' O-methyl modified nucleoside
  modified_base 7: mod_base = OTHER; note = 2' fluoro-modified nucleoside
  modified_base 8: mod_base = OTHER; note = 2' fluoro-modified nucleoside
  modified_base 9: mod_base = OTHER; note = 2' fluoro-modified nucleoside
  modified_base 10: mod_base = OTHER; note = 2' O-methyl modified nucleoside
  modified_base 11: mod_base = OTHER; note = 2' fluoro-modified nucleoside
  modified_base 12: mod_base = OTHER; note = 2' O-methyl modified nucleoside
  modified_base 13: mod_base = OTHER; note = 2' fluoro-modified nucleoside
  modified_base 14: mod_base = OTHER; note = 2' O-methyl modified nucleoside
  modified_base 15: mod_base = OTHER; note = 2' fluoro-modified nucleoside
  modified_base 16: mod_base = OTHER; note = 2' O-methyl modified nucleoside
  modified_base 17: mod_base = OTHER; note = 2' fluoro-modified nucleoside
  modified_base 18: mod_base = OTHER; note = 2' O-methyl modified nucleoside
  modified_base 19: mod_base = OTHER; note = 2' fluoro-modified nucleoside
  modified_base 19..20: mod_base = OTHER; note = Phosphorothioate linkage
  modified_base 20: mod_base = OTHER; note = 2' O-methyl modified nucleoside
  modified_base 20..21: mod_base = OTHER; note = Phosphorothioate linkage
  modified_base 21: mod_base = OTHER; note = 2' O-methyl modified nucleoside
  source 1..21: mol_type = other RNA
caaccagattgacatcatgtt

SEQ ID NO: 11521 - RNA, 21 nt, synthetic construct
  misc_feature 1..21: note = Description of Artificial Sequence: Synthetic oligonucleotide
  modified_base 1: mod_base = OTHER; note = 2' fluoro-modified nucleoside
  modified_base 1..2: mod_base = OTHER; note = Phosphorothioate linkage
  modified_base 2: mod_base = OTHER; note = 2' O-methyl modified nucleoside
  modified_base 2..3: mod_base = OTHER; note = Phosphorothioate linkage
  modified_base 3: mod_base = OTHER; note = 2' fluoro-modified nucleoside
  modified_base 4: mod_base = OTHER; note = 2' O-methyl modified nucleoside
  modified_base 5: mod_base = OTHER; note = 2' fluoro-modified nucleoside
  modified_base 6: mod_base = OTHER; note = 2' O-methyl modified nucleoside
  modified_base 7: mod_base = OTHER; note = 2' fluoro-modified nucleoside
  modified_base 8: mod_base = OTHER; note = 2' fluoro-modified nucleoside
  modified_base 9: mod_base = OTHER; note = 2' fluoro-modified nucleoside
  modified_base 10: mod_base = OTHER; note = 2' O-methyl modified nucleoside
  modified_base 11: mod_base = OTHER; note = 2' fluoro-modified nucleoside
  modified_base 12: mod_base = OTHER; note = 2' O-methyl modified nucleoside
  modified_base 13: mod_base = OTHER; note = 2' fluoro-modified nucleoside
  modified_base 14: mod_base = OTHER; note = 2' O-methyl modified nucleoside
  modified_base 15: mod_base = OTHER; note = 2' fluoro-modified nucleoside
  modified_base 16: mod_base = OTHER; note = 2' O-methyl modified nucleoside
  modified_base 17: mod_base = OTHER; note = 2' fluoro-modified nucleoside
  modified_base 18: mod_base = OTHER; note = 2' O-methyl modified nucleoside
  modified_base 19: mod_base = OTHER; note = 2' fluoro-modified nucleoside
  modified_base 19..20: mod_base = OTHER; note = Phosphorothioate linkage
  modified_base 20: mod_base = OTHER; note = 2' O-methyl modified nucleoside
  modified_base 20..21: mod_base = OTHER; note = Phosphorothioate linkage
  modified_base 21: mod_base = OTHER; note = 2' O-methyl modified nucleoside
  source 1..21: mol_type = other RNA
caaacatcctcagtcaaaatt

SEQ ID NO: 11522 - RNA, 21 nt, synthetic construct
  misc_feature 1..21: note = Description of Artificial Sequence: Synthetic oligonucleotide
  modified_base 1: mod_base = OTHER; note = 2' O-methyl modified nucleoside
  modified_base 1..2: mod_base = OTHER; note = Phosphorothioate linkage
  modified_base 2: mod_base = OTHER; note = 2' O-methyl modified nucleoside
  modified_base 2..3: mod_base = OTHER; note = Phosphorothioate linkage
  modified_base 3: mod_base = OTHER; note = 2' O-methyl modified nucleoside
  modified_base 4: mod_base = OTHER; note = 2' O-methyl modified nucleoside
  modified_base 5: mod_base = OTHER; note = 2' fluoro-modified nucleoside
  modified_base 6: mod_base = OTHER; note = 2' O-methyl modified nucleoside
  modified_base 7: mod_base = OTHER; note = 2' fluoro-modified nucleoside
  modified_base 8: mod_base = OTHER; note = 2' fluoro-modified nucleoside
  modified_base 9: mod_base = OTHER; note = 2' fluoro-modified nucleoside
  modified_base 10: mod_base = OTHER; note = 2' O-methyl modified nucleoside
  modified_base 11: mod_base = OTHER; note = 2' O-methyl modified nucleoside
  modified_base 12: mod_base = OTHER; note = 2' O-methyl modified nucleoside
  modified_base 13: mod_base = OTHER; note = 2' O-methyl modified nucleoside
  modified_base 14: mod_base = OTHER; note = 2' O-methyl modified nucleoside
  modified_base 15: mod_base = OTHER; note = 2' O-methyl modified nucleoside
  modified_base 16: mod_base = OTHER; note = 2' O-methyl modified nucleoside
  modified_base 17: mod_base = OTHER; note = 2' O-methyl modified nucleoside
  modified_base 18: mod_base = OTHER; note = 2' O-methyl modified nucleoside
  modified_base 19: mod_base = OTHER; note = 2' O-methyl modified nucleoside
  modified_base 19..20: mod_base = OTHER; note = Phosphorothioate linkage
  modified_base 20: mod_base = OTHER; note = 2' O-methyl modified nucleoside
  modified_base 20..21: mod_base = OTHER; note = Phosphorothioate linkage
  modified_base 21: mod_base = OTHER; note = 2' O-methyl modified nucleoside
  source 1..21: mol_type = other RNA
cacacagtatgaactactgtt

SEQ ID NO: 11523 - RNA, 21 nt, synthetic construct
  misc_feature 1..21: note = Description of Artificial Sequence: Synthetic oligonucleotide
  modified_base 1: mod_base = OTHER; note = 2' O-methyl modified nucleoside
  modified_base 1..2: mod_base = OTHER; note = Phosphorothioate linkage
  modified_base 2: mod_base = OTHER; note = 2' O-methyl modified nucleoside
  modified_base 2..3: mod_base = OTHER; note = Phosphorothioate linkage
  modified_base 3: mod_base = OTHER; note = 2' O-methyl modified nucleoside
  modified_base 4: mod_base = OTHER; note = 2' O-methyl modified nucleoside
  modified_base 5: mod_base = OTHER; note = 2' fluoro-modified nucleoside
  modified_base 6: mod_base = OTHER; note = 2' O-methyl modified nucleoside
  modified_base 7: mod_base = OTHER; note = 2' fluoro-modified nucleoside
  modified_base 8: mod_base = OTHER; note = 2' fluoro-modified nucleoside
  modified_base 9: mod_base = OTHER; note = 2' fluoro-modified nucleoside
  modified_base 10: mod_base = OTHER; note = 2' O-methyl modified nucleoside
  modified_base 11: mod_base = OTHER; note = 2' O-methyl modified nucleoside
  modified_base 12: mod_base = OTHER; note = 2' O-methyl modified nucleoside
  modified_base 13: mod_base = OTHER; note = 2' O-methyl modified nucleoside
  modified_base 14: mod_base = OTHER; note = 2' O-methyl modified nucleoside
  modified_base 15: mod_base = OTHER; note = 2' O-methyl modified nucleoside
  modified_base 16: mod_base = OTHER; note = 2' O-methyl modified nucleoside
  modified_base 17: mod_base = OTHER; note = 2' O-methyl modified nucleoside
  modified_base 18: mod_base = OTHER; note = 2' O-methyl modified nucleoside
  modified_base 19: mod_base = OTHER; note = 2' O-methyl modified nucleoside
  modified_base 19..20: mod_base = OTHER; note = Phosphorothioate linkage
  modified_base 20: mod_base = OTHER; note = 2' O-methyl modified nucleoside
  modified_base 20..21: mod_base = OTHER; note = Phosphorothioate linkage
  modified_base 21: mod_base = OTHER; note = 2' O-methyl modified nucleoside
  source 1..21: mol_type = other RNA
cttacgctgagtacttcgatt

SEQ ID NO: 11524 - RNA, 21 nt, synthetic construct
  misc_feature 1..21: note = Description of Artificial Sequence: Synthetic oligonucleotide
  modified_base 1: mod_base = OTHER; note = 2' O-methyl modified nucleoside
  modified_base 1..2: mod_base = OTHER; note = Phosphorothioate linkage
  modified_base 2: mod_base = OTHER; note = 2' fluoro-modified nucleoside
  modified_base 2..3: mod_base = OTHER; note = Phosphorothioate linkage
  modified_base 3: mod_base = OTHER; note = 2' O-methyl modified nucleoside
  modified_base 4: mod_base = OTHER; note = 2' fluoro-modified nucleoside
  modified_base 5: mod_base = OTHER; note = 2' O-methyl modified nucleoside
  modified_base 6: mod_base = OTHER; note = 2' fluoro-modified nucleoside
  modified_base 7: mod_base = OTHER; note = 2' O-methyl modified nucleoside
  modified_base 8: mod_base = OTHER; note = 2' fluoro-modified nucleoside
  modified_base 9: mod_base = OTHER; note = 2' O-methyl modified nucleoside
  modified_base 10: mod_base = OTHER; note = 2' fluoro-modified nucleoside
  modified_base 11: mod_base = OTHER; note = 2' O-methyl modified nucleoside
  modified_base 12: mod_base = OTHER; note = 2' O-methyl modified nucleoside
  modified_base 13: mod_base = OTHER; note = 2' O-methyl modified nucleoside
  modified_base 14: mod_base = OTHER; note = 2' fluoro-modified nucleoside
  modified_base 15: mod_base = OTHER; note = 2' O-methyl modified nucleoside
  modified_base 16: mod_base = OTHER; note = 2' fluoro-modified nucleoside
  modified_base 17: mod_base = OTHER; note = 2' O-methyl modified nucleoside
  modified_base 18: mod_base = OTHER; note = 2' fluoro-modified nucleoside
  modified_base 19: mod_base = OTHER; note = 2' O-methyl modified nucleoside
  modified_base 19..20: mod_base = OTHER; note = Phosphorothioate linkage
  modified_base 20: mod_base = OTHER; note = 2' O-methyl modified nucleoside
  modified_base 20..21: mod_base = OTHER; note = Phosphorothioate linkage
  modified_base 21: mod_base = OTHER; note = 2' O-methyl modified nucleoside
  source 1..21: mol_type = other RNA
catgatgtcaatctggttgtt

SEQ ID NO: 11525 - RNA, 21 nt, synthetic construct
  misc_feature 1..21: note = Description of Artificial Sequence: Synthetic oligonucleotide
  modified_base 1: mod_base = OTHER; note = 2' O-methyl modified nucleoside
  modified_base 1..2: mod_base = OTHER; note = Phosphorothioate linkage
  modified_base 2: mod_base = OTHER; note = 2' fluoro-modified nucleoside
  modified_base 2..3: mod_base = OTHER; note = Phosphorothioate linkage
  modified_base 3: mod_base = OTHER; note = 2' O-methyl modified nucleoside
  modified_base 4: mod_base = OTHER; note = 2' fluoro-modified nucleoside
  modified_base 5: mod_base = OTHER; note = 2' O-methyl modified nucleoside
  modified_base 6: mod_base = OTHER; note = 2' fluoro-modified nucleoside
  modified_base 7: mod_base = OTHER; note = 2' O-methyl modified nucleoside
  modified_base 8: mod_base = OTHER; note = 2' fluoro-modified nucleoside
  modified_base 9: mod_base = OTHER; note = 2' O-methyl modified nucleoside
  modified_base 10: mod_base = OTHER; note = 2' fluoro-modified nucleoside
  modified_base 11: mod_base = OTHER; note = 2' O-methyl modified nucleoside
  modified_base 12: mod_base = OTHER; note = 2' O-methyl modified nucleoside
  modified_base 13: mod_base = OTHER; note = 2' O-methyl modified nucleoside
  modified_base 14: mod_base = OTHER; note = 2' fluoro-modified nucleoside
  modified_base 15: mod_base = OTHER; note = 2' O-methyl modified nucleoside
  modified_base 16: mod_base = OTHER; note = 2' fluoro-modified nucleoside
  modified_base 17: mod_base = OTHER; note = 2' O-methyl modified nucleoside
  modified_base 18: mod_base = OTHER; note = 2' fluoro-modified nucleoside
  modified_base 19: mod_base = OTHER; note = 2' O-methyl modified nucleoside
  modified_base 19..20: mod_base = OTHER; note = Phosphorothioate linkage
  modified_base 20: mod_base = OTHER; note = 2' O-methyl modified nucleoside
  modified_base 20..21: mod_base = OTHER; note = Phosphorothioate linkage
  modified_base 21: mod_base = OTHER; note = 2' O-methyl modified nucleoside
  source 1..21: mol_type = other RNA
ttttgactgaggatgtttgtt

SEQ ID NO: 11526 - RNA, 21 nt, synthetic construct
  misc_feature 1..21: note = Description of Artificial Sequence: Synthetic oligonucleotide
  modified_base 1: mod_base = OTHER; note = 2' O-methyl modified nucleoside
  modified_base 1..2: mod_base = OTHER; note = Phosphorothioate linkage
  modified_base 2: mod_base = OTHER; note = 2' fluoro-modified nucleoside
  modified_base 2..3: mod_base = OTHER; note = Phosphorothioate linkage
  modified_base 3: mod_base = OTHER; note = 2' O-methyl modified nucleoside
  modified_base 4: mod_base = OTHER; note = 2' O-methyl modified nucleoside
  modified_base 5: mod_base = OTHER; note = 2' O-methyl modified nucleoside
  modified_base 6: mod_base = OTHER; note = 2' fluoro-modified nucleoside
  modified_base 7: mod_base = OTHER; note = 2' O-methyl modified nucleoside
  modified_base 8: mod_base = OTHER; note = 2' O-methyl modified nucleoside
  modified_base 9: mod_base = OTHER; note = 2' O-methyl modified nucleoside
  modified_base 10: mod_base = OTHER; note = 2' O-methyl modified nucleoside
  modified_base 11: mod_base = OTHER; note = 2' O-methyl modified nucleoside
  modified_base 12: mod_base = OTHER; note = 2' O-methyl modified nucleoside
  modified_base 13: mod_base = OTHER; note = 2' O-methyl modified nucleoside
  modified_base 14: mod_base = OTHER; note = 2' fluoro-modified nucleoside
  modified_base 15: mod_base = OTHER; note = 2' O-methyl modified nucleoside
  modified_base 16: mod_base = OTHER; note = 2' fluoro-modified nucleoside
  modified_base 17: mod_base = OTHER; note = 2' O-methyl modified nucleoside
  modified_base 18: mod_base = OTHER; note = 2' O-methyl modified nucleoside
  modified_base 19: mod_base = OTHER; note = 2' O-methyl modified nucleoside
  modified_base 19..20: mod_base = OTHER; note = Phosphorothioate linkage
  modified_base 20: mod_base = OTHER; note = 2' O-methyl modified nucleoside
  modified_base 20..21: mod_base = OTHER; note = Phosphorothioate linkage
  modified_base 21: mod_base = OTHER; note = 2' O-methyl modified nucleoside
  source 1..21: mol_type = other RNA
cagtagttcatactgtgtgtt

SEQ ID NO: 11527 - RNA, 21 nt, synthetic construct
  misc_feature 1..21: note = Description of Artificial Sequence: Synthetic oligonucleotide
  modified_base 1: mod_base = OTHER; note = 2' O-methyl modified nucleoside
  modified_base 1..2: mod_base = OTHER; note = Phosphorothioate linkage
  modified_base 2: mod_base = OTHER; note = 2' fluoro-modified nucleoside
  modified_base 2..3: mod_base = OTHER; note = Phosphorothioate linkage
  modified_base 3: mod_base = OTHER; note = 2' O-methyl modified nucleoside
  modified_base 4: mod_base = OTHER; note = 2' O-methyl modified nucleoside
  modified_base 5: mod_base = OTHER; note = 2' O-methyl modified nucleoside
  modified_base 6: mod_base = OTHER; note = 2' fluoro-modified nucleoside
  modified_base 7: mod_base = OTHER; note = 2' O-methyl modified nucleoside
  modified_base 8: mod_base = OTHER; note = 2' O-methyl modified nucleoside
  modified_base 9: mod_base = OTHER; note = 2' O-methyl modified nucleoside
  modified_base 10: mod_base = OTHER; note = 2' O-methyl modified nucleoside
  modified_base 11: mod_base = OTHER; note = 2' O-methyl modified nucleoside
  modified_base 12: mod_base = OTHER; note = 2' O-methyl modified nucleoside
  modified_base 13: mod_base = OTHER; note = 2' O-methyl modified nucleoside
  modified_base 14: mod_base = OTHER; note = 2' fluoro-modified nucleoside
  modified_base 15: mod_base = OTHER; note = 2' O-methyl modified nucleoside
  modified_base 16: mod_base = OTHER; note = 2' fluoro-modified nucleoside
  modified_base 17: mod_base = OTHER; note = 2' O-methyl modified nucleoside
  modified_base 18: mod_base = OTHER; note = 2' O-methyl modified nucleoside
  modified_base 19: mod_base = OTHER; note = 2' O-methyl modified nucleoside
  modified_base 19..20: mod_base = OTHER; note = Phosphorothioate linkage
  modified_base 20: mod_base = OTHER; note = 2' O-methyl modified nucleoside
  modified_base 20..21: mod_base = OTHER; note = Phosphorothioate linkage
  modified_base 21: mod_base = OTHER; note = 2' O-methyl modified nucleoside
  source 1..21: mol_type = other RNA
tcgaagtactcagcgtaagtt

SEQ ID NO: 11528 - RNA, 21 nt, synthetic construct
  misc_feature 1..21: note = Description of Artificial Sequence: Synthetic oligonucleotide
  modified_base 1: mod_base = OTHER; note = 2' O-methyl modified nucleoside
  modified_base 1..2: mod_base = OTHER; note = Phosphorothioate linkage
  modified_base 2: mod_base = OTHER; note = 2' fluoro-modified nucleoside
  modified_base 2..3: mod_base = OTHER; note = Phosphorothioate linkage
  modified_base 3: mod_base = OTHER; note = 2' O-methyl modified nucleoside
  modified_base 4: mod_base = OTHER; note = 2' O-methyl modified nucleoside
  modified_base 5: mod_base = OTHER; note = 2' O-methyl modified nucleoside
  modified_base 6: mod_base = OTHER; note = 2' fluoro-modified nucleoside
  modified_base 7: mod_base = OTHER; note = 2' O-methyl modified nucleoside
  modified_base 8: mod_base = OTHER; note = 2' O-methyl modified nucleoside
  modified_base 9: mod_base = OTHER; note = 2' O-methyl modified nucleoside
  modified_base 10: mod_base = OTHER; note = 2' O-methyl modified nucleoside
  modified_base 11: mod_base = OTHER; note = 2' O-methyl modified nucleoside
  modified_base 12: mod_base = OTHER; note = 2' O-methyl modified nucleoside
  modified_base 13: mod_base = OTHER; note = 2' O-methyl modified nucleoside
  modified_base 14: mod_base = OTHER; note = 2' fluoro-modified nucleoside
  modified_base 15: mod_base = OTHER; note = 2' O-methyl modified nucleoside
  modified_base 16: mod_base = OTHER; note = 2' fluoro-modified nucleoside
  modified_base 17: mod_base = OTHER; note = 2' O-methyl modified nucleoside
  modified_base 18: mod_base = OTHER; note = 2' O-methyl modified nucleoside
  modified_base 19: mod_base = OTHER; note = 2' O-methyl modified nucleoside
  modified_base 19..20: mod_base = OTHER; note = Phosphorothioate linkage
  modified_base 20: mod_base = OTHER; note = 2' O-methyl modified nucleoside
  modified_base 20..21: mod_base = OTHER; note = Phosphorothioate linkage
  modified_base 21: mod_base = OTHER; note = 2' O-methyl modified nucleoside
  source 1..21: mol_type = other RNA
tcgaagtactcagcgtaagtt

SEQ ID NO: 11529 - RNA, 19 nt, synthetic construct
  misc_feature 1..19: note = Description of Artificial Sequence: Synthetic oligonucleotide
  source 1..19: mol_type = other RNA
tatgtaccaaggatgttac

SEQ ID NO: 11530 - RNA, 19 nt, synthetic construct
  misc_feature 1..19: note = Description of Artificial Sequence: Synthetic oligonucleotide
  source 1..19: mol_type = other RNA
taccaaggatgttacagta

SEQ ID NO: 11531 - RNA, 19 nt, synthetic construct
  misc_feature 1..19: note = Description of Artificial Sequence: Synthetic oligonucleotide
  source 1..19: mol_type = other RNA
aactgaaggtagatggtgt

SEQ ID NO: 11532 - RNA, 19 nt, synthetic construct
  misc_feature 1..19: note = Description of Artificial Sequence: Synthetic oligonucleotide
  source 1..19: mol_type = other RNA
atggtgttatagttaataa

SEQ ID NO: 11533 - RNA, 19 nt, synthetic construct
  misc_feature 1..19: note = Description of Artificial Sequence: Synthetic oligonucleotide
  source 1..19: mol_type = other RNA
caatgaactcaacagctat

SEQ ID NO: 11534 - RNA, 19 nt, synthetic construct
  misc_feature 1..19: note = Description of Artificial Sequence: Synthetic oligonucleotide
  source 1..19: mol_type = other RNA
gtaacatccttggtacata

SEQ ID NO: 11535 - RNA, 19 nt, synthetic construct
  misc_feature 1..19: note = Description of Artificial Sequence: Synthetic oligonucleotide
  source 1..19: mol_type = other RNA
tactgtaacatccttggta

SEQ ID NO: 11536 - RNA, 19 nt, synthetic construct
  misc_feature 1..19: note = Description of Artificial Sequence: Synthetic oligonucleotide
  source 1..19: mol_type = other RNA
acaccatctaccttcagtt

SEQ ID NO: 11537 - RNA, 19 nt, synthetic construct
  misc_feature 1..19: note = Description of Artificial Sequence: Synthetic oligonucleotide
  source 1..19: mol_type = other RNA
ttattaactataacaccat

SEQ ID NO: 11538 - RNA, 19 nt, synthetic construct
  misc_feature 1..19: note = Description of Artificial Sequence: Synthetic oligonucleotide
  source 1..19: mol_type = other RNA
atagctgttgagttcattg

SEQ ID NO: 11539 - RNA, 21 nt, synthetic construct
  misc_feature 1..21: note = Description of Artificial Sequence: Synthetic oligonucleotide
  modified_base 1: mod_base = OTHER; note = 2' O-methyl modified nucleoside
  modified_base 1..2: mod_base = OTHER; note = Phosphorothioate linkage
  modified_base 2: mod_base = OTHER; note = 2' fluoro-modified nucleoside
  modified_base 2..3: mod_base = OTHER; note = Phosphorothioate linkage
  modified_base 3: mod_base = OTHER; note = 2' O-methyl modified nucleoside
  modified_base 4: mod_base = OTHER; note = 2' O-methyl modified nucleoside
  modified_base 5: mod_base = OTHER; note = 2' O-methyl modified nucleoside
  modified_base 6: mod_base = OTHER; note = 2' fluoro-modified nucleoside
  modified_base 7: mod_base = OTHER; note = 2' O-methyl modified nucleoside
  modified_base 8: mod_base = OTHER; note = 2' O-methyl modified nucleoside
  modified_base 9: mod_base = OTHER; note = 2' O-methyl modified nucleoside
  modified_base 10: mod_base = OTHER; note = 2' O-methyl modified nucleoside
  modified_base 11: mod_base = OTHER; note = 2' O-methyl modified nucleoside
  modified_base 12: mod_base = OTHER; note = 2' O-methyl modified nucleoside
  modified_base 13: mod_base = OTHER; note = 2' O-methyl modified nucleoside
  modified_base 14: mod_base = OTHER; note = 2' fluoro-modified nucleoside
  modified_base 15: mod_base = OTHER; note = 2' O-methyl modified nucleoside
  modified_base 16: mod_base = OTHER; note = 2' fluoro-modified nucleoside
  modified_base 17: mod_base = OTHER; note = 2' O-methyl modified nucleoside
  modified_base 18: mod_base = OTHER; note = 2' O-methyl modified nucleoside
  modified_base 19: mod_base = OTHER; note = 2' O-methyl modified nucleoside
  modified_base 19..20: mod_base = OTHER; note = Phosphorothioate linkage
  modified_base 20: mod_base = OTHER; note = 2' O-methyl modified nucleoside
  modified_base 20..21: mod_base = OTHER; note = Phosphorothioate linkage
  modified_base 21: mod_base = OTHER; note = 2' O-methyl modified nucleoside
  source 1..21: mol_type = other RNA
ttaacatccttggtacatatt

SEQ ID NO: 11540 - RNA, 21 nt, synthetic construct
  misc_feature 1..21: note = Description of Artificial Sequence: Synthetic oligonucleotide
  modified_base 1: mod_base = OTHER; note = 2' O-methyl modified nucleoside
  modified_base 1..2: mod_base = OTHER; note = Phosphorothioate linkage
  modified_base 2: mod_base = OTHER; note = 2' fluoro-modified nucleoside
  modified_base 2..3: mod_base = OTHER; note = Phosphorothioate linkage
  modified_base 3: mod_base = OTHER; note = 2' O-methyl modified nucleoside
  modified_base 4: mod_base = OTHER; note = 2' O-methyl modified nucleoside
  modified_base 5: mod_base = OTHER; note = 2' O-methyl modified nucleoside
  modified_base 6: mod_base = OTHER; note = 2' fluoro-modified nucleoside
  modified_base 7: mod_base = OTHER; note = 2' O-methyl modified nucleoside
  modified_base 8: mod_base = OTHER; note = 2' O-methyl modified nucleoside
  modified_base 9: mod_base = OTHER; note = 2' O-methyl modified nucleoside
  modified_base 10: mod_base = OTHER; note = 2' O-methyl modified nucleoside
  modified_base 11: mod_base = OTHER; note = 2' O-methyl modified nucleoside
  modified_base 12: mod_base = OTHER; note = 2' O-methyl modified nucleoside
  modified_base 13: mod_base = OTHER; note = 2' O-methyl modified nucleoside
  modified_base 14: mod_base = OTHER; note = 2' fluoro-modified nucleoside
  modified_base 15: mod_base = OTHER; note = 2' O-methyl modified nucleoside
  modified_base 16: mod_base = OTHER; note = 2' fluoro-modified nucleoside
  modified_base 17: mod_base = OTHER; note = 2' O-methyl modified nucleoside
  modified_base 18: mod_base = OTHER; note = 2' O-methyl modified nucleoside
  modified_base 19: mod_base = OTHER; note = 2' O-methyl modified nucleoside
  modified_base 19..20: mod_base = OTHER; note = Phosphorothioate linkage
  modified_base 20: mod_base = OTHER; note = 2' O-methyl modified nucleoside
  modified_base 20..21: mod_base = OTHER; note = Phosphorothioate linkage
  modified_base 21: mod_base = OTHER; note = 2' O-methyl modified nucleoside
  source 1..21: mol_type = other RNA
tcgaagtactcagcgtaagtt

SEQ ID NO: 11541-11544 - skipped (4 entries)

SEQ ID NO: 11545 - RNA, 21 nt, synthetic construct
  misc_feature 1..21: note = Description of Artificial Sequence: Synthetic oligonucleotide
  modified_base 1: mod_base = OTHER; note = 2' O-methyl modified nucleoside
  modified_base 1..2: mod_base = OTHER; note = Phosphorothioate linkage
  modified_base 2: mod_base = OTHER; note = 2' fluoro-modified nucleoside
  modified_base 2..3: mod_base = OTHER; note = Phosphorothioate linkage
  modified_base 3: mod_base = OTHER; note = 2' O-methyl modified nucleoside
  modified_base 4: mod_base = OTHER; note = 2' fluoro-modified nucleoside
  modified_base 5: mod_base = OTHER; note = 2' O-methyl modified nucleoside
  modified_base 6: mod_base = OTHER; note = 2' fluoro-modified nucleoside
  modified_base 7: mod_base = OTHER; note = 2' O-methyl modified nucleoside
  modified_base 8: mod_base = OTHER; note = 2' fluoro-modified nucleoside
  modified_base 9: mod_base = OTHER; note = 2' fluoro-modified nucleoside
  modified_base 10: mod_base = OTHER; note = 2' O-methyl modified nucleoside
  modified_base 11: mod_base = OTHER; note = 2' O-methyl modified nucleoside
  modified_base 12: mod_base = OTHER; note = 2' O-methyl modified nucleoside
  modified_base 13: mod_base = OTHER; note = 2' O-methyl modified nucleoside
  modified_base 14: mod_base = OTHER; note = 2' O-methyl modified nucleoside
  modified_base 15: mod_base = OTHER; note = 2' fluoro-modified nucleoside
  modified_base 16: mod_base = OTHER; note = 2' O-methyl modified nucleoside
  modified_base 17: mod_base = OTHER; note = 2' fluoro-modified nucleoside
  modified_base 18: mod_base = OTHER; note = 2' fluoro-modified nucleoside
  modified_base 19: mod_base = OTHER; note = 2' O-methyl modified nucleoside
  modified_base 19..20: mod_base = OTHER; note = Phosphorothioate linkage
  modified_base 20: mod_base = OTHER; note = 2' O-methyl modified nucleoside
  modified_base 20..21: mod_base = OTHER; note = Phosphorothioate linkage
  modified_base 21: mod_base = OTHER; note = 2' O-methyl modified nucleoside
  source 1..21: mol_type = other RNA
atatgtaccaaggatgttatt

SEQ ID NO: 11546 - RNA, 21 nt, synthetic construct
  misc_feature 1..21: note = Description of Artificial Sequence: Synthetic oligonucleotide
  modified_base 1: mod_base = OTHER; note = 2' fluoro-modified nucleoside
  modified_base 1..2: mod_base = OTHER; note = Phosphorothioate linkage
  modified_base 2: mod_base = OTHER; note = 2' O-methyl modified nucleoside
  modified_base 2..3: mod_base = OTHER; note = Phosphorothioate linkage
  modified_base 3: mod_base = OTHER; note = 2' fluoro-modified nucleoside
  modified_base 4: mod_base = OTHER; note = 2' O-methyl modified nucleoside
  modified_base 5: mod_base = OTHER; note = 2' fluoro-modified nucleoside
  modified_base 6: mod_base = OTHER; note = 2' O-methyl modified nucleoside
  modified_base 7: mod_base = OTHER; note = 2' fluoro-modified nucleoside
  modified_base 8: mod_base = OTHER; note = 2' O-methyl modified nucleoside
  modified_base 9: mod_base = OTHER; note = 2' O-methyl modified nucleoside
  modified_base 10: mod_base = OTHER; note = 2' fluoro-modified nucleoside
  modified_base 11: mod_base = OTHER; note = 2' fluoro-modified nucleoside
  modified_base 12: mod_base = OTHER; note = 2' fluoro-modified nucleoside
  modified_base 13: mod_base = OTHER; note = 2' fluoro-modified nucleoside
  modified_base 14: mod_base = OTHER; note = 2' fluoro-modified nucleoside
  modified_base 15: mod_base = OTHER; note = 2' O-methyl modified nucleoside
  modified_base 16: mod_base = OTHER; note = 2' fluoro-modified nucleoside
  modified_base 17: mod_base = OTHER; note = 2' O-methyl modified nucleoside
  modified_base 18: mod_base = OTHER; note = 2' O-methyl modified nucleoside
  modified_base 19: mod_base = OTHER; note = 2' fluoro-modified nucleoside
  modified_base 19..20: mod_base = OTHER; note = Phosphorothioate linkage
  modified_base 20: mod_base = OTHER; note = 2' O-methyl modified nucleoside
  modified_base 20..21: mod_base = OTHER; note = Phosphorothioate linkage
  modified_base 21: mod_base = OTHER; note = 2' O-methyl modified nucleoside
  source 1..21: mol_type = other RNA
atatgtaccaaggatgttatt

SEQ ID NO: 11547 - RNA, 21 nt, synthetic construct
  misc_feature 1..21: note = Description of Artificial Sequence: Synthetic oligonucleotide
  modified_base 1: mod_base = OTHER; note = 2' O-methyl modified nucleoside
  modified_base 1..2: mod_base = OTHER; note = Phosphorothioate linkage
  modified_base 2: mod_base = OTHER; note = 2' fluoro-modified nucleoside
  modified_base 2..3: mod_base = OTHER; note = Phosphorothioate linkage
  modified_base 3: mod_base = OTHER; note = 2' O-methyl modified nucleoside
  modified_base 4: mod_base = OTHER; note = 2' O-methyl modified nucleoside
  modified_base 5: mod_base = OTHER; note = 2' O-methyl modified nucleoside
  modified_base 6: mod_base = OTHER; note = 2' O-methyl modified nucleoside
  modified_base 7: mod_base = OTHER; note = 2' O-methyl modified nucleoside
  modified_base 8: mod_base = OTHER; note = 2' O-methyl modified nucleoside
  modified_base 9: mod_base = OTHER; note = 2' O-methyl modified nucleoside
  modified_base 10: mod_base = OTHER; note = 2' O-methyl modified nucleoside
  modified_base 11: mod_base = OTHER; note = 2' O-methyl modified nucleoside
  modified_base 12: mod_base = OTHER; note = 2' fluoro-modified nucleoside
  modified_base 13: mod_base = OTHER; note = 2' O-methyl modified nucleoside
  modified_base 14: mod_base = OTHER; note = 2' fluoro-modified nucleoside
  modified_base 15: mod_base = OTHER; note = 2' O-methyl modified nucleoside
  modified_base 16: mod_base = OTHER; note = 2' fluoro-modified nucleoside
  modified_base 17: mod_base = OTHER; note = 2' O-methyl modified nucleoside
  modified_base 18: mod_base = OTHER; note = 2' fluoro-modified nucleoside
  modified_base 19: mod_base = OTHER; note = 2' O-methyl modified nucleoside
  modified_base 19..20: mod_base = OTHER; note = Phosphorothioate linkage
  modified_base 20: mod_base = OTHER; note = 2' O-methyl modified nucleoside
  modified_base 20..21: mod_base = OTHER; note = Phosphorothioate linkage
  modified_base 21: mod_base = OTHER; note = 2' O-methyl modified nucleoside
  source 1..21: mol_type = other RNA
taacatccttggtacatattt

SEQ ID NO: 11548 - RNA, 21 nt, synthetic construct
  misc_feature 1..21: note = Description of Artificial Sequence: Synthetic oligonucleotide
  modified_base 1: mod_base = OTHER; note = 2' O-methyl modified nucleoside
  modified_base 1..2: mod_base = OTHER; note = Phosphorothioate linkage
  modified_base 2: mod_base = OTHER; note = 2' fluoro-modified nucleoside
  modified_base 2..3: mod_base = OTHER; note = Phosphorothioate linkage
  modified_base 3: mod_base = OTHER; note = 2' fluoro-modified nucleoside
  modified_base 4: mod_base = OTHER; note = 2' O-methyl modified nucleoside
  modified_base 5: mod_base = OTHER; note = 2' fluoro-modified nucleoside
  modified_base 6: mod_base = OTHER; note = 2' O-methyl modified nucleoside
  modified_base 7: mod_base = OTHER; note = 2' O-methyl modified nucleoside
  modified_base 8: mod_base = OTHER; note = 2' O-methyl modified nucleoside
  modified_base 9: mod_base = OTHER; note = 2' O-methyl modified nucleoside
  modified_base 10: mod_base = OTHER; note = 2' O-methyl modified nucleoside
  modified_base 11: mod_base = OTHER; note = 2' O-methyl modified nucleoside
  modified_base 12: mod_base = OTHER; note = 2' fluoro-modified nucleoside
  modified_base 13: mod_base = OTHER; note = 2' O-methyl modified nucleoside
  modified_base 14: mod_base = OTHER; note = 2' fluoro-modified nucleoside
  modified_base 15: mod_base = OTHER; note = 2' O-methyl modified nucleoside
  modified_base 16: mod_base = OTHER; note = 2' fluoro-modified nucleoside
  modified_base 17: mod_base = OTHER; note = 2' O-methyl modified nucleoside
  modified_base 18: mod_base = OTHER; note = 2' fluoro-modified nucleoside
  modified_base 19: mod_base = OTHER; note = 2' O-methyl modified nucleoside
  modified_base 19..20: mod_base = OTHER; note = Phosphorothioate linkage
  modified_base 20: mod_base = OTHER; note = 2' O-methyl modified nucleoside
  modified_base 20..21: mod_base = OTHER; note = Phosphorothioate linkage
  modified_base 21: mod_base = OTHER; note = 2' O-methyl modified nucleoside
  source 1..21: mol_type = other RNA
taacatccttggtacatattt

SEQ ID NO: 11549 - RNA, 21 nt, synthetic construct
  source 1..21: mol_type = other RNA
  modified_base 1: mod_base = OTHER; note = 2-fluoro-modified nucleoside
  modified_base 3: mod_base = OTHER; note = 2-fluoro-modified nucleoside
  modified_base 13: mod_base = OTHER; note = 2-fluoro-modified nucleoside
  modified_base 5: mod_base = OTHER; note = 2-fluoro-modified nucleoside
  modified_base 7: mod_base = OTHER; note = 2-fluoro-modified nucleoside
  modified_base 8: mod_base = OTHER; note = 2-fluoro-modified nucleoside
  modified_base 11: mod_base = OTHER; note = 2-fluoro-modified nucleoside
  modified_base 13: mod_base = OTHER; note = 2-fluoro-modified nucleoside
  modified_base 15: mod_base = OTHER; note = 2-fluoro-modified nucleoside
  modified_base 17: mod_base = OTHER; note = 2-fluoro-modified nucleoside
  modified_base 9: mod_base = OTHER; note = 2-fluoro-modified nucleoside
  modified_base 17: mod_base = OTHER; note = 2-fluoro-modified nucleoside
  modified_base 19: mod_base = OTHER; note = 2-fluoro-modified nucleoside
  modified_base 20^21: mod_base = OTHER; note = phosphorothioate linkage
  modified_base 19^20: mod_base = OTHER; note = phosphorothioate linkage
  modified_base 2: mod_base = OTHER; note = 2-O-methyl modified nucleoside
  modified_base 4: mod_base = OTHER; note = 2-O-methyl modified nucleoside
  modified_base 6: mod_base = OTHER; note = 2-O-methyl modified nucleoside
  modified_base 10: mod_base = OTHER; note = 2-O-methyl modified nucleoside
  modified_base 12: mod_base = OTHER; note = 2-O-methyl modified nucleoside
  modified_base 14: mod_base = OTHER; note = 2-O-methyl modified nucleoside
  modified_base 16: mod_base = OTHER; note = 2-O-methyl modified nucleoside
  modified_base 18: mod_base = OTHER; note = 2-O-methyl modified nucleoside
  modified_base 20: mod_base = OTHER; note = 2-O-methyl modified nucleoside
  modified_base 21: mod_base = OTHER; note = 2-O-methyl modified nucleoside
ggctctgcattttcatcgatt

SEQ ID NO: 11550 - RNA, 21 nt, synthetic construct
  source 1..21: mol_type = other RNA
  modified_base 1^2: mod_base = OTHER; note = phosphorothioate linkage
  modified_base 2^3: mod_base = OTHER; note = phosphorothioate linkage
  modified_base 20^21: mod_base = OTHER; note = phosphorothioate linkage
  modified_base 19^20: mod_base = OTHER; note = phosphorothioate linkage
  modified_base 1: mod_base = OTHER; note = 2-fluoro-modified nucleoside
  modified_base 3: mod_base = OTHER; note = 2-fluoro-modified nucleoside
  modified_base 5: mod_base = OTHER; note = 2-fluoro-modified nucleoside
  modified_base 7: mod_base = OTHER; note = 2-fluoro-modified nucleoside
  modified_base 8: mod_base = OTHER; note = 2-fluoro-modified nucleoside
  modified_base 9: mod_base = OTHER; note = 2-fluoro-modified nucleoside
  modified_base 11: mod_base = OTHER; note = 2-fluoro-modified nucleoside
  modified_base 13: mod_base = OTHER; note = 2-fluoro-modified nucleoside
  modified_base 15: mod_base = OTHER; note = 2-fluoro-modified nucleoside
  modified_base 17: mod_base = OTHER; note = 2-fluoro-modified nucleoside
  modified_base 19: mod_base = OTHER; note = 2-fluoro-modified nucleoside
  modified_base 2: mod_base = OTHER; note = 2-O-methyl modified nucleoside
  modified_base 4: mod_base = OTHER; note = 2-O-methyl modified nucleoside
  modified_base 6: mod_base = OTHER; note = 2-O-methyl modified nucleoside
  modified_base 10: mod_base = OTHER; note = 2-O-methyl modified nucleoside
  modified_base 12: mod_base = OTHER; note = 2-O-methyl modified nucleoside
  modified_base 14: mod_base = OTHER; note = 2-O-methyl modified nucleoside
  modified_base 16: mod_base = OTHER; note = 2-O-methyl modified nucleoside
  modified_base 18: mod_base = OTHER; note = 2-O-methyl modified nucleoside
  modified_base 20: mod_base = OTHER; note = 2-O-methyl modified nucleoside
  modified_base 21: mod_base = OTHER; note = 2-O-methyl modified nucleoside
catctctggagtgtataaatt

SEQ ID NO: 11551 - RNA, 21 nt, synthetic construct
  source 1..21: mol_type = other RNA
  modified_base 1^2: mod_base = OTHER; note = phosphorothioate linkage
  modified_base 2^3: mod_base = OTHER; note = phosphorothioate linkage
  modified_base 19^20: mod_base = OTHER; note = phosphorothioate linkage
  modified_base 20^21: mod_base = OTHER; note = phosphorothioate linkage
  modified_base 1: mod_base = OTHER; note = 2-fluoro-modified nucleoside
  modified_base 3: mod_base = OTHER; note = 2-fluoro-modified nucleoside
  modified_base 5: mod_base = OTHER; note = 2-fluoro-modified nucleoside
  modified_base 7: mod_base = OTHER; note = 2-fluoro-modified nucleoside
  modified_base 8: mod_base = OTHER; note = 2-fluoro-modified nucleoside
  modified_base 9: mod_base = OTHER; note = 2-fluoro-modified nucleoside
  modified_base 11: mod_base = OTHER; note = 2-fluoro-modified nucleoside
  modified_base 13: mod_base = OTHER; note = 2-fluoro-modified nucleoside
  modified_base 15: mod_base = OTHER; note = 2-fluoro-modified nucleoside
  modified_base 17: mod_base = OTHER; note = 2-fluoro-modified nucleoside
  modified_base 19: mod_base = OTHER; note = 2-fluoro-modified nucleoside
  modified_base 2: mod_base = OTHER; note = 2-O-methyl modified nucleoside
  modified_base 4: mod_base = OTHER; note = 2-O-methyl modified nucleoside
  modified_base 6: mod_base = OTHER; note = 2-O-methyl modified nucleoside
  modified_base 10: mod_base = OTHER; note = 2-O-methyl modified nucleoside
  modified_base 12: mod_base = OTHER; note = 2-O-methyl modified nucleoside
  modified_base 14: mod_base = OTHER; note = 2-O-methyl modified nucleoside
  modified_base 16: mod_base = OTHER; note = 2-O-methyl modified nucleoside
  modified_base 18: mod_base = OTHER; note = 2-O-methyl modified nucleoside
  modified_base 20: mod_base = OTHER; note = 2-O-methyl modified nucleoside
  modified_base 21: mod_base = OTHER; note = 2-O-methyl modified nucleoside
atctctggagtgtataagatt

SEQ ID NO: 11552 - RNA, 21 nt, synthetic construct
  source 1..21: mol_type = other RNA
  modified_base 1^2: mod_base = OTHER; note = phosphorothioate linkage
  modified_base 2^3: mod_base = OTHER; note = phosphorothioate linkage
  modified_base 19^20: mod_base = OTHER; note = phosphorothioate linkage
  modified_base 20^21: mod_base = OTHER; note = phosphorothioate linkage
  modified_base 1: mod_base = OTHER; note = 2-fluoro-modified nucleoside
  modified_base 3: mod_base = OTHER; note = 2-fluoro-modified nucleoside
  modified_base 5: mod_base = OTHER; note = 2-fluoro-modified nucleoside
  modified_base 7: mod_base = OTHER; note = 2-fluoro-modified nucleoside
  modified_base 8: mod_base = OTHER; note = 2-fluoro-modified nucleoside
  modified_base 9: mod_base = OTHER; note = 2-fluoro-modified nucleoside
  modified_base 11: mod_base = OTHER; note = 2-fluoro-modified nucleoside
  modified_base 13: mod_base = OTHER; note = 2-fluoro-modified nucleoside
  modified_base 15: mod_base = OTHER; note = 2-fluoro-modified nucleoside
  modified_base 17: mod_base = OTHER; note = 2-fluoro-modified nucleoside
  modified_base 19: mod_base = OTHER; note = 2-fluoro-modified nucleoside
  modified_base 2: mod_base = OTHER; note = 2-O-methyl modified nucleoside
  modified_base 4: mod_base = OTHER; note = 2-O-methyl modified nucleoside
  modified_base 6: mod_base = OTHER; note = 2-O-methyl modified nucleoside
  modified_base 10: mod_base = OTHER; note = 2-O-methyl modified nucleoside
  modified_base 12: mod_base = OTHER; note = 2-O-methyl modified nucleoside
  modified_base 14: mod_base = OTHER; note = 2-O-methyl modified nucleoside
  modified_base 16: mod_base = OTHER; note = 2-O-methyl modified nucleoside
  modified_base 18: mod_base = OTHER; note = 2-O-methyl modified nucleoside
  modified_base 20: mod_base = OTHER; note = 2-O-methyl modified nucleoside
  modified_base 21: mod_base = OTHER; note = 2-O-methyl modified nucleoside
catcatccagagacgaaaatt

SEQ ID NO: 11553 - RNA, 21 nt, synthetic construct
  source 1..21: mol_type = other RNA
  modified_base 1: mod_base = OTHER; note = 2-fluoro-modified nucleoside
  modified_base 3: mod_base = OTHER; note = 2-fluoro-modified nucleoside
  modified_base 5: mod_base = OTHER; note = 2-fluoro-modified nucleoside
  modified_base 7: mod_base = OTHER; note = 2-fluoro-modified nucleoside
  modified_base 8: mod_base = OTHER; note = 2-fluoro-modified nucleoside
  modified_base 9: mod_base = OTHER; note = 2-fluoro-modified nucleoside
  modified_base 11: mod_base = OTHER; note = 2-fluoro-modified nucleoside
  modified_base 13: mod_base = OTHER; note = 2-fluoro-modified nucleoside
  modified_base 15: mod_base = OTHER; note = 2-fluoro-modified nucleoside
  modified_base 17: mod_base = OTHER; note = 2-fluoro-modified nucleoside
  modified_base 19: mod_base = OTHER; note = 2-fluoro-modified nucleoside
  modified_base 1^2: mod_base = OTHER; note = phosphorothioate linkage
  modified_base 2^3: mod_base = OTHER; note = phosphorothioate linkage
  modified_base 19^20: mod_base = OTHER; note = phosphorothioate linkage
  modified_base 20^21: mod_base = OTHER; note = phosphorothioate linkage
  modified_base 2: mod_base = OTHER; note = 2-O-methyl modified nucleoside
  modified_base 4: mod_base = OTHER; note = 2-O-methyl modified nucleoside
  modified_base 6: mod_base = OTHER; note = 2-O-methyl modified nucleoside
  modified_base 10: mod_base = OTHER; note = 2-O-methyl modified nucleoside
  modified_base 12: mod_base = OTHER; note = 2-O-methyl modified nucleoside
  modified_base 14: mod_base = OTHER; note = 2-O-methyl modified nucleoside
  modified_base 16: mod_base = OTHER; note = 2-O-methyl modified nucleoside
  modified_base 18: mod_base = OTHER; note = 2-O-methyl modified nucleoside
  modified_base 20: mod_base = OTHER; note = 2-O-methyl modified nucleoside
  modified_base 21: mod_base = OTHER; note = 2-O-methyl modified nucleoside
atcatccagagacgaaaaatt

SEQ ID NO: 11554 - RNA, 21 nt, synthetic construct
  source 1..21: mol_type = other RNA
  modified_base 1^2: mod_base = OTHER; note = phosphorothioate linkage
  modified_base 2^3: mod_base = OTHER; note = phosphorothioate linkage
  modified_base 19^20: mod_base = OTHER; note = phosphorothioate linkage
  modified_base 20^21: mod_base = OTHER; note = phosphorothioate linkage
  modified_base 1: mod_base = OTHER; note = 2-fluoro-modified nucleoside
  modified_base 3: mod_base = OTHER; note = 2-fluoro-modified nucleoside
  modified_base 5: mod_base = OTHER; note = 2-fluoro-modified nucleoside
  modified_base 7: mod_base = OTHER; note = 2-fluoro-modified nucleoside
  modified_base 8: mod_base = OTHER; note = 2-fluoro-modified nucleoside
  modified_base 9: mod_base = OTHER; note = 2-fluoro-modified nucleoside
  modified_base 11: mod_base = OTHER; note = 2-fluoro-modified nucleoside
  modified_base 13: mod_base = OTHER; note = 2-fluoro-modified nucleoside
  modified_base 15: mod_base = OTHER; note = 2-fluoro-modified nucleoside
  modified_base 17: mod_base = OTHER; note = 2-fluoro-modified nucleoside
  modified_base 19: mod_base = OTHER; note = 2-fluoro-modified nucleoside
  modified_base 2: mod_base = OTHER; note = 2-O-methyl modified nucleoside
  modified_base 4: mod_base = OTHER; note = 2-O-methyl modified nucleoside
  modified_base 6: mod_base = OTHER; note = 2-O-methyl modified nucleoside
  modified_base 10: mod_base = OTHER; note = 2-O-methyl modified nucleoside
  modified_base 12: mod_base = OTHER; note = 2-O-methyl modified nucleoside
  modified_base 14: mod_base = OTHER; note = 2-O-methyl modified nucleoside
  modified_base 16: mod_base = OTHER; note = 2-O-methyl modified nucleoside
  modified_base 18: mod_base = OTHER; note = 2-O-methyl modified nucleoside
  modified_base 20: mod_base = OTHER; note = 2-O-methyl modified nucleoside
  modified_base 21: mod_base = OTHER; note = 2-O-methyl modified nucleoside
tcatccagagacgaaaaaatt

SEQ ID NO: 11555 - RNA, 21 nt, synthetic construct
  source 1..21: mol_type = other RNA
  modified_base 1^2: mod_base = OTHER; note = phosphorothioate linkage
  modified_base 2^3: mod_base = OTHER; note = phosphorothioate linkage
  modified_base 19^20: mod_base = OTHER; note = phosphorothioate linkage
  modified_base 20^21: mod_base = OTHER; note = phosphorothioate linkage
  modified_base 1: mod_base = OTHER; note = 2-fluoro-modified nucleoside
  modified_base 3: mod_base = OTHER; note = 2-fluoro-modified nucleoside
  modified_base 5: mod_base = OTHER; note = 2-fluoro-modified nucleoside
  modified_base 7: mod_base = OTHER; note = 2-fluoro-modified nucleoside
  modified_base 8: mod_base = OTHER; note = 2-fluoro-modified nucleoside
  modified_base 9: mod_base = OTHER; note = 2-fluoro-modified nucleoside
  modified_base 11: mod_base = OTHER; note = 2-fluoro-modified nucleoside
  modified_base 13: mod_base = OTHER; note = 2-fluoro-modified nucleoside
  modified_base 15: mod_base = OTHER; note = 2-fluoro-modified nucleoside
  modified_base 17: mod_base = OTHER; note = 2-fluoro-modified nucleoside
  modified_base 19: mod_base = OTHER; note = 2-fluoro-modified nucleoside
  modified_base 2: mod_base = OTHER; note = 2-O-methyl modified nucleoside
  modified_base 4: mod_base = OTHER; note = 2-O-methyl modified nucleoside
  modified_base 6: mod_base = OTHER; note = 2-O-methyl modified nucleoside
  modified_base 10: mod_base = OTHER; note = 2-O-methyl modified nucleoside
  modified_base 12: mod_base = OTHER; note = 2-O-methyl modified nucleoside
  modified_base 14: mod_base = OTHER; note = 2-O-methyl modified nucleoside
  modified_base 16: mod_base = OTHER; note = 2-O-methyl modified nucleoside
  modified_base 18: mod_base = OTHER; note = 2-O-methyl modified nucleoside
  modified_base 20: mod_base = OTHER; note = 2-O-methyl modified nucleoside
  modified_base 21: mod_base = OTHER; note = 2-O-methyl modified nucleoside
ctcaatggagtgtactacatt

SEQ ID NO: 11556 - RNA, 21 nt, synthetic construct
  source 1..21: mol_type = other RNA
  modified_base 1: mod_base = OTHER; note = 2-fluoro-modified nucleoside
  modified_base 3: mod_base = OTHER; note = 2-fluoro-modified nucleoside
  modified_base 5: mod_base = OTHER; note = 2-fluoro-modified nucleoside
  modified_base 7: mod_base = OTHER; note = 2-fluoro-modified nucleoside
  modified_base 8: mod_base = OTHER; note = 2-fluoro-modified nucleoside
  modified_base 9: mod_base = OTHER; note = 2-fluoro-modified nucleoside
  modified_base 11: mod_base = OTHER; note = 2-fluoro-modified nucleoside
  modified_base 13: mod_base = OTHER; note = 2-fluoro-modified nucleoside
  modified_base 15: mod_base = OTHER; note = 2-fluoro-modified nucleoside
  modified_base 17: mod_base = OTHER; note = 2-fluoro-modified nucleoside
  modified_base 19: mod_base = OTHER; note = 2-fluoro-modified nucleoside
  modified_base 1^2: mod_base = OTHER; note = phosphorothioate linkage
  modified_base 2^3: mod_base = OTHER; note = phosphorothioate linkage
  modified_base 19^20: mod_base = OTHER; note = phosphorothioate linkage
  modified_base 20^21: mod_base = OTHER; note = phosphorothioate linkage
  modified_base 2: mod_base = OTHER; note = 2-O-methyl modified nucleoside
  modified_base 4: mod_base = OTHER; note = 2-O-methyl modified nucleoside
  modified_base 6: mod_base = OTHER; note = 2-O-methyl modified nucleoside
  modified_base 10: mod_base = OTHER; note = 2-O-methyl modified nucleoside
  modified_base 12: mod_base = OTHER; note = 2-O-methyl modified nucleoside
  modified_base 14: mod_base = OTHER; note = 2-O-methyl modified nucleoside
  modified_base 16: mod_base = OTHER; note = 2-O-methyl modified nucleoside
  modified_base 18: mod_base = OTHER; note = 2-O-methyl modified nucleoside
  modified_base 20: mod_base = OTHER; note = 2-O-methyl modified nucleoside
  modified_base 21: mod_base = OTHER; note = 2-O-methyl modified nucleoside
atatgtaccaaggatgttatt

SEQ ID NO: 11557 - RNA, 21 nt, synthetic construct
  source 1..21: mol_type = other RNA
  modified_base 1: mod_base = OTHER; note = 2-fluoro-modified nucleoside
  modified_base 3: mod_base = OTHER; note = 2-fluoro-modified nucleoside
  modified_base 5: mod_base = OTHER; note = 2-fluoro-modified nucleoside
  modified_base 7: mod_base = OTHER; note = 2-fluoro-modified nucleoside
  modified_base 8: mod_base = OTHER; note = 2-fluoro-modified nucleoside
  modified_base 9: mod_base = OTHER; note = 2-fluoro-modified nucleoside
  modified_base 11: mod_base = OTHER; note = 2-fluoro-modified nucleoside
  modified_base 13: mod_base = OTHER; note = 2-fluoro-modified nucleoside
  modified_base 15: mod_base = OTHER; note = 2-fluoro-modified nucleoside
  modified_base 17: mod_base = OTHER; note = 2-fluoro-modified nucleoside
  modified_base 19: mod_base = OTHER; note = 2-fluoro-modified nucleoside
  modified_base 1^2: mod_base = OTHER; note = phosphorothioate linkage
  modified_base 2^3: mod_base = OTHER; note = phosphorothioate linkage
  modified_base 19^20: mod_base = OTHER; note = phosphorothioate linkage
  modified_base 20^21: mod_base = OTHER; note = phosphorothioate linkage
  modified_base 2: mod_base = OTHER; note = 2-O-methyl modified nucleoside
  modified_base 4: mod_base = OTHER; note = 2-O-methyl modified nucleoside
  modified_base 6: mod_base = OTHER; note = 2-O-methyl modified nucleoside
  modified_base 10: mod_base = OTHER; note = 2-O-methyl modified nucleoside
  modified_base 12: mod_base = OTHER; note = 2-O-methyl modified nucleoside
  modified_base 14: mod_base = OTHER; note = 2-O-methyl modified nucleoside
  modified_base 16: mod_base = OTHER; note = 2-O-methyl modified nucleoside
  modified_base 18: mod_base = OTHER; note = 2-O-methyl modified nucleoside
  modified_base 20: mod_base = OTHER; note = 2-O-methyl modified nucleoside
  modified_base 21: mod_base = OTHER; note = 2-O-methyl modified nucleoside
aattatcttgagtctacaatt

SEQ ID NO: 11558 - RNA, 21 nt, synthetic construct
  source 1..21: mol_type = other RNA
  modified_base 1^2: mod_base = OTHER; note = phosphorothioate linkage
  modified_base 2^3: mod_base = OTHER; note = phosphorothioate linkage
  modified_base 19^20: mod_base = OTHER; note = phosphorothioate linkage
  modified_base 20^21: mod_base = OTHER; note = phosphorothioate linkage
  modified_base 1: mod_base = OTHER; note = 2-fluoro-modified nucleoside
  modified_base 3: mod_base = OTHER; note = 2-fluoro-modified nucleoside
  modified_base 5: mod_base = OTHER; note = 2-fluoro-modified nucleoside
  modified_base 7: mod_base = OTHER; note = 2-fluoro-modified nucleoside
  modified_base 8: mod_base = OTHER; note = 2-fluoro-modified nucleoside
  modified_base 9: mod_base = OTHER; note = 2-fluoro-modified nucleoside
  modified_base 11: mod_base = OTHER; note = 2-fluoro-modified nucleoside
  modified_base 13: mod_base = OTHER; note = 2-fluoro-modified nucleoside
  modified_base 15: mod_base = OTHER; note = 2-fluoro-modified nucleoside
  modified_base 17: mod_base = OTHER; note = 2-fluoro-modified nucleoside
  modified_base 19: mod_base = OTHER; note = 2-fluoro-modified nucleoside
  modified_base 2: mod_base = OTHER; note = 2-O-methyl modified nucleoside
  modified_base 4: mod_base = OTHER; note = 2-O-methyl modified nucleoside
  modified_base 6: mod_base = OTHER; note = 2-O-methyl modified nucleoside
  modified_base 10: mod_base = OTHER; note = 2-O-methyl modified nucleoside
  modified_base 12: mod_base = OTHER; note = 2-O-methyl modified nucleoside
  modified_base 14: mod_base = OTHER; note = 2-O-methyl modified nucleoside
  modified_base 16: mod_base = OTHER; note = 2-O-methyl modified nucleoside
  modified_base 18: mod_base = OTHER; note = 2-O-methyl modified nucleoside
  modified_base 20: mod_base = OTHER; note = 2-O-methyl modified nucleoside
  modified_base 21: mod_base = OTHER; note = 2-O-methyl modified nucleoside
aattatcttgagtctacaatt

SEQ ID NO: 11559 - RNA, 21 nt, synthetic construct
  source 1..21: mol_type = other RNA
  modified_base 1^2: mod_base = OTHER; note = phosphorothioate linkage
  modified_base 2^3: mod_base = OTHER; note = phosphorothioate linkage
  modified_base 19^20: mod_base = OTHER; note = phosphorothioate linkage
  modified_base 20^21: mod_base = OTHER; note = phosphorothioate linkage
  modified_base 1: mod_base = OTHER; note = 2-fluoro-modified nucleoside
  modified_base 3: mod_base = OTHER; note = 2-fluoro-modified nucleoside
  modified_base 5: mod_base = OTHER; note = 2-fluoro-modified nucleoside
  modified_base 7: mod_base = OTHER; note = 2-fluoro-modified nucleoside
  modified_base 8: mod_base = OTHER; note = 2-fluoro-modified nucleoside
  modified_base 9: mod_base = OTHER; note = 2-fluoro-modified nucleoside
  modified_base 11: mod_base = OTHER; note = 2-fluoro-modified nucleoside
  modified_base 13: mod_base = OTHER; note = 2-fluoro-modified nucleoside
  modified_base 15: mod_base = OTHER; note = 2-fluoro-modified nucleoside
  modified_base 17: mod_base = OTHER; note = 2-fluoro-modified nucleoside
  modified_base 19: mod_base = OTHER; note = 2-fluoro-modified nucleoside
  modified_base 2: mod_base = OTHER; note = 2-O-methyl modified nucleoside
  modified_base 4: mod_base = OTHER; note = 2-O-methyl modified nucleoside
  modified_base 6: mod_base = OTHER; note = 2-O-methyl modified nucleoside
  modified_base 10: mod_base = OTHER; note = 2-O-methyl modified nucleoside
  modified_base 12: mod_base = OTHER; note = 2-O-methyl modified nucleoside
  modified_base 14: mod_base = OTHER; note = 2-O-methyl modified nucleoside
  modified_base 16: mod_base = OTHER; note = 2-O-methyl modified nucleoside
  modified_base 18: mod_base = OTHER; note = 2-O-methyl modified nucleoside
  modified_base 20: mod_base = OTHER; note = 2-O-methyl modified nucleoside
  modified_base 21: mod_base = OTHER; note = 2-O-methyl modified nucleoside
cacaaaaattgttcggctatt

SEQ ID NO: 11560 - RNA, 21 nt, synthetic construct
  source 1..21: mol_type = other RNA
  modified_base 1: mod_base = OTHER; note = 2-fluoro-modified nucleoside
  modified_base 3: mod_base = OTHER; note = 2-fluoro-modified nucleoside
  modified_base 5: mod_base = OTHER; note = 2-fluoro-modified nucleoside
  modified_base 7: mod_base = OTHER; note = 2-fluoro-modified nucleoside
  modified_base 9: mod_base = OTHER; note = 2-fluoro-modified nucleoside
  modified_base 11: mod_base = OTHER; note = 2-fluoro-modified nucleoside
  modified_base 8: mod_base = OTHER; note = 2-fluoro-modified nucleoside
  modified_base 13: mod_base = OTHER; note = 2-fluoro-modified nucleoside
  modified_base 15: mod_base = OTHER; note = 2-fluoro-modified nucleoside
  modified_base 17: mod_base = OTHER; note = 2-fluoro-modified nucleoside
  modified_base 19: mod_base = OTHER; note = 2-fluoro-modified nucleoside
  modified_base 1^2: mod_base = OTHER; note = phosphorothioate linkage
  modified_base 2^3: mod_base = OTHER; note = phosphorothioate linkage
  modified_base 19^20: mod_base = OTHER; note = phosphorothioate linkage
  modified_base 20^21: mod_base = OTHER; note = phosphorothioate linkage
  modified_base 2: mod_base = OTHER; note = 2-O-methyl modified nucleoside
  modified_base 4: mod_base = OTHER; note = 2-O-methyl modified nucleoside
  modified_base 6: mod_base = OTHER; note = 2-O-methyl modified nucleoside
  modified_base 10: mod_base = OTHER; note = 2-O-methyl modified nucleoside
  modified_base 12: mod_base = OTHER; note = 2-O-methyl modified nucleoside
  modified_base 14: mod_base = OTHER; note = 2-O-methyl modified nucleoside
  modified_base 16: mod_base = OTHER; note = 2-O-methyl modified nucleoside
  modified_base 18: mod_base = OTHER; note = 2-O-methyl modified nucleoside
  modified_base 20: mod_base = OTHER; note = 2-O-methyl modified nucleoside
  modified_base 21: mod_base = OTHER; note = 2-O-methyl modified nucleoside
gaaggtagatggtgttatatt

SEQ ID NO: 11561 - RNA, 21 nt, synthetic construct
  source 1..21: mol_type = other RNA
  modified_base 1: mod_base = OTHER; note = 2-fluoro-modified nucleoside
  modified_base 3: mod_base = OTHER; note = 2-fluoro-modified nucleoside
  modified_base 5: mod_base = OTHER; note = 2-fluoro-modified nucleoside
  modified_base 7: mod_base = OTHER; note = 2-fluoro-modified nucleoside
  modified_base 8: mod_base = OTHER; note = 2-fluoro-modified nucleoside
  modified_base 9: mod_base = OTHER; note = 2-fluoro-modified nucleoside
  modified_base 11: mod_base = OTHER; note = 2-fluoro-modified nucleoside
  modified_base 13: mod_base = OTHER; note = 2-fluoro-modified nucleoside
  modified_base 15: mod_base = OTHER; note = 2-fluoro-modified nucleoside
  modified_base 17: mod_base = OTHER; note = 2-fluoro-modified nucleoside
  modified_base 19: mod_base = OTHER; note = 2-fluoro-modified nucleoside
  modified_base 1^2: mod_base = OTHER; note = phosphorothioate linkage
  modified_base 2^3: mod_base = OTHER; note = phosphorothioate linkage
  modified_base 19^20: mod_base = OTHER; note = phosphorothioate linkage
  modified_base 20^21: mod_base = OTHER; note = phosphorothioate linkage
  modified_base 2: mod_base = OTHER; note = 2-O-methyl modified nucleoside
  modified_base 4: mod_base = OTHER; note = 2-O-methyl modified nucleoside
  modified_base 6: mod_base = OTHER; note = 2-O-methyl modified nucleoside
  modified_base 10: mod_base = OTHER; note = 2-O-methyl modified nucleoside
  modified_base 12: mod_base = OTHER; note = 2-O-methyl modified nucleoside
  modified_base 14: mod_base = OTHER; note = 2-O-methyl modified nucleoside
  modified_base 16: mod_base = OTHER; note = 2-O-methyl modified nucleoside
  modified_base 18: mod_base = OTHER; note = 2-O-methyl modified nucleoside
  modified_base 20: mod_base = OTHER; note = 2-O-methyl modified nucleoside
  modified_base 21: mod_base = OTHER; note = 2-O-methyl modified nucleoside
gtagatggtgttatagttatt

SEQ ID NO: 11562 - RNA, 21 nt, synthetic construct
  source 1..21: mol_type = other RNA
  modified_base 7: mod_base = OTHER; note = 2-fluoro-modified nucleoside
  modified_base 9: mod_base = OTHER; note = 2-fluoro-modified nucleoside
  modified_base 20^21: mod_base = OTHER; note = phosphorothioate linkage
  modified_base 19^20: mod_base = OTHER; note = phosphorothioate linkage
  modified_base 1: mod_base = OTHER; note = 2-O-methyl modified nucleoside
  modified_base 2: mod_base = OTHER; note = 2-O-methyl modified nucleoside
  modified_base 3: mod_base = OTHER; note = 2-O-methyl modified nucleoside
  modified_base 4: mod_base = OTHER; note = 2-O-methyl modified nucleoside
  modified_base 5: mod_base = OTHER; note = 2-O-methyl modified nucleoside
  modified_base 6: mod_base = OTHER; note = 2-O-methyl modified nucleoside
  modified_base 8: mod_base = OTHER; note = 2-O-methyl modified nucleoside
  modified_base 10: mod_base = OTHER; note = 2-O-methyl modified nucleoside
  modified_base 11: mod_base = OTHER; note = 2-O-methyl modified nucleoside
  modified_base 12: mod_base = OTHER; note = 2-O-methyl modified nucleoside
  modified_base 13: mod_base = OTHER; note = 2-O-methyl modified nucleoside
  modified_base 14: mod_base = OTHER; note = 2-O-methyl modified nucleoside
  modified_base 15: mod_base = OTHER; note = 2-O-methyl modified nucleoside
  modified_base 16: mod_base = OTHER; note = 2-O-methyl modified nucleoside
  modified_base 17: mod_base = OTHER; note = 2-O-methyl modified nucleoside
  modified_base 18: mod_base = OTHER; note = 2-O-methyl modified nucleoside
  modified_base 19: mod_base = OTHER; note = 2-O-methyl modified nucleoside
  modified_base 20: mod_base = OTHER; note = 2-O-methyl modified nucleoside
  modified_base 21: mod_base = OTHER; note = 2-O-methyl modified nucleoside
ggctctgcattttcatcgatt

SEQ ID NO: 11563 - RNA, 21 nt, synthetic construct
  source 1..21: mol_type = other RNA
  modified_base 6: mod_base = OTHER; note = 2-fluoro-modified nucleoside
  modified_base 7: mod_base = OTHER; note = 2-fluoro-modified nucleoside
  modified_base 9: mod_base = OTHER; note = 2-fluoro-modified nucleoside
  modified_base 19^20: mod_base = OTHER; note = phosphorothioate linkage
  modified_base 20^21: mod_base = OTHER; note = phosphorothioate linkage
  modified_base 1: mod_base = OTHER; note = 2-O-methyl modified nucleoside
  modified_base 2: mod_base = OTHER; note = 2-O-methyl modified nucleoside
  modified_base 3: mod_base = OTHER; note = 2-O-methyl modified nucleoside
  modified_base 4: mod_base = OTHER; note = 2-O-methyl modified nucleoside
  modified_base 5: mod_base = OTHER; note = 2-O-methyl modified nucleoside
  modified_base 8: mod_base = OTHER; note = 2-O-methyl modified nucleoside
  modified_base 10: mod_base = OTHER; note = 2-O-methyl modified nucleoside
  modified_base 11: mod_base = OTHER; note = 2-O-methyl modified nucleoside
  modified_base 12: mod_base = OTHER; note = 2-O-methyl modified nucleoside
  modified_base 13: mod_base = OTHER; note = 2-O-methyl modified nucleoside
  modified_base 14: mod_base = OTHER; note = 2-O-methyl modified nucleoside
  modified_base 15: mod_base = OTHER; note = 2-O-methyl modified nucleoside
  modified_base 16: mod_base = OTHER; note = 2-O-methyl modified nucleoside
  modified_base 17: mod_base = OTHER; note = 2-O-methyl modified nucleoside
  modified_base 18: mod_base = OTHER; note = 2-O-methyl modified nucleoside
  modified_base 19: mod_base = OTHER; note = 2-O-methyl modified nucleoside
  modified_base 20: mod_base = OTHER; note = 2-O-methyl modified nucleoside
  modified_base 21: mod_base = OTHER; note = 2-O-methyl modified nucleoside
tttcatcgtggcctttgtatt

SEQ ID NO: 11564 - RNA, 21 nt, synthetic construct
  source 1..21: mol_type = other RNA
  modified_base 8: mod_base = OTHER; note = 2-fluoro-modified nucleoside
  modified_base 9: mod_base = OTHER; note = 2-fluoro-modified nucleoside
  modified_base 10: mod_base = OTHER; note = 2-fluoro-modified nucleoside
  modified_base 11: mod_base = OTHER; note = 2-fluoro-modified nucleoside
  modified_base 19^20: mod_base = OTHER; note = phosphorothioate linkage
  modified_base 20^21: mod_base = OTHER; note = phosphorothioate linkage
  modified_base 1: mod_base = OTHER; note = 2-O-methyl modified nucleoside
  modified_base 2: mod_base = OTHER; note = 2-O-methyl modified nucleoside
  modified_base 3: mod_base = OTHER; note = 2-O-methyl modified nucleoside
  modified_base 4: mod_base = OTHER; note = 2-O-methyl modified nucleoside
  modified_base 5: mod_base = OTHER; note = 2-O-methyl modified nucleoside
  modified_base 6: mod_base = OTHER; note = 2-O-methyl modified nucleoside
  modified_base 7: mod_base = OTHER; note = 2-O-methyl modified nucleoside
  modified_base 12: mod_base = OTHER; note = 2-O-methyl modified nucleoside
  modified_base 13: mod_base = OTHER; note = 2-O-methyl modified nucleoside
  modified_base 14: mod_base = OTHER; note = 2-O-methyl modified nucleoside
  modified_base 15: mod_base = OTHER; note = 2-O-methyl modified nucleoside
  modified_base 16: mod_base = OTHER; note = 2-O-methyl modified nucleoside
  modified_base 17: mod_base = OTHER; note = 2-O-methyl modified nucleoside
  modified_base 18: mod_base = OTHER; note = 2-O-methyl modified nucleoside
  modified_base 19: mod_base = OTHER; note = 2-O-methyl modified nucleoside
  modified_base 20: mod_base = OTHER; note = 2-O-methyl modified nucleoside
  modified_base 21: mod_base = OTHER; note = 2-O-methyl modified nucleoside
catctctggagtgtataaatt

SEQ ID NO: 11565 - RNA, 21 nt, synthetic construct
  source 1..21: mol_type = other RNA
  modified_base 7: mod_base = OTHER; note = 2-fluoro-modified nucleoside
  modified_base 8: mod_base = OTHER; note = 2-fluoro-modified nucleoside
  modified_base 9: mod_base = OTHER; note = 2-fluoro-modified nucleoside
  modified_base 10: mod_base = OTHER; note = 2-fluoro-modified nucleoside
  modified_base 19^20: mod_base = OTHER; note = phosphorothioate linkage
  modified_base 20^21: mod_base = OTHER; note = phosphorothioate linkage
  modified_base 6: mod_base = OTHER; note = 2-O-methyl modified nucleoside
  modified_base 1: mod_base = OTHER; note = 2-O-methyl modified nucleoside
  modified_base 2: mod_base = OTHER; note = 2-O-methyl modified nucleoside
  modified_base 3: mod_base = OTHER; note = 2-O-methyl modified nucleoside
  modified_base 4: mod_base = OTHER; note = 2-O-methyl modified nucleoside
  modified_base 5: mod_base = OTHER; note = 2-O-methyl modified nucleoside
  modified_base 6: mod_base = OTHER; note = 2-O-methyl modified nucleoside
  modified_base 11: mod_base = OTHER; note = 2-O-methyl modified nucleoside
  modified_base 12: mod_base = OTHER; note = 2-O-methyl modified nucleoside
  modified_base 13: mod_base = OTHER; note = 2-O-methyl modified nucleoside
  modified_base 14: mod_base = OTHER; note = 2-O-methyl modified nucleoside
  modified_base 15: mod_base = OTHER; note = 2-O-methyl modified nucleoside
  modified_base 16: mod_base = OTHER; note = 2-O-methyl modified nucleoside
  modified_base 17: mod_base = OTHER; note = 2-O-methyl modified nucleoside
  modified_base 18: mod_base = OTHER; note = 2-O-methyl modified nucleoside
  modified_base 19: mod_base = OTHER; note = 2-O-methyl modified nucleoside
  modified_base 20: mod_base = OTHER; note = 2-O-methyl modified nucleoside
  modified_base 21: mod_base = OTHER; note = 2-O-methyl modified nucleoside
atctctggagtgtataagatt

SEQ ID NO: 11566 - RNA, 21 nt, synthetic construct
  source 1..21: mol_type = other RNA
  modified_base 6: mod_base = OTHER; note = 2-fluoro-modified nucleoside
  modified_base 7: mod_base = OTHER; note = 2-fluoro-modified nucleoside
  modified_base 8: mod_base = OTHER; note = 2-fluoro-modified nucleoside
  modified_base 9: mod_base = OTHER; note = 2-fluoro-modified nucleoside
  modified_base 11: mod_base = OTHER; note = 2-fluoro-modified nucleoside
  modified_base 19^20: mod_base = OTHER; note = phosphorothioate linkage
  modified_base 20^21: mod_base = OTHER; note = phosphorothioate linkage
  modified_base 1: mod_base = OTHER; note = 2-O-methyl modified nucleoside
  modified_base 2: mod_base = OTHER; note = 2-O-methyl modified nucleoside
  modified_base 3: mod_base = OTHER; note = 2-O-methyl modified nucleoside
  modified_base 4: mod_base = OTHER; note = 2-O-methyl modified nucleoside
  modified_base 5: mod_base = OTHER; note = 2-O-methyl modified nucleoside
  modified_base 10: mod_base = OTHER; note = 2-O-methyl modified nucleoside
  modified_base 12: mod_base = OTHER; note = 2-O-methyl modified nucleoside
  modified_base 13: mod_base = OTHER; note = 2-O-methyl modified nucleoside
  modified_base 14: mod_base = OTHER; note = 2-O-methyl modified nucleoside
  modified_base 15: mod_base = OTHER; note = 2-O-methyl modified nucleoside
  modified_base 16: mod_base = OTHER; note = 2-O-methyl modified nucleoside
  modified_base 17: mod_base = OTHER; note = 2-O-methyl modified nucleoside
  modified_base 18: mod_base = OTHER; note = 2-O-methyl modified nucleoside
  modified_base 19: mod_base = OTHER; note = 2-O-methyl modified nucleoside
  modified_base 20: mod_base = OTHER; note = 2-O-methyl modified nucleoside
  modified_base 21: mod_base = OTHER; note = 2-O-methyl modified nucleoside
ataagcttcctcctgatgatt

SEQ ID NO: 11567 - RNA, 21 nt, synthetic construct
  source 1..21: mol_type = other RNA
  modified_base 5: mod_base = OTHER; note = 2-fluoro-modified nucleoside
  modified_base 9: mod_base = OTHER; note = 2-fluoro-modified nucleoside
  modified_base 10: mod_base = OTHER; note = 2-fluoro-modified nucleoside
  modified_base 19^20: mod_base = OTHER; note = phosphorothioate linkage
  modified_base 20^21: mod_base = OTHER; note = phosphorothioate linkage
  modified_base 1: mod_base = OTHER; note = 2-O-methyl modified nucleoside
  modified_base 2: mod_base = OTHER; note = 2-O-methyl modified nucleoside
  modified_base 3: mod_base = OTHER; note = 2-O-methyl modified nucleoside
  modified_base 4: mod_base = OTHER; note = 2-O-methyl modified nucleoside
  modified_base 6: mod_base = OTHER; note = 2-O-methyl modified nucleoside
  modified_base 7: mod_base = OTHER; note = 2-O-methyl modified nucleoside
  modified_base 8: mod_base = OTHER; note = 2-O-methyl modified nucleoside
  modified_base 10: mod_base = OTHER; note = 2-O-methyl modified nucleoside
  modified_base 12: mod_base = OTHER; note = 2-O-methyl modified nucleoside
  modified_base 13: mod_base = OTHER; note = 2-O-methyl modified nucleoside
  modified_base 14: mod_base = OTHER; note = 2-O-methyl modified nucleoside
  modified_base 15: mod_base = OTHER; note = 2-O-methyl modified nucleoside
  modified_base 16: mod_base = OTHER; note = 2-O-methyl modified nucleoside
  modified_base 17: mod_base = OTHER; note = 2-O-methyl modified nucleoside
  modified_base 18: mod_base = OTHER; note = 2-O-methyl modified nucleoside
  modified_base 19: mod_base = OTHER; note = 2-O-methyl modified nucleoside
  modified_base 20: mod_base = OTHER; note = 2-O-methyl modified nucleoside
  modified_base 21: mod_base = OTHER; note = 2-O-methyl modified nucleoside
catcatccagagacgaaaatt

SEQ ID NO: 11568 - RNA, 21 nt, synthetic construct
  source 1..21: mol_type = other RNA
  modified_base 8: mod_base = OTHER; note = 2-fluoro-modified nucleoside
  modified_base 9: mod_base = OTHER; note = 2-fluoro-modified nucleoside
  modified_base 11: mod_base = OTHER; note = 2-fluoro-modified nucleoside
  modified_base 19^20: mod_base = OTHER; note = phosphorothioate linkage
  modified_base 20^21: mod_base = OTHER; note = phosphorothioate linkage
  modified_base 1: mod_base = OTHER; note = 2-O-methyl modified nucleoside
  modified_base 2: mod_base = OTHER; note = 2-O-methyl modified nucleoside
  modified_base 3: mod_base = OTHER; note = 2-O-methyl modified nucleoside
  modified_base 4: mod_base = OTHER; note = 2-O-methyl modified nucleoside
  modified_base 5: mod_base = OTHER; note = 2-O-methyl modified nucleoside
  modified_base 6: mod_base = OTHER; note = 2-O-methyl modified nucleoside
  modified_base 7: mod_base = OTHER; note = 2-O-methyl modified nucleoside
  modified_base 10: mod_base = OTHER; note = 2-O-methyl modified nucleoside
  modified_base 12: mod_base = OTHER; note = 2-O-methyl modified nucleoside
  modified_base 13: mod_base = OTHER; note = 2-O-methyl modified nucleoside
  modified_base 14: mod_base = OTHER; note = 2-O-methyl modified nucleoside
  modified_base 15: mod_base = OTHER; note = 2-O-methyl modified nucleoside
  modified_base 16: mod_base = OTHER; note = 2-O-methyl modified nucleoside
  modified_base 17: mod_base = OTHER; note = 2-O-methyl modified nucleoside
  modified_base 18: mod_base = OTHER; note = 2-O-methyl modified nucleoside
  modified_base 19: mod_base = OTHER; note = 2-O-methyl modified nucleoside
  modified_base 20: mod_base = OTHER; note = 2-O-methyl modified nucleoside
  modified_base 21: mod_base = OTHER; note = 2-O-methyl modified nucleoside
atcatccagagacgaaaaatt

SEQ ID NO: 11569 - RNA, 21 nt, synthetic construct
  source 1..21: mol_type = other RNA
  modified_base 7: mod_base = OTHER; note = 2-fluoro-modified nucleoside
  modified_base 8: mod_base = OTHER; note = 2-fluoro-modified nucleoside
  modified_base 9: mod_base = OTHER; note = 2-fluoro-modified nucleoside
  modified_base 10: mod_base = OTHER; note = 2-fluoro-modified nucleoside
  modified_base 11: mod_base = OTHER; note = 2-fluoro-modified nucleoside
  modified_base 19^20: mod_base = OTHER; note = phosphorothioate linkage
  modified_base 20^21: mod_base = OTHER; note = phosphorothioate linkage
  modified_base 1: mod_base = OTHER; note = 2-O-methyl modified nucleoside
  modified_base 2: mod_base = OTHER; note = 2-O-methyl modified nucleoside
  modified_base 3: mod_base = OTHER; note = 2-O-methyl modified nucleoside
  modified_base 4: mod_base = OTHER; note = 2-O-methyl modified nucleoside
  modified_base 5: mod_base = OTHER; note = 2-O-methyl modified nucleoside
  modified_base 6: mod_base = OTHER; note = 2-O-methyl modified nucleoside
  modified_base 12: mod_base = OTHER; note = 2-O-methyl modified nucleoside
  modified_base 13: mod_base = OTHER; note = 2-O-methyl modified nucleoside
  modified_base 14: mod_base = OTHER; note = 2-O-methyl modified nucleoside
  modified_base 15: mod_base = OTHER; note = 2-O-methyl modified nucleoside
  modified_base 16: mod_base = OTHER; note = 2-O-methyl modified nucleoside
  modified_base 17: mod_base = OTHER; note = 2-O-methyl modified nucleoside
  modified_base 18: mod_base = OTHER; note = 2-O-methyl modified nucleoside
  modified_base 19: mod_base = OTHER; note = 2-O-methyl modified nucleoside
  modified_base 20: mod_base = OTHER; note = 2-O-methyl modified nucleoside
  modified_base 21: mod_base = OTHER; note = 2-O-methyl modified nucleoside
tcatccagagacgaaaaaatt

SEQ ID NO: 11570 - RNA, 21 nt, synthetic construct
  source 1..21: mol_type = other RNA
  modified_base 6: mod_base = OTHER; note = 2-fluoro-modified nucleoside
  modified_base 9: mod_base = OTHER; note = 2-fluoro-modified nucleoside
  modified_base 11: mod_base = OTHER; note = 2-fluoro-modified nucleoside
  modified_base 19^20: mod_base = OTHER; note = phosphorothioate linkage
  modified_base 20^21: mod_base = OTHER; note = phosphorothioate linkage
  modified_base 1: mod_base = OTHER; note = 2-O-methyl modified nucleoside
  modified_base 2: mod_base = OTHER; note = 2-O-methyl modified nucleoside
  modified_base 3: mod_base = OTHER; note = 2-O-methyl modified nucleoside
  modified_base 4: mod_base = OTHER; note = 2-O-methyl modified nucleoside
  modified_base 5: mod_base = OTHER; note = 2-O-methyl modified nucleoside
  modified_base 7: mod_base = OTHER; note = 2-O-methyl modified nucleoside
  modified_base 8: mod_base = OTHER; note = 2-O-methyl modified nucleoside
  modified_base 10: mod_base = OTHER; note = 2-O-methyl modified nucleoside
  modified_base 12: mod_base = OTHER; note = 2-O-methyl modified nucleoside
  modified_base 13: mod_base = OTHER; note = 2-O-methyl modified nucleoside
  modified_base 14: mod_base = OTHER; note = 2-O-methyl modified nucleoside
  modified_base 15: mod_base = OTHER; note = 2-O-methyl modified nucleoside
  modified_base 16: mod_base = OTHER; note = 2-O-methyl modified nucleoside
  modified_base 17: mod_base = OTHER; note = 2-O-methyl modified nucleoside
  modified_base 18: mod_base = OTHER; note = 2-O-methyl modified nucleoside
  modified_base 19: mod_base = OTHER; note = 2-O-methyl modified nucleoside
  modified_base 20: mod_base = OTHER; note = 2-O-methyl modified nucleoside
  modified_base 21: mod_base = OTHER; note = 2-O-methyl modified nucleoside
ccagtatcataacaacacatt

SEQ ID NO: 11571 - RNA, 21 nt, synthetic construct
  source 1..21: mol_type = other RNA
  modified_base 5: mod_base = OTHER; note = 2-fluoro-modified nucleoside
  modified_base 7: mod_base = OTHER; note = 2-fluoro-modified nucleoside
  modified_base 8: mod_base = OTHER; note = 2-fluoro-modified nucleoside
  modified_base 9: mod_base = OTHER; note = 2-fluoro-modified nucleoside
  modified_base 10: mod_base = OTHER; note = 2-fluoro-modified nucleoside
  modified_base 19^20: mod_base = OTHER; note = phosphorothioate linkage
  modified_base 20^21: mod_base = OTHER; note = phosphorothioate linkage
  modified_base 1: mod_base = OTHER; note = 2-O-methyl modified nucleoside
  modified_base 2: mod_base = OTHER; note = 2-O-methyl modified nucleoside
  modified_base 3: mod_base = OTHER; note = 2-O-methyl modified nucleoside
  modified_base 4: mod_base = OTHER; note = 2-O-methyl modified nucleoside
  modified_base 6: mod_base = OTHER; note = 2-O-methyl modified nucleoside
  modified_base 11: mod_base = OTHER; note = 2-O-methyl modified nucleoside
  modified_base 12: mod_base = OTHER; note = 2-O-methyl modified nucleoside
  modified_base 13: mod_base = OTHER; note = 2-O-methyl modified nucleoside
  modified_base 14: mod_base = OTHER; note = 2-O-methyl modified nucleoside
  modified_base 15: mod_base = OTHER; note = 2-O-methyl modified nucleoside
  modified_base 16: mod_base = OTHER; note = 2-O-methyl modified nucleoside
  modified_base 17: mod_base = OTHER; note = 2-O-methyl modified nucleoside
  modified_base 18: mod_base = OTHER; note = 2-O-methyl modified nucleoside
  modified_base 19: mod_base = OTHER; note = 2-O-methyl modified nucleoside
  modified_base 20: mod_base = OTHER; note = 2-O-methyl modified nucleoside
  modified_base 21: mod_base = OTHER; note = 2-O-methyl modified nucleoside
ctcaatggagtgtactacatt

SEQ ID NO: 11572 - RNA, 21 nt, synthetic construct
  source 1..21: mol_type = other RNA
  modified_base 5: mod_base = OTHER; note = 2-fluoro-modified nucleoside
  modified_base 6: mod_base = OTHER; note = 2-fluoro-modified nucleoside
  modified_base 9: mod_base = OTHER; note = 2-fluoro-modified nucleoside
  modified_base 11: mod_base = OTHER; note = 2-fluoro-modified nucleoside
  modified_base 19^20: mod_base = OTHER; note = phosphorothioate linkage
  modified_base 20^21: mod_base = OTHER; note = phosphorothioate linkage
  modified_base 1: mod_base = OTHER; note = 2-O-methyl modified nucleoside
  modified_base 2: mod_base = OTHER; note = 2-O-methyl modified nucleoside
  modified_base 3: mod_base = OTHER; note = 2-O-methyl modified nucleoside
  modified_base 4: mod_base = OTHER; note = 2-O-methyl modified nucleoside
  modified_base 7: mod_base = OTHER; note = 2-O-methyl modified nucleoside
  modified_base 8: mod_base = OTHER; note = 2-O-methyl modified nucleoside
  modified_base 10: mod_base = OTHER; note = 2-O-methyl modified nucleoside
  modified_base 12: mod_base = OTHER; note = 2-O-methyl modified nucleoside
  modified_base 13: mod_base = OTHER; note = 2-O-methyl modified nucleoside
  modified_base 14: mod_base = OTHER; note = 2-O-methyl modified nucleoside
  modified_base 15: mod_base = OTHER; note = 2-O-methyl modified nucleoside
  modified_base 16: mod_base = OTHER; note = 2-O-methyl modified nucleoside
  modified_base 17: mod_base = OTHER; note = 2-O-methyl modified nucleoside
  modified_base 18: mod_base = OTHER; note = 2-O-methyl modified nucleoside
  modified_base 19: mod_base = OTHER; note = 2-O-methyl modified nucleoside
  modified_base 20: mod_base = OTHER; note = 2-O-methyl modified nucleoside
  modified_base 21: mod_base = OTHER; note = 2-O-methyl modified nucleoside
atgatttgtctgtgaaagatt

SEQ ID NO: 11573 - RNA, 21 nt, synthetic construct
  source 1..21: mol_type = other RNA
  modified_base 6: mod_base = OTHER; note = 2-fluoro-modified nucleoside
  modified_base 7: mod_base = OTHER; note = 2-fluoro-modified nucleoside
  modified_base 8: mod_base = OTHER; note = 2-fluoro-modified nucleoside
  modified_base 9: mod_base = OTHER; note = 2-fluoro-modified nucleoside
  modified_base 11: mod_base = OTHER; note = 2-fluoro-modified nucleoside
  modified_base 19^20: mod_base = OTHER; note = phosphorothioate linkage
  modified_base 20^21: mod_base = OTHER; note = phosphorothioate linkage
  modified_base 1: mod_base = OTHER; note = 2-O-methyl modified nucleoside
  modified_base 2: mod_base = OTHER; note = 2-O-methyl modified nucleoside
  modified_base 3: mod_base = OTHER; note = 2-O-methyl modified nucleoside
  modified_base 4: mod_base = OTHER; note = 2-O-methyl modified nucleoside
  modified_base 5: mod_base = OTHER; note = 2-O-methyl modified nucleoside
  modified_base 10: mod_base = OTHER; note = 2-O-methyl modified nucleoside
  modified_base 12: mod_base = OTHER; note = 2-O-methyl modified nucleoside
  modified_base 13: mod_base = OTHER; note = 2-O-methyl modified nucleoside
  modified_base 14: mod_base = OTHER; note = 2-O-methyl modified nucleoside
  modified_base 15: mod_base = OTHER; note = 2-O-methyl modified nucleoside
  modified_base 16: mod_base = OTHER; note = 2-O-methyl modified nucleoside
  modified_base 17: mod_base = OTHER; note = 2-O-methyl modified nucleoside
  modified_base 18: mod_base = OTHER; note = 2-O-methyl modified nucleoside
  modified_base 19: mod_base = OTHER; note = 2-O-methyl modified nucleoside
  modified_base 20: mod_base = OTHER; note = 2-O-methyl modified nucleoside
  modified_base 21: mod_base = OTHER; note = 2-O-methyl modified nucleoside
acaaatccctttgctaaaatt

SEQ ID NO: 11574 - RNA, 21 nt, synthetic construct
  source 1..21: mol_type = other RNA
  modified_base 6: mod_base = OTHER; note = 2-fluoro-modified nucleoside
  modified_base 7: mod_base = OTHER; note = 2-fluoro-modified nucleoside
  modified_base 8: mod_base = OTHER; note = 2-fluoro-modified nucleoside
  modified_base 9: mod_base = OTHER; note = 2-fluoro-modified nucleoside
  modified_base 19^20: mod_base = OTHER; note = phosphorothioate linkage
  modified_base 20^21: mod_base = OTHER; note = phosphorothioate linkage
  modified_base 1: mod_base = OTHER; note = 2-O-methyl modified nucleoside
  modified_base 2: mod_base = OTHER; note = 2-O-methyl modified nucleoside
  modified_base 3: mod_base = OTHER; note = 2-O-methyl modified nucleoside
  modified_base 4: mod_base = OTHER; note = 2-O-methyl modified nucleoside
  modified_base 5: mod_base = OTHER; note = 2-O-methyl modified nucleoside
  modified_base 10: mod_base = OTHER; note = 2-O-methyl modified nucleoside
  modified_base 11: mod_base = OTHER; note = 2-O-methyl modified nucleoside
  modified_base 12: mod_base = OTHER; note = 2-O-methyl modified nucleoside
  modified_base 13: mod_base = OTHER; note = 2-O-methyl modified nucleoside
  modified_base 14: mod_base = OTHER; note = 2-O-methyl modified nucleoside
  modified_base 15: mod_base = OTHER; note = 2-O-methyl modified nucleoside
  modified_base 16: mod_base = OTHER; note = 2-O-methyl modified nucleoside
  modified_base 17: mod_base = OTHER; note = 2-O-methyl modified nucleoside
  modified_base 18: mod_base = OTHER; note = 2-O-methyl modified nucleoside
  modified_base 19: mod_base = OTHER; note = 2-O-methyl modified nucleoside
  modified_base 20: mod_base = OTHER; note = 2-O-methyl modified nucleoside
  modified_base 21: mod_base = OTHER; note = 2-O-methyl modified nucleoside
aattatcttgagtctacaatt

SEQ ID NO: 11575 - RNA, 21 nt, synthetic construct
  source 1..21: mol_type = other RNA
  modified_base 5: mod_base = OTHER; note = 2-fluoro-modified nucleoside
  modified_base 6: mod_base = OTHER; note = 2-fluoro-modified nucleoside
  modified_base 7: mod_base = OTHER; note = 2-fluoro-modified nucleoside
  modified_base 8: mod_base = OTHER; note = 2-fluoro-modified nucleoside
  modified_base 9: mod_base = OTHER; note = 2-fluoro-modified nucleoside
  modified_base 19^20: mod_base = OTHER; note = phosphorothioate linkage
  modified_base 20^21: mod_base = OTHER; note = phosphorothioate linkage
  modified_base 1: mod_base = OTHER; note = 2-O-methyl modified nucleoside
  modified_base 2: mod_base = OTHER; note = 2-O-methyl modified nucleoside
  modified_base 3: mod_base = OTHER; note = 2-O-methyl modified nucleoside
  modified_base 4: mod_base = OTHER; note = 2-O-methyl modified nucleoside
  modified_base 10: mod_base = OTHER; note = 2-O-methyl modified nucleoside
  modified_base 11: mod_base = OTHER; note = 2-O-methyl modified nucleoside
  modified_base 12: mod_base = OTHER; note = 2-O-methyl modified nucleoside
  modified_base 13: mod_base = OTHER; note = 2-O-methyl modified nucleoside
  modified_base 14: mod_base = OTHER; note = 2-O-methyl modified nucleoside
  modified_base 15: mod_base = OTHER; note = 2-O-methyl modified nucleoside
  modified_base 16: mod_base = OTHER; note = 2-O-methyl modified nucleoside
  modified_base 17: mod_base = OTHER; note = 2-O-methyl modified nucleoside
  modified_base 18: mod_base = OTHER; note = 2-O-methyl modified nucleoside
  modified_base 19: mod_base = OTHER; note = 2-O-methyl modified nucleoside
  modified_base 20: mod_base = OTHER; note = 2-O-methyl modified nucleoside
  modified_base 21: mod_base = OTHER; note = 2-O-methyl modified nucleoside
acacaaaaattgttcggcatt

SEQ ID NO: 11576 - RNA, 21 nt, synthetic construct
  source 1..21: mol_type = other RNA
  modified_base 9: mod_base = OTHER; note = 2-fluoro-modified nucleoside
  modified_base 10: mod_base = OTHER; note = 2-fluoro-modified nucleoside
  modified_base 19^20: mod_base = OTHER; note = phosphorothioate linkage
  modified_base 20^21: mod_base = OTHER; note = phosphorothioate linkage
  modified_base 1: mod_base = OTHER; note = 2-O-methyl modified nucleoside
  modified_base 2: mod_base = OTHER; note = 2-O-methyl modified nucleoside
  modified_base 3: mod_base = OTHER; note = 2-O-methyl modified nucleoside
  modified_base 4: mod_base = OTHER; note = 2-O-methyl modified nucleoside
  modified_base 5: mod_base = OTHER; note = 2-O-methyl modified nucleoside
  modified_base 6: mod_base = OTHER; note = 2-O-methyl modified nucleoside
  modified_base 7: mod_base = OTHER; note = 2-O-methyl modified nucleoside
  modified_base 8: mod_base = OTHER; note = 2-O-methyl modified nucleoside
  modified_base 11: mod_base = OTHER; note = 2-O-methyl modified nucleoside
  modified_base 12: mod_base = OTHER; note = 2-O-methyl modified nucleoside
  modified_base 13: mod_base = OTHER; note = 2-O-methyl modified nucleoside
  modified_base 14: mod_base = OTHER; note = 2-O-methyl modified nucleoside
  modified_base 15: mod_base = OTHER; note = 2-O-methyl modified nucleoside
  modified_base 16: mod_base = OTHER; note = 2-O-methyl modified nucleoside
  modified_base 17: mod_base = OTHER; note = 2-O-methyl modified nucleoside
  modified_base 18: mod_base = OTHER; note = 2-O-methyl modified nucleoside
  modified_base 19: mod_base = OTHER; note = 2-O-methyl modified nucleoside
  modified_base 20: mod_base = OTHER; note = 2-O-methyl modified nucleoside
  modified_base 21: mod_base = OTHER; note = 2-O-methyl modified nucleoside
cacaaaaattgttcggctatt

SEQ ID NO: 11577 - RNA, 21 nt, synthetic construct
  source 1..21: mol_type = other RNA
  modified_base 7: mod_base = OTHER; note = 2-fluoro-modified nucleoside
  modified_base 8: mod_base = OTHER; note = 2-fluoro-modified nucleoside
  modified_base 9: mod_base = OTHER; note = 2-fluoro-modified nucleoside
  modified_base 10: mod_base = OTHER; note = 2-fluoro-modified nucleoside
  modified_base 19^20: mod_base = OTHER; note = phosphorothioate linkage
  modified_base 20^21: mod_base = OTHER; note = phosphorothioate linkage
  modified_base 1: mod_base = OTHER; note = 2-O-methyl modified nucleoside
  modified_base 2: mod_base = OTHER; note = 2-O-methyl modified nucleoside
  modified_base 3: mod_base = OTHER; note = 2-O-methyl modified nucleoside
  modified_base 4: mod_base = OTHER; note = 2-O-methyl modified nucleoside
  modified_base 5: mod_base = OTHER; note = 2-O-methyl modified nucleoside
  modified_base 6: mod_base = OTHER; note = 2-O-methyl modified nucleoside
  modified_base 11: mod_base = OTHER; note = 2-O-methyl modified nucleoside
  modified_base 12: mod_base = OTHER; note = 2-O-methyl modified nucleoside
  modified_base 13: mod_base = OTHER; note = 2-O-methyl modified nucleoside
  modified_base 14: mod_base = OTHER; note = 2-O-methyl modified nucleoside
  modified_base 15: mod_base = OTHER; note = 2-O-methyl modified nucleoside
  modified_base 16: mod_base = OTHER; note = 2-O-methyl modified nucleoside
  modified_base 17: mod_base = OTHER; note = 2-O-methyl modified nucleoside
  modified_base 18: mod_base = OTHER; note = 2-O-methyl modified nucleoside
  modified_base 19: mod_base = OTHER; note = 2-O-methyl modified nucleoside
  modified_base 20: mod_base = OTHER; note = 2-O-methyl modified nucleoside
  modified_base 21: mod_base = OTHER; note = 2-O-methyl modified nucleoside
tgccttaaaatattcataatt

SEQ ID NO: 11578 - RNA, 21 nt, synthetic construct
  source 1..21: mol_type = other RNA
  modified_base 5: mod_base = OTHER; note = 2-fluoro-modified nucleoside
  modified_base 6: mod_base = OTHER; note = 2-fluoro-modified nucleoside
  modified_base 9: mod_base = OTHER; note = 2-fluoro-modified nucleoside
  modified_base 11: mod_base = OTHER; note = 2-fluoro-modified nucleoside
  modified_base 19^20: mod_base = OTHER; note = phosphorothioate linkage
  modified_base 20^21: mod_base = OTHER; note = phosphorothioate linkage
  modified_base 1: mod_base = OTHER; note = 2-O-methyl modified nucleoside
  modified_base 2: mod_base = OTHER; note = 2-O-methyl modified nucleoside
  modified_base 3: mod_base = OTHER; note = 2-O-methyl modified nucleoside
  modified_base 4: mod_base = OTHER; note = 2-O-methyl modified nucleoside
  modified_base 7: mod_base = OTHER; note = 2-O-methyl modified nucleoside
  modified_base 8: mod_base = OTHER; note = 2-O-methyl modified nucleoside
  modified_base 10: mod_base = OTHER; note = 2-O-methyl modified nucleoside
  modified_base 12: mod_base = OTHER; note = 2-O-methyl modified nucleoside
  modified_base 13: mod_base = OTHER; note = 2-O-methyl modified nucleoside
  modified_base 14: mod_base = OTHER; note = 2-O-methyl modified nucleoside
  modified_base 15: mod_base = OTHER; note = 2-O-methyl modified nucleoside
  modified_base 16: mod_base = OTHER; note = 2-O-methyl modified nucleoside
  modified_base 17: mod_base = OTHER; note = 2-O-methyl modified nucleoside
  modified_base 18: mod_base = OTHER; note = 2-O-methyl modified nucleoside
  modified_base 19: mod_base = OTHER; note = 2-O-methyl modified nucleoside
  modified_base 20: mod_base = OTHER; note = 2-O-methyl modified nucleoside
  modified_base 21: mod_base = OTHER; note = 2-O-methyl modified nucleoside
tgaaaactgaaggtagatatt

SEQ ID NO: 11579 - RNA, 21 nt, synthetic construct
  source 1..21: mol_type = other RNA
  modified_base 5: mod_base = OTHER; note = 2-fluoro-modified nucleoside
  modified_base 7: mod_base = OTHER; note = 2-fluoro-modified nucleoside
  modified_base 9: mod_base = OTHER; note = 2-fluoro-modified nucleoside
  modified_base 11: mod_base = OTHER; note = 2-fluoro-modified nucleoside
  modified_base 19^20: mod_base = OTHER; note = phosphorothioate linkage
  modified_base 20^21: mod_base = OTHER; note = phosphorothioate linkage
  modified_base 1: mod_base = OTHER; note = 2-O-methyl modified nucleoside
  modified_base 2: mod_base = OTHER; note = 2-O-methyl modified nucleoside
  modified_base 3: mod_base = OTHER; note = 2-O-methyl modified nucleoside
  modified_base 4: mod_base = OTHER; note = 2-O-methyl modified nucleoside
  modified_base 6: mod_base = OTHER; note = 2-O-methyl modified nucleoside
  modified_base 8: mod_base = OTHER; note = 2-O-methyl modified nucleoside
  modified_base 10: mod_base = OTHER; note = 2-O-methyl modified nucleoside
  modified_base 12: mod_base = OTHER; note = 2-O-methyl modified nucleoside
  modified_base 13: mod_base = OTHER; note = 2-O-methyl modified nucleoside
  modified_base 14: mod_base = OTHER; note = 2-O-methyl modified nucleoside
  modified_base 15: mod_base = OTHER; note = 2-O-methyl modified nucleoside
  modified_base 16: mod_base = OTHER; note = 2-O-methyl modified nucleoside
  modified_base 17: mod_base = OTHER; note = 2-O-methyl modified nucleoside
  modified_base 18: mod_base = OTHER; note = 2-O-methyl modified nucleoside
  modified_base 19: mod_base = OTHER; note = 2-O-methyl modified nucleoside
  modified_base 20: mod_base = OTHER; note = 2-O-methyl modified nucleoside
  modified_base 21: mod_base = OTHER; note = 2-O-methyl modified nucleoside
gaaggtagatggtgttatatt

SEQ ID NO: 11580 - RNA, 21 nt, synthetic construct
  source 1..21: mol_type = other RNA
  modified_base 6: mod_base = OTHER; note = 2-fluoro-modified nucleoside
  modified_base 9: mod_base = OTHER; note = 2-fluoro-modified nucleoside
  modified_base 11: mod_base = OTHER; note = 2-fluoro-modified nucleoside
  modified_base 19^20: mod_base = OTHER; note = phosphorothioate linkage
  modified_base 20^21: mod_base = OTHER; note = phosphorothioate linkage
  modified_base 1: mod_base = OTHER; note = 2-O-methyl modified nucleoside
  modified_base 2: mod_base = OTHER; note = 2-O-methyl modified nucleoside
  modified_base 3: mod_base = OTHER; note = 2-O-methyl modified nucleoside
  modified_base 4: mod_base = OTHER; note = 2-O-methyl modified nucleoside
  modified_base 5: mod_base = OTHER; note = 2-O-methyl modified nucleoside
  modified_base 7: mod_base = OTHER; note = 2-O-methyl modified nucleoside
  modified_base 8: mod_base = OTHER; note = 2-O-methyl modified nucleoside
  modified_base 10: mod_base = OTHER; note = 2-O-methyl modified nucleoside
  modified_base 12: mod_base = OTHER; note = 2-O-methyl modified nucleoside
  modified_base 13: mod_base = OTHER; note = 2-O-methyl modified nucleoside
  modified_base 14: mod_base = OTHER; note = 2-O-methyl modified nucleoside
  modified_base 15: mod_base = OTHER; note = 2-O-methyl modified nucleoside
  modified_base 16: mod_base = OTHER; note = 2-O-methyl modified nucleoside
  modified_base 17: mod_base = OTHER; note = 2-O-methyl modified nucleoside
  modified_base 18: mod_base = OTHER; note = 2-O-methyl modified nucleoside
  modified_base 19: mod_base = OTHER; note = 2-O-methyl modified nucleoside
  modified_base 20: mod_base = OTHER; note = 2-O-methyl modified nucleoside
  modified_base 21: mod_base = OTHER; note = 2-O-methyl modified nucleoside
gtagatggtgttatagttatt

SEQ ID NO: 11581 - RNA, 21 nt, synthetic construct
  source 1..21: mol_type = other RNA
  modified_base 6: mod_base = OTHER; note = 2-fluoro-modified nucleoside
  modified_base 7: mod_base = OTHER; note = 2-fluoro-modified nucleoside
  modified_base 9: mod_base = OTHER; note = 2-fluoro-modified nucleoside
  modified_base 19^20: mod_base = OTHER; note = phosphorothioate linkage
  modified_base 20^21: mod_base = OTHER; note = phosphorothioate linkage
  modified_base 1: mod_base = OTHER; note = 2-O-methyl modified nucleoside
  modified_base 2: mod_base = OTHER; note = 2-O-methyl modified nucleoside
  modified_base 3: mod_base = OTHER; note = 2-O-methyl modified nucleoside
  modified_base 4: mod_base = OTHER; note = 2-O-methyl modified nucleoside
  modified_base 5: mod_base = OTHER; note = 2-O-methyl modified nucleoside
  modified_base 8: mod_base = OTHER; note = 2-O-methyl modified nucleoside
  modified_base 10: mod_base = OTHER; note = 2-O-methyl modified nucleoside
  modified_base 11: mod_base = OTHER; note = 2-O-methyl modified nucleoside
  modified_base 12: mod_base = OTHER; note = 2-O-methyl modified nucleoside
  modified_base 13: mod_base = OTHER; note = 2-O-methyl modified nucleoside
  modified_base 14: mod_base = OTHER; note = 2-O-methyl modified nucleoside
  modified_base 15: mod_base = OTHER; note = 2-O-methyl modified nucleoside
  modified_base 16: mod_base = OTHER; note = 2-O-methyl modified nucleoside
  modified_base 17: mod_base = OTHER; note = 2-O-methyl modified nucleoside
  modified_base 18: mod_base = OTHER; note = 2-O-methyl modified nucleoside
  modified_base 19: mod_base = OTHER; note = 2-O-methyl modified nucleoside
  modified_base 20: mod_base = OTHER; note = 2-O-methyl modified nucleoside
  modified_base 21: mod_base = OTHER; note = 2-O-methyl modified nucleoside
tagatggtgttatagttaatt

SEQ ID NO: 11582 - RNA, 21 nt, synthetic construct
  source 1..21: mol_type = other RNA
  modified_base 7: mod_base = OTHER; note = 2-fluoro-modified nucleoside
  modified_base 9: mod_base = OTHER; note = 2-fluoro-modified nucleoside
  modified_base 10: mod_base = OTHER; note = 2-fluoro-modified nucleoside
  modified_base 19^20: mod_base = OTHER; note = phosphorothioate linkage
  modified_base 20^21: mod_base = OTHER; note = phosphorothioate linkage
  modified_base 1: mod_base = OTHER; note = 2-O-methyl modified nucleoside
  modified_base 2: mod_base = OTHER; note = 2-O-methyl modified nucleoside
  modified_base 3: mod_base = OTHER; note = 2-O-methyl modified nucleoside
  modified_base 4: mod_base = OTHER; note = 2-O-methyl modified nucleoside
  modified_base 17: mod_base = OTHER; note = 2-O-methyl modified nucleoside
  modified_base 5: mod_base = OTHER; note = 2-O-methyl modified nucleoside
  modified_base 6: mod_base = OTHER; note = 2-O-methyl modified nucleoside
  modified_base 8: mod_base = OTHER; note = 2-O-methyl modified nucleoside
  modified_base 11: mod_base = OTHER; note = 2-O-methyl modified nucleoside
  modified_base 12: mod_base = OTHER; note = 2-O-methyl modified nucleoside
  modified_base 13: mod_base = OTHER; note = 2-O-methyl modified nucleoside
  modified_base 14: mod_base = OTHER; note = 2-O-methyl modified nucleoside
  modified_base 15: mod_base = OTHER; note = 2-O-methyl modified nucleoside
  modified_base 16: mod_base = OTHER; note = 2-O-methyl modified nucleoside
  modified_base 18: mod_base = OTHER; note = 2-O-methyl modified nucleoside
  modified_base 19: mod_base = OTHER; note = 2-O-methyl modified nucleoside
  modified_base 20: mod_base = OTHER; note = 2-O-methyl modified nucleoside
  modified_base 21: mod_base = OTHER; note = 2-O-methyl modified nucleoside
agatggtgttatagttaaatt

SEQ ID NO: 11583 - RNA, 21 nt, synthetic construct
  source 1..21: mol_type = other RNA
  modified_base 2: mod_base = OTHER; note = 2-fluoro-modified nucleoside
  modified_base 4: mod_base = OTHER; note = 2-fluoro-modified nucleoside
  modified_base 6: mod_base = OTHER; note = 2-fluoro-modified nucleoside
  modified_base 6: mod_base = OTHER; note = 2-fluoro-modified nucleoside
  modified_base 8: mod_base = OTHER; note = 2-fluoro-modified nucleoside
  modified_base 9: mod_base = OTHER; note = 2-fluoro-modified nucleoside
  modified_base 14: mod_base = OTHER; note = 2-fluoro-modified nucleoside
  modified_base 15: mod_base = OTHER; note = 2-fluoro-modified nucleoside
  modified_base 17: mod_base = OTHER; note = 2-fluoro-modified nucleoside
  modified_base 19^20: mod_base = OTHER; note = phosphorothioate linkage
  modified_base 20^21: mod_base = OTHER; note = phosphorothioate linkage
  modified_base 1: mod_base = OTHER; note = 2-O-methyl modified nucleoside; note = stearyl; note = phosphorothioate linkage
  modified_base 3: mod_base = OTHER; note = 2-O-methyl modified nucleoside
  modified_base 5: mod_base = OTHER; note = 2-O-methyl modified nucleoside
  modified_base 7: mod_base = OTHER; note = 2-O-methyl modified nucleoside
  modified_base 10: mod_base = OTHER; note = 2-O-methyl modified nucleoside
  modified_base 11: mod_base = OTHER; note = 2-O-methyl modified nucleoside
  modified_base 12: mod_base = OTHER; note = 2-O-methyl modified nucleoside
  modified_base 13: mod_base = OTHER; note = 2-O-methyl modified nucleoside
  modified_base 14: mod_base = OTHER; note = 2-O-methyl modified nucleoside
  modified_base 16: mod_base = OTHER; note = 2-O-methyl modified nucleoside
  modified_base 18: mod_base = OTHER; note = 2-O-methyl modified nucleoside
  modified_base 19: mod_base = OTHER; note = 2-O-methyl modified nucleoside
  modified_base 20: mod_base = OTHER; note = 2-O-methyl modified nucleoside
  modified_base 21: mod_base = OTHER; note = 2-O-methyl modified nucleoside
atatgtaccaaggatgttatt

SEQ ID NO: 11584 - RNA, 21 nt, synthetic construct
  source 1..21: mol_type = other RNA
  modified_base 5: mod_base = OTHER; note = 2-O-methyl modified nucleoside
  modified_base 6: mod_base = OTHER; note = 2-fluoro-modified nucleoside
  modified_base 8: mod_base = OTHER; note = 2-fluoro-modified nucleoside
  modified_base 9: mod_base = OTHER; note = 2-fluoro-modified nucleoside
  modified_base 11: mod_base = OTHER; note = 2-fluoro-modified nucleoside
  modified_base 19^20: mod_base = OTHER; note = phosphorothioate linkage
  modified_base 20^21: mod_base = OTHER; note = phosphorothioate linkage
  modified_base 1: mod_base = OTHER; note = phosphorothioate linkage; note = Conjugated lipid moiety; note = 2-O-methyl modified nucleoside
  modified_base 2: mod_base = OTHER; note = 2-O-methyl modified nucleoside
  modified_base 3: mod_base = OTHER; note = 2-O-methyl modified nucleoside
  modified_base 4: mod_base = OTHER; note = 2-O-methyl modified nucleoside
  modified_base 10: mod_base = OTHER; note = 2-O-methyl modified nucleoside
  modified_base 12: mod_base = OTHER; note = 2-O-methyl modified nucleoside
  modified_base 13: mod_base = OTHER; note = 2-O-methyl modified nucleoside
  modified_base 14: mod_base = OTHER; note = 2-O-methyl modified nucleoside
  modified_base 15: mod_base = OTHER; note = 2-O-methyl modified nucleoside
  modified_base 16: mod_base = OTHER; note = 2-O-methyl modified nucleoside
  modified_base 17: mod_base = OTHER; note = 2-O-methyl modified nucleoside
  modified_base 18: mod_base = OTHER; note = 2-O-methyl modified nucleoside
  modified_base 19: mod_base = OTHER; note = 2-O-methyl modified nucleoside
  modified_base 20: mod_base = OTHER; note = 2-O-methyl modified nucleoside
  modified_base 21: mod_base = OTHER; note = 2-O-methyl modified nucleoside
ataagcttcctcctgatgatt

SEQ ID NO: 11585 - RNA, 21 nt, synthetic construct
  source 1..21: mol_type = other RNA
  modified_base 5: mod_base = OTHER; note = 2-fluoro-modified nucleoside
  modified_base 6: mod_base = OTHER; note = 2-fluoro-modified nucleoside
  modified_base 9: mod_base = OTHER; note = 2-fluoro-modified nucleoside
  modified_base 11: mod_base = OTHER; note = 2-fluoro-modified nucleoside
  modified_base 19^20: mod_base = OTHER; note = phosphorothioate linkage
  modified_base 20^21: mod_base = OTHER; note = phosphorothioate linkage
  modified_base 1: mod_base = OTHER; note = Conjugated lipid moiety; note = phosphorothioate linkage; note = 2-O-methyl modified nucleoside
  modified_base 2: mod_base = OTHER; note = 2-O-methyl modified nucleoside
  modified_base 3: mod_base = OTHER; note = 2-O-methyl modified nucleoside
  modified_base 4: mod_base = OTHER; note = 2-O-methyl modified nucleoside
  modified_base 7: mod_base = OTHER; note = 2-O-methyl modified nucleoside
  modified_base 8: mod_base = OTHER; note = 2-O-methyl modified nucleoside
  modified_base 10: mod_base = OTHER; note = 2-O-methyl modified nucleoside
  modified_base 12: mod_base = OTHER; note = 2-O-methyl modified nucleoside
  modified_base 13: mod_base = OTHER; note = 2-O-methyl modified nucleoside
  modified_base 14: mod_base = OTHER; note = 2-O-methyl modified nucleoside
  modified_base 15: mod_base = OTHER; note = 2-O-methyl modified nucleoside
  modified_base 16: mod_base = OTHER; note = 2-O-methyl modified nucleoside
  modified_base 17: mod_base = OTHER; note = 2-O-methyl modified nucleoside
  modified_base 18: mod_base = OTHER; note = 2-O-methyl modified nucleoside
  modified_base 19: mod_base = OTHER; note = 2-O-methyl modified nucleoside
  modified_base 20: mod_base = OTHER; note = 2-O-methyl modified nucleoside
  modified_base 21: mod_base = OTHER; note = 2-O-methyl modified nucleoside
atgatttgtctgtgaaagatt

SEQ ID NO: 11586 - RNA, 21 nt, synthetic construct
  source 1..21: mol_type = other RNA
  modified_base 6: mod_base = OTHER; note = 2-fluoro-modified nucleoside
  modified_base 7: mod_base = OTHER; note = 2-fluoro-modified nucleoside
  modified_base 8: mod_base = OTHER; note = 2-fluoro-modified nucleoside
  modified_base 9: mod_base = OTHER; note = 2-fluoro-modified nucleoside
  modified_base 19^20: mod_base = OTHER; note = phosphorothioate linkage
  modified_base 20^21: mod_base = OTHER; note = phosphorothioate linkage
  modified_base 1: mod_base = OTHER; note = phosphorothioate linkage; note = Conjugated lipid moiety; note = 2-O-methyl modified nucleoside
  modified_base 2: mod_base = OTHER; note = 2-O-methyl modified nucleoside
  modified_base 3: mod_base = OTHER; note = 2-O-methyl modified nucleoside
  modified_base 4: mod_base = OTHER; note = 2-O-methyl modified nucleoside
  modified_base 5: mod_base = OTHER; note = 2-O-methyl modified nucleoside
  modified_base 10: mod_base = OTHER; note = 2-O-methyl modified nucleoside
  modified_base 11: mod_base = OTHER; note = 2-O-methyl modified nucleoside
  modified_base 12: mod_base = OTHER; note = 2-O-methyl modified nucleoside
  modified_base 13: mod_base = OTHER; note = 2-O-methyl modified nucleoside
  modified_base 14: mod_base = OTHER; note = 2-O-methyl modified nucleoside
  modified_base 15: mod_base = OTHER; note = 2-O-methyl modified nucleoside
  modified_base 16: mod_base = OTHER; note = 2-O-methyl modified nucleoside
  modified_base 17: mod_base = OTHER; note = 2-O-methyl modified nucleoside
  modified_base 18: mod_base = OTHER; note = 2-O-methyl modified nucleoside
  modified_base 19: mod_base = OTHER; note = 2-O-methyl modified nucleoside
  modified_base 20: mod_base = OTHER; note = 2-O-methyl modified nucleoside
  modified_base 21: mod_base = OTHER; note = 2-O-methyl modified nucleoside
aattatcttgagtctacaatt

SEQ ID NO: 11587 - RNA, 21 nt, synthetic construct
  source 1..21: mol_type = other RNA
  modified_base 5: mod_base = OTHER; note = 2-fluoro-modified nucleoside
  modified_base 6: mod_base = OTHER; note = 2-fluoro-modified nucleoside
  modified_base 7: mod_base = OTHER; note = 2-fluoro-modified nucleoside
  modified_base 8: mod_base = OTHER; note = 2-fluoro-modified nucleoside
  modified_base 9: mod_base = OTHER; note = 2-fluoro-modified nucleoside
  modified_base 19^20: mod_base = OTHER; note = phosphorothioate linkage
  modified_base 20^21: mod_base = OTHER; note = phosphorothioate linkage
  modified_base 1: mod_base = OTHER; note = Conjugated lipid moiety; note = phosphorothioate linkage; note = 2-O-methyl modified nucleoside
  modified_base 3: mod_base = OTHER; note = 2-O-methyl modified nucleoside
  modified_base 2: mod_base = OTHER; note = 2-O-methyl modified nucleoside
  modified_base 4: mod_base = OTHER; note = 2-O-methyl modified nucleoside
  modified_base 10: mod_base = OTHER; note = 2-O-methyl modified nucleoside
  modified_base 11: mod_base = OTHER; note = 2-O-methyl modified nucleoside
  modified_base 12: mod_base = OTHER; note = 2-O-methyl modified nucleoside
  modified_base 13: mod_base = OTHER; note = 2-O-methyl modified nucleoside
  modified_base 14: mod_base = OTHER; note = 2-O-methyl modified nucleoside
  modified_base 15: mod_base = OTHER; note = 2-O-methyl modified nucleoside
  modified_base 16: mod_base = OTHER; note = 2-O-methyl modified nucleoside
  modified_base 17: mod_base = OTHER; note = 2-O-methyl modified nucleoside
  modified_base 18: mod_base = OTHER; note = 2-O-methyl modified nucleoside
  modified_base 19: mod_base = OTHER; note = 2-O-methyl modified nucleoside
  modified_base 20: mod_base = OTHER; note = 2-O-methyl modified nucleoside
  modified_base 21: mod_base = OTHER; note = 2-O-methyl modified nucleoside
acacaaaaattgttcggcatt

SEQ ID NO: 11588 - RNA, 21 nt, synthetic construct
  source 1..21: mol_type = other RNA
  modified_base 9: mod_base = OTHER; note = 2-fluoro-modified nucleoside
  modified_base 10: mod_base = OTHER; note = 2-fluoro-modified nucleoside
  modified_base 19^20: mod_base = OTHER; note = phosphorothioate linkage
  modified_base 20^21: mod_base = OTHER; note = phosphorothioate linkage
  modified_base 1: mod_base = OTHER; note = phosphorothioate linkage; note = 2-O-methyl modified nucleoside; note = Conjugated lipid moiety
  modified_base 2: mod_base = OTHER; note = 2-O-methyl modified nucleoside
  modified_base 3: mod_base = OTHER; note = 2-O-methyl modified nucleoside
  modified_base 4: mod_base = OTHER; note = 2-O-methyl modified nucleoside
  modified_base 5: mod_base = OTHER; note = 2-O-methyl modified nucleoside
  modified_base 6: mod_base = OTHER; note = 2-O-methyl modified nucleoside
  modified_base 7: mod_base = OTHER; note = 2-O-methyl modified nucleoside
  modified_base 8: mod_base = OTHER; note = 2-O-methyl modified nucleoside
  modified_base 11: mod_base = OTHER; note = 2-O-methyl modified nucleoside
  modified_base 12: mod_base = OTHER; note = 2-O-methyl modified nucleoside
  modified_base 13: mod_base = OTHER; note = 2-O-methyl modified nucleoside
  modified_base 14: mod_base = OTHER; note = 2-O-methyl modified nucleoside
  modified_base 16: mod_base = OTHER; note = 2-O-methyl modified nucleoside
  modified_base 15: mod_base = OTHER; note = 2-O-methyl modified nucleoside
  modified_base 18: mod_base = OTHER; note = 2-O-methyl modified nucleoside
  modified_base 17: mod_base = OTHER; note = 2-O-methyl modified nucleoside
  modified_base 19: mod_base = OTHER; note = 2-O-methyl modified nucleoside
  modified_base 20: mod_base = OTHER; note = 2-O-methyl modified nucleoside
  modified_base 21: mod_base = OTHER; note = 2-O-methyl modified nucleoside
cacaaaaattgttcggctatt

SEQ ID NO: 11589 - RNA, 21 nt, synthetic construct
  source 1..21: mol_type = other RNA
  modified_base 5: mod_base = OTHER; note = 2-fluoro-modified nucleoside
  modified_base 6: mod_base = OTHER; note = 2-fluoro-modified nucleoside
  modified_base 9: mod_base = OTHER; note = 2-fluoro-modified nucleoside
  modified_base 11: mod_base = OTHER; note = 2-fluoro-modified nucleoside
  modified_base 19^20: mod_base = OTHER; note = phosphorothioate linkage
  modified_base 20^21: mod_base = OTHER; note = phosphorothioate linkage
  modified_base 1: mod_base = OTHER; note = phosphorothioate linkage
  modified_base 1: mod_base = OTHER; note = Conjugated lipid moiety; note = phosphorothioate linkage; note = 2-O-methyl modified nucleoside
  modified_base 2: mod_base = OTHER; note = 2-O-methyl modified nucleoside
  modified_base 3: mod_base = OTHER; note = 2-O-methyl modified nucleoside
  modified_base 4: mod_base = OTHER; note = 2-O-methyl modified nucleoside
  modified_base 7: mod_base = OTHER; note = 2-O-methyl modified nucleoside
  modified_base 8: mod_base = OTHER; note = 2-O-methyl modified nucleoside
  modified_base 10: mod_base = OTHER; note = 2-O-methyl modified nucleoside
  modified_base 12: mod_base = OTHER; note = 2-O-methyl modified nucleoside
  modified_base 13: mod_base = OTHER; note = 2-O-methyl modified nucleoside
  modified_base 14: mod_base = OTHER; note = 2-O-methyl modified nucleoside
  modified_base 15: mod_base = OTHER; note = 2-O-methyl modified nucleoside
  modified_base 16: mod_base = OTHER; note = 2-O-methyl modified nucleoside
  modified_base 17: mod_base = OTHER; note = 2-O-methyl modified nucleoside
  modified_base 18: mod_base = OTHER; note = 2-O-methyl modified nucleoside
  modified_base 19: mod_base = OTHER; note = 2-O-methyl modified nucleoside
  modified_base 20: mod_base = OTHER; note = 2-O-methyl modified nucleoside
  modified_base 21: mod_base = OTHER; note = 2-O-methyl modified nucleoside
tgaaaactgaaggtagatatt

SEQ ID NO: 11590 - RNA, 21 nt, synthetic construct
  source 1..21: mol_type = other RNA
  modified_base 19^20: mod_base = OTHER; note = phosphorothioate linkage
  modified_base 20^21: mod_base = OTHER; note = phosphorothioate linkage
  modified_base 6: mod_base = OTHER; note = 2-fluoro-modified nucleoside
  modified_base 9: mod_base = OTHER; note = 2-fluoro-modified nucleoside
  modified_base 11: mod_base = OTHER; note = 2-fluoro-modified nucleoside
  modified_base 1: mod_base = OTHER; note = Conjugated lipid moiety; note = phosphorothioate linkage; note = 2-O-methyl modified nucleoside
  modified_base 2: mod_base = OTHER; note = 2-O-methyl modified nucleoside
  modified_base 3: mod_base = OTHER; note = 2-O-methyl modified nucleoside
  modified_base 4: mod_base = OTHER; note = 2-O-methyl modified nucleoside
  modified_base 5: mod_base = OTHER; note = 2-O-methyl modified nucleoside
  modified_base 7: mod_base = OTHER; note = 2-O-methyl modified nucleoside
  modified_base 8: mod_base = OTHER; note = 2-O-methyl modified nucleoside
  modified_base 10: mod_base = OTHER; note = 2-O-methyl modified nucleoside
  modified_base 12: mod_base = OTHER; note = 2-O-methyl modified nucleoside
  modified_base 13: mod_base = OTHER; note = 2-O-methyl modified nucleoside
  modified_base 14: mod_base = OTHER; note = 2-O-methyl modified nucleoside
  modified_base 15: mod_base = OTHER; note = 2-O-methyl modified nucleoside
  modified_base 16: mod_base = OTHER; note = 2-O-methyl modified nucleoside
  modified_base 17: mod_base = OTHER; note = 2-O-methyl modified nucleoside
  modified_base 18: mod_base = OTHER; note = 2-O-methyl modified nucleoside
  modified_base 19: mod_base = OTHER; note = 2-O-methyl modified nucleoside
  modified_base 20: mod_base = OTHER; note = 2-O-methyl modified nucleoside
  modified_base 21: mod_base = OTHER; note = 2-O-methyl modified nucleoside
gtagatggtgttatagttatt

SEQ ID NO: 11591 - RNA, 21 nt, synthetic construct
  source 1..21: mol_type = other RNA
  modified_base 7: mod_base = OTHER; note = 2-fluoro-modified nucleoside
  modified_base 9: mod_base = OTHER; note = 2-fluoro-modified nucleoside
  modified_base 10: mod_base = OTHER; note = 2-fluoro-modified nucleoside
  modified_base 19^20: mod_base = OTHER; note = phosphorothioate linkage
  modified_base 20^21: mod_base = OTHER; note = phosphorothioate linkage
  modified_base 1: mod_base = OTHER; note = phosphorothioate linkage; note = Conjugated lipid moiety; note = 2-O-methyl modified nucleoside
  modified_base 2: mod_base = OTHER; note = 2-O-methyl modified nucleoside
  modified_base 3: mod_base = OTHER; note = 2-O-methyl modified nucleoside
  modified_base 4: mod_base = OTHER; note = 2-O-methyl modified nucleoside
  modified_base 5: mod_base = OTHER; note = 2-O-methyl modified nucleoside
  modified_base 5: mod_base = OTHER; note = 2-O-methyl modified nucleoside
  modified_base 6: mod_base = OTHER; note = 2-O-methyl modified nucleoside
  modified_base 8: mod_base = OTHER; note = 2-O-methyl modified nucleoside
  modified_base 11: mod_base = OTHER; note = 2-O-methyl modified nucleoside
  modified_base 12: mod_base = OTHER; note = 2-O-methyl modified nucleoside
  modified_base 13: mod_base = OTHER; note = 2-O-methyl modified nucleoside
  modified_base 14: mod_base = OTHER; note = 2-O-methyl modified nucleoside
  modified_base 15: mod_base = OTHER; note = 2-O-methyl modified nucleoside
  modified_base 16: mod_base = OTHER; note = 2-O-methyl modified nucleoside
  modified_base 17: mod_base = OTHER; note = 2-O-methyl modified nucleoside
  modified_base 18: mod_base = OTHER; note = 2-O-methyl modified nucleoside
  modified_base 19: mod_base = OTHER; note = 2-O-methyl modified nucleoside
  modified_base 20: mod_base = OTHER; note = 2-O-methyl modified nucleoside
  modified_base 21: mod_base = OTHER; note = 2-O-methyl modified nucleoside
agatggtgttatagttaaatt

SEQ ID NO: 11592 - RNA, 21 nt, synthetic construct
  source 1..21: mol_type = other RNA
  modified_base 19^20: mod_base = OTHER; note = phosphorothioate linkage
  modified_base 20^21: mod_base = OTHER; note = phosphorothioate linkage
  modified_base 2: mod_base = OTHER; note = 2-fluoro-modified nucleoside
  modified_base 4: mod_base = OTHER; note = 2-fluoro-modified nucleoside
  modified_base 6: mod_base = OTHER; note = 2-fluoro-modified nucleoside
  modified_base 8: mod_base = OTHER; note = 2-fluoro-modified nucleoside
  modified_base 9: mod_base = OTHER; note = 2-fluoro-modified nucleoside
  modified_base 15: mod_base = OTHER; note = 2-fluoro-modified nucleoside
  modified_base 17: mod_base = OTHER; note = 2-fluoro-modified nucleoside
  modified_base 19: mod_base = OTHER; note = 2-fluoro-modified nucleoside
  modified_base 1: mod_base = OTHER; note = Conjugated lipid moiety; note = phosphorothioate linkage; note = 2-O-methyl modified nucleoside
  modified_base 3: mod_base = OTHER; note = 2-O-methyl modified nucleoside
  modified_base 5: mod_base = OTHER; note = 2-O-methyl modified nucleoside
  modified_base 7: mod_base = OTHER; note = 2-O-methyl modified nucleoside
  modified_base 10: mod_base = OTHER; note = 2-O-methyl modified nucleoside
  modified_base 11: mod_base = OTHER; note = 2-O-methyl modified nucleoside
  modified_base 12: mod_base = OTHER; note = 2-O-methyl modified nucleoside
  modified_base 13: mod_base = OTHER; note = 2-O-methyl modified nucleoside
  modified_base 14: mod_base = OTHER; note = 2-O-methyl modified nucleoside
  modified_base 16: mod_base = OTHER; note = 2-O-methyl modified nucleoside
  modified_base 19: mod_base = OTHER; note = 2-O-methyl modified nucleoside
  modified_base 20: mod_base = OTHER; note = 2-O-methyl modified nucleoside
  modified_base 21: mod_base = OTHER; note = 2-O-methyl modified nucleoside
atatgtaccaaggatgttatt

SEQ ID NO: 11593 - RNA, 21 nt, synthetic construct
  source 1..21: mol_type = other RNA
  modified_base 8: mod_base = OTHER; note = 2-fluoro-modified nucleoside
  modified_base 6: mod_base = OTHER; note = 2-fluoro-modified nucleoside
  modified_base 7: mod_base = OTHER; note = 2-fluoro-modified nucleoside
  modified_base 9: mod_base = OTHER; note = 2-fluoro-modified nucleoside
  modified_base 20^21: mod_base = OTHER; note = phosphorothioate linkage
  modified_base 19^20: mod_base = OTHER; note = phosphorothioate linkage
  modified_base 1: mod_base = OTHER; note = stearyl; note = phosphorothioate linkage; note = 2-O-methyl modified nucleoside
  modified_base 2: mod_base = OTHER; note = 2-O-methyl modified nucleoside
  modified_base 3: mod_base = OTHER; note = 2-O-methyl modified nucleoside
  modified_base 4: mod_base = OTHER; note = 2-O-methyl modified nucleoside
  modified_base 5: mod_base = OTHER; note = 2-O-methyl modified nucleoside
  modified_base 10: mod_base = OTHER; note = 2-O-methyl modified nucleoside
  modified_base 11: mod_base = OTHER; note = 2-O-methyl modified nucleoside
  modified_base 12: mod_base = OTHER; note = 2-O-methyl modified nucleoside
  modified_base 13: mod_base = OTHER; note = 2-O-methyl modified nucleoside
  modified_base 14: mod_base = OTHER; note = 2-O-methyl modified nucleoside
  modified_base 15: mod_base = OTHER; note = 2-O-methyl modified nucleoside
  modified_base 16: mod_base = OTHER; note = 2-O-methyl modified nucleoside
  modified_base 17: mod_base = OTHER; note = 2-O-methyl modified nucleoside
  modified_base 18: mod_base = OTHER; note = 2-O-methyl modified nucleoside
  modified_base 19: mod_base = OTHER; note = 2-O-methyl modified nucleoside
  modified_base 20: mod_base = OTHER; note = 2-O-methyl modified nucleoside
  modified_base 21: mod_base = OTHER; note = 2-O-methyl modified nucleoside
aattatcttgagtctacaatt

SEQ ID NO: 11594 - RNA, 21 nt, synthetic construct
  source 1..21: mol_type = other RNA
  modified_base 9: mod_base = OTHER; note = 2-fluoro-modified nucleoside
  modified_base 6: mod_base = OTHER; note = 2-fluoro-modified nucleoside
  modified_base 7: mod_base = OTHER; note = 2-fluoro-modified nucleoside
  modified_base 8: mod_base = OTHER; note = 2-fluoro-modified nucleoside
  modified_base 19^20: mod_base = OTHER; note = phosphorothioate linkage
  modified_base 20^21: mod_base = OTHER; note = phosphorothioate linkage
  modified_base 1: mod_base = OTHER; note = phenyl para C12; note = phosphorothioate linkage; note = 2-O-methyl modified nucleoside
  modified_base 2: mod_base = OTHER; note = 2-O-methyl modified nucleoside
  modified_base 3: mod_base = OTHER; note = 2-O-methyl modified nucleoside
  modified_base 4: mod_base = OTHER; note = 2-O-methyl modified nucleoside
  modified_base 5: mod_base = OTHER; note = 2-O-methyl modified nucleoside
  modified_base 10: mod_base = OTHER; note = 2-O-methyl modified nucleoside
  modified_base 11: mod_base = OTHER; note = 2-O-methyl modified nucleoside
  modified_base 12: mod_base = OTHER; note = 2-O-methyl modified nucleoside
  modified_base 13: mod_base = OTHER; note = 2-O-methyl modified nucleoside
  modified_base 14: mod_base = OTHER; note = 2-O-methyl modified nucleoside
  modified_base 15: mod_base = OTHER; note = 2-O-methyl modified nucleoside
  modified_base 16: mod_base = OTHER; note = 2-O-methyl modified nucleoside
  modified_base 17: mod_base = OTHER; note = 2-O-methyl modified nucleoside
  modified_base 18: mod_base = OTHER; note = 2-O-methyl modified nucleoside
  modified_base 19: mod_base = OTHER; note = 2-O-methyl modified nucleoside
  modified_base 20: mod_base = OTHER; note = 2-O-methyl modified nucleoside
  modified_base 21: mod_base = OTHER; note = 2-O-methyl modified nucleoside
aattatcttgagtctacaatt

SEQ ID NO: 11595 - RNA, 21 nt, synthetic construct
  source 1..21: mol_type = other RNA
  modified_base 5: mod_base = OTHER; note = 2-fluoro-modified nucleoside
  modified_base 6: mod_base = OTHER; note = 2-fluoro-modified nucleoside
  modified_base 7: mod_base = OTHER; note = 2-fluoro-modified nucleoside
  modified_base 8: mod_base = OTHER; note = 2-fluoro-modified nucleoside
  modified_base 9: mod_base = OTHER; note = 2-fluoro-modified nucleoside
  modified_base 19^20: mod_base = OTHER; note = phosphorothioate linkage
  modified_base 20^21: mod_base = OTHER; note = phosphorothioate linkage
  modified_base 1: mod_base = OTHER; note = 2-O-methyl modified nucleoside; note = phosphorothioate linkage; note = stearyl
  modified_base 2: mod_base = OTHER; note = 2-O-methyl modified nucleoside
  modified_base 3: mod_base = OTHER; note = 2-O-methyl modified nucleoside
  modified_base 4: mod_base = OTHER; note = 2-O-methyl modified nucleoside
  modified_base 10: mod_base = OTHER; note = 2-O-methyl modified nucleoside
  modified_base 11: mod_base = OTHER; note = 2-O-methyl modified nucleoside
  modified_base 13: mod_base = OTHER; note = 2-O-methyl modified nucleoside
  modified_base 15: mod_base = OTHER; note = 2-O-methyl modified nucleoside
  modified_base 16: mod_base = OTHER; note = 2-O-methyl modified nucleoside
  modified_base 17: mod_base = OTHER; note = 2-O-methyl modified nucleoside
  modified_base 18: mod_base = OTHER; note = 2-O-methyl modified nucleoside
  modified_base 19: mod_base = OTHER; note = 2-O-methyl modified nucleoside
  modified_base 20: mod_base = OTHER; note = 2-O-methyl modified nucleoside
  modified_base 21: mod_base = OTHER; note = 2-O-methyl modified nucleoside
  modified_base 4: mod_base = OTHER; note = 2-O-methyl modified nucleoside
  modified_base 10: mod_base = OTHER; note = 2-O-methyl modified nucleoside
  modified_base 11: mod_base = OTHER; note = 2-O-methyl modified nucleoside
  modified_base 12: mod_base = OTHER; note = 2-O-methyl modified nucleoside
  modified_base 13: mod_base = OTHER; note = 2-O-methyl modified nucleoside
acacaaaaattgttcggcatt

SEQ ID NO: 11596 - RNA, 21 nt, synthetic construct
  source 1..21: mol_type = other RNA
  modified_base 1^2: mod_base = OTHER; note = phosphorothioate linkage
  modified_base 2^3: mod_base = OTHER; note = phosphorothioate linkage
  modified_base 19^20: mod_base = OTHER; note = phosphorothioate linkage
  modified_base 20^21: mod_base = OTHER; note = phosphorothioate linkage
  modified_base 2: mod_base = OTHER; note = 2-fluoro-modified nucleoside
  modified_base 4: mod_base = OTHER; note = 2-fluoro-modified nucleoside
  modified_base 6: mod_base = OTHER; note = 2-fluoro-modified nucleoside
  modified_base 8: mod_base = OTHER; note = 2-fluoro-modified nucleoside
  modified_base 10: mod_base = OTHER; note = 2-fluoro-modified nucleoside
  modified_base 14: mod_base = OTHER; note = 2-fluoro-modified nucleoside
  modified_base 16: mod_base = OTHER; note = 2-fluoro-modified nucleoside
  modified_base 18: mod_base = OTHER; note = 2-fluoro-modified nucleoside
  modified_base 1: mod_base = OTHER; note = 2-O-methyl modified nucleoside
  modified_base 3: mod_base = OTHER; note = 2-O-methyl modified nucleoside
  modified_base 5: mod_base = OTHER; note = 2-O-methyl modified nucleoside
  modified_base 7: mod_base = OTHER; note = 2-O-methyl modified nucleoside
  modified_base 9: mod_base = OTHER; note = 2-O-methyl modified nucleoside
  modified_base 11: mod_base = OTHER; note = 2-O-methyl modified nucleoside
  modified_base 12: mod_base = OTHER; note = 2-O-methyl modified nucleoside
  modified_base 13: mod_base = OTHER; note = 2-O-methyl modified nucleoside
  modified_base 15: mod_base = OTHER; note = 2-O-methyl modified nucleoside
  modified_base 17: mod_base = OTHER; note = 2-O-methyl modified nucleoside
  modified_base 19: mod_base = OTHER; note = 2-O-methyl modified nucleoside
  modified_base 20: mod_base = OTHER; note = 2-O-methyl modified nucleoside
  modified_base 21: mod_base = OTHER; note = 2-O-methyl modified nucleoside
tcgatgaaaatgcagagcctt

SEQ ID NO: 11597 - RNA, 21 nt, synthetic construct
  source 1..21: mol_type = other RNA
  modified_base 1: mod_base = OTHER; note = 2-O-methyl modified nucleoside
  modified_base 3: mod_base = OTHER; note = 2-O-methyl modified nucleoside
  modified_base 5: mod_base = OTHER; note = 2-O-methyl modified nucleoside
  modified_base 7: mod_base = OTHER; note = 2-O-methyl modified nucleoside
  modified_base 9: mod_base = OTHER; note = 2-O-methyl modified nucleoside
  modified_base 11: mod_base = OTHER; note = 2-O-methyl modified nucleoside
  modified_base 12: mod_base = OTHER; note = 2-O-methyl modified nucleoside
  modified_base 13: mod_base = OTHER; note = 2-O-methyl modified nucleoside
  modified_base 15: mod_base = OTHER; note = 2-O-methyl modified nucleoside
  modified_base 17: mod_base = OTHER; note = 2-O-methyl modified nucleoside
  modified_base 19: mod_base = OTHER; note = 2-O-methyl modified nucleoside
  modified_base 20: mod_base = OTHER; note = 2-O-methyl modified nucleoside
  modified_base 21: mod_base = OTHER; note = 2-O-methyl modified nucleoside
  modified_base 1^2: mod_base = OTHER; note = phosphorothioate linkage
  modified_base 2^3: mod_base = OTHER; note = phosphorothioate linkage
  modified_base 20^21: mod_base = OTHER; note = phosphorothioate linkage
  modified_base 19^20: mod_base = OTHER; note = phosphorothioate linkage
  modified_base 2: mod_base = OTHER; note = 2-fluoro-modified nucleoside
  modified_base 4: mod_base = OTHER; note = 2-fluoro-modified nucleoside
  modified_base 6: mod_base = OTHER; note = 2-fluoro-modified nucleoside
  modified_base 8: mod_base = OTHER; note = 2-fluoro-modified nucleoside
  modified_base 10: mod_base = OTHER; note = 2-fluoro-modified nucleoside
  modified_base 14: mod_base = OTHER; note = 2-fluoro-modified nucleoside
  modified_base 16: mod_base = OTHER; note = 2-fluoro-modified nucleoside
  modified_base 18: mod_base = OTHER; note = 2-fluoro-modified nucleoside
tttatacactccagagatgtt

SEQ ID NO: 11598 - RNA, 21 nt, synthetic construct
  source 1..21: mol_type = other RNA
  modified_base 2: mod_base = OTHER; note = 2-fluoro-modified nucleoside
  modified_base 4: mod_base = OTHER; note = 2-fluoro-modified nucleoside
  modified_base 6: mod_base = OTHER; note = 2-fluoro-modified nucleoside
  modified_base 8: mod_base = OTHER; note = 2-fluoro-modified nucleoside
  modified_base 10: mod_base = OTHER; note = 2-fluoro-modified nucleoside
  modified_base 14: mod_base = OTHER; note = 2-fluoro-modified nucleoside
  modified_base 16: mod_base = OTHER; note = 2-fluoro-modified nucleoside
  modified_base 18: mod_base = OTHER; note = 2-fluoro-modified nucleoside
  modified_base 1: mod_base = OTHER; note = 2-O-methyl modified nucleoside
  modified_base 3: mod_base = OTHER; note = 2-O-methyl modified nucleoside
  modified_base 5: mod_base = OTHER; note = 2-O-methyl modified nucleoside
  modified_base 7: mod_base = OTHER; note = 2-O-methyl modified nucleoside
  modified_base 9: mod_base = OTHER; note = 2-O-methyl modified nucleoside
  modified_base 11: mod_base = OTHER; note = 2-O-methyl modified nucleoside
  modified_base 12: mod_base = OTHER; note = 2-O-methyl modified nucleoside
  modified_base 13: mod_base = OTHER; note = 2-O-methyl modified nucleoside
  modified_base 15: mod_base = OTHER; note = 2-O-methyl modified nucleoside
  modified_base 17: mod_base = OTHER; note = 2-O-methyl modified nucleoside
  modified_base 19: mod_base = OTHER; note = 2-O-methyl modified nucleoside
  modified_base 20: mod_base = OTHER; note = 2-O-methyl modified nucleoside
  modified_base 21: mod_base = OTHER; note = 2-O-methyl modified nucleoside
  modified_base 1^2: mod_base = OTHER; note = phosphorothioate linkage
  modified_base 2^3: mod_base = OTHER; note = phosphorothioate linkage
  modified_base 19^20: mod_base = OTHER; note = phosphorothioate linkage
  modified_base 20^21: mod_base = OTHER; note = phosphorothioate linkage
tcttatacactccagagattt

SEQ ID NO: 11599 - RNA, 21 nt, synthetic construct
  source 1..21: mol_type = other RNA
  modified_base 1^2: mod_base = OTHER; note = phosphorothioate linkage
  modified_base 2^3: mod_base = OTHER; note = phosphorothioate linkage
  modified_base 19^20: mod_base = OTHER; note = phosphorothioate linkage
  modified_base 20^21: mod_base = OTHER; note = phosphorothioate linkage
  modified_base 2: mod_base = OTHER; note = 2-fluoro-modified nucleoside
  modified_base 4: mod_base = OTHER; note = 2-fluoro-modified nucleoside
  modified_base 6: mod_base = OTHER; note = 2-fluoro-modified nucleoside
  modified_base 8: mod_base = OTHER; note = 2-fluoro-modified nucleoside
  modified_base 10: mod_base = OTHER; note = 2-fluoro-modified nucleoside
  modified_base 14: mod_base = OTHER; note = 2-fluoro-modified nucleoside
  modified_base 16: mod_base = OTHER; note = 2-fluoro-modified nucleoside
  modified_base 18: mod_base = OTHER; note = 2-fluoro-modified nucleoside
  modified_base 1: mod_base = OTHER; note = 2-O-methyl modified nucleoside
  modified_base 3: mod_base = OTHER; note = 2-O-methyl modified nucleoside
  modified_base 5: mod_base = OTHER; note = 2-O-methyl modified nucleoside
  modified_base 7: mod_base = OTHER; note = 2-O-methyl modified nucleoside
  modified_base 9: mod_base = OTHER; note = 2-O-methyl modified nucleoside
  modified_base 11: mod_base = OTHER; note = 2-O-methyl modified nucleoside
  modified_base 12: mod_base = OTHER; note = 2-O-methyl modified nucleoside
  modified_base 13: mod_base = OTHER; note = 2-O-methyl modified nucleoside
  modified_base 15: mod_base = OTHER; note = 2-O-methyl modified nucleoside
  modified_base 17: mod_base = OTHER; note = 2-O-methyl modified nucleoside
  modified_base 19: mod_base = OTHER; note = 2-O-methyl modified nucleoside
  modified_base 20: mod_base = OTHER; note = 2-O-methyl modified nucleoside
  modified_base 21: mod_base = OTHER; note = 2-O-methyl modified nucleoside
ttttcgtctctggatgatgtt

SEQ ID NO: 11600 - RNA, 21 nt, synthetic construct
  source 1..21: mol_type = other RNA
  modified_base 1: mod_base = OTHER; note = 2-O-methyl modified nucleoside
  modified_base 3: mod_base = OTHER; note = 2-O-methyl modified nucleoside
  modified_base 5: mod_base = OTHER; note = 2-O-methyl modified nucleoside
  modified_base 7: mod_base = OTHER; note = 2-O-methyl modified nucleoside
  modified_base 9: mod_base = OTHER; note = 2-O-methyl modified nucleoside
  modified_base 11: mod_base = OTHER; note = 2-O-methyl modified nucleoside
  modified_base 12: mod_base = OTHER; note = 2-O-methyl modified nucleoside
  modified_base 13: mod_base = OTHER; note = 2-O-methyl modified nucleoside
  modified_base 15: mod_base = OTHER; note = 2-O-methyl modified nucleoside
  modified_base 17: mod_base = OTHER; note = 2-O-methyl modified nucleoside
  modified_base 19: mod_base = OTHER; note = 2-O-methyl modified nucleoside
  modified_base 20: mod_base = OTHER; note = 2-O-methyl modified nucleoside
  modified_base 21: mod_base = OTHER; note = 2-O-methyl modified nucleoside
  modified_base 2: mod_base = OTHER; note = 2-fluoro-modified nucleoside
  modified_base 4: mod_base = OTHER; note = 2-fluoro-modified nucleoside
  modified_base 6: mod_base = OTHER; note = 2-fluoro-modified nucleoside
  modified_base 8: mod_base = OTHER; note = 2-fluoro-modified nucleoside
  modified_base 10: mod_base = OTHER; note = 2-fluoro-modified nucleoside
  modified_base 14: mod_base = OTHER; note = 2-fluoro-modified nucleoside
  modified_base 16: mod_base = OTHER; note = 2-fluoro-modified nucleoside
  modified_base 18: mod_base = OTHER; note = 2-fluoro-modified nucleoside
  modified_base 1^2: mod_base = OTHER; note = phosphorothioate linkage
  modified_base 2^3: mod_base = OTHER; note = phosphorothioate linkage
  modified_base 19^20: mod_base = OTHER; note = phosphorothioate linkage
  modified_base 20^21: mod_base = OTHER; note = phosphorothioate linkage
tttttcgtctctggatgattt

SEQ ID NO: 11601 - RNA, 21 nt, synthetic construct
  source 1..21: mol_type = other RNA
  modified_base 1^2: mod_base = OTHER; note = phosphorothioate linkage
  modified_base 2^3: mod_base = OTHER; note = phosphorothioate linkage
  modified_base 19^20: mod_base = OTHER; note = phosphorothioate linkage
  modified_base 20^21: mod_base = OTHER; note = phosphorothioate linkage
  modified_base 1: mod_base = OTHER; note = 2-O-methyl modified nucleoside
  modified_base 3: mod_base = OTHER; note = 2-O-methyl modified nucleoside
  modified_base 5: mod_base = OTHER; note = 2-O-methyl modified nucleoside
  modified_base 7: mod_base = OTHER; note = 2-O-methyl modified nucleoside
  modified_base 9: mod_base = OTHER; note = 2-O-methyl modified nucleoside
  modified_base 11: mod_base = OTHER; note = 2-O-methyl modified nucleoside
  modified_base 12: mod_base = OTHER; note = 2-O-methyl modified nucleoside
  modified_base 13: mod_base = OTHER; note = 2-O-methyl modified nucleoside
  modified_base 15: mod_base = OTHER; note = 2-O-methyl modified nucleoside
  modified_base 17: mod_base = OTHER; note = 2-O-methyl modified nucleoside
  modified_base 19: mod_base = OTHER; note = 2-O-methyl modified nucleoside
  modified_base 20: mod_base = OTHER; note = 2-O-methyl modified nucleoside
  modified_base 21: mod_base = OTHER; note = 2-O-methyl modified nucleoside
  modified_base 2: mod_base = OTHER; note = 2-fluoro-modified nucleoside
  modified_base 4: mod_base = OTHER; note = 2-fluoro-modified nucleoside
  modified_base 6: mod_base = OTHER; note = 2-fluoro-modified nucleoside
  modified_base 8: mod_base = OTHER; note = 2-fluoro-modified nucleoside
  modified_base 10: mod_base = OTHER; note = 2-fluoro-modified nucleoside
  modified_base 14: mod_base = OTHER; note = 2-fluoro-modified nucleoside
  modified_base 16: mod_base = OTHER; note = 2-fluoro-modified nucleoside
  modified_base 18: mod_base = OTHER; note = 2-fluoro-modified nucleoside
ttttttcgtctctggatgatt

SEQ ID NO: 11602 - RNA, 21 nt, synthetic construct
  source 1..21: mol_type = other RNA
  modified_base 2: mod_base = OTHER; note = 2-fluoro-modified nucleoside
  modified_base 4: mod_base = OTHER; note = 2-fluoro-modified nucleoside
  modified_base 6: mod_base = OTHER; note = 2-fluoro-modified nucleoside
  modified_base 8: mod_base = OTHER; note = 2-fluoro-modified nucleoside
  modified_base 10: mod_base = OTHER; note = 2-fluoro-modified nucleoside
  modified_base 14: mod_base = OTHER; note = 2-fluoro-modified nucleoside
  modified_base 16: mod_base = OTHER; note = 2-fluoro-modified nucleoside
  modified_base 18: mod_base = OTHER; note = 2-fluoro-modified nucleoside
  modified_base 1: mod_base = OTHER; note = 2-O-methyl modified nucleoside
  modified_base 3: mod_base = OTHER; note = 2-O-methyl modified nucleoside
  modified_base 5: mod_base = OTHER; note = 2-O-methyl modified nucleoside
  modified_base 7: mod_base = OTHER; note = 2-O-methyl modified nucleoside
  modified_base 9: mod_base = OTHER; note = 2-O-methyl modified nucleoside
  modified_base 11: mod_base = OTHER; note = 2-O-methyl modified nucleoside
  modified_base 12: mod_base = OTHER; note = 2-O-methyl modified nucleoside
  modified_base 13: mod_base = OTHER; note = 2-O-methyl modified nucleoside
  modified_base 15: mod_base = OTHER; note = 2-O-methyl modified nucleoside
  modified_base 17: mod_base = OTHER; note = 2-O-methyl modified nucleoside
  modified_base 19: mod_base = OTHER; note = 2-O-methyl modified nucleoside
  modified_base 20: mod_base = OTHER; note = 2-O-methyl modified nucleoside
  modified_base 21: mod_base = OTHER; note = 2-O-methyl modified nucleoside
  modified_base 1^2: mod_base = OTHER; note = phosphorothioate linkage
  modified_base 2^3: mod_base = OTHER; note = phosphorothioate linkage
  modified_base 19^20: mod_base = OTHER; note = phosphorothioate linkage
  modified_base 20^21: mod_base = OTHER; note = phosphorothioate linkage
tgtagtacactccattgagtt

SEQ ID NO: 11603 - RNA, 21 nt, synthetic construct
  source 1..21: mol_type = other RNA
  modified_base 2: mod_base = OTHER; note = 2-fluoro-modified nucleoside
  modified_base 4: mod_base = OTHER; note = 2-fluoro-modified nucleoside
  modified_base 6: mod_base = OTHER; note = 2-fluoro-modified nucleoside
  modified_base 8: mod_base = OTHER; note = 2-fluoro-modified nucleoside
  modified_base 10: mod_base = OTHER; note = 2-fluoro-modified nucleoside
  modified_base 14: mod_base = OTHER; note = 2-fluoro-modified nucleoside
  modified_base 16: mod_base = OTHER; note = 2-fluoro-modified nucleoside
  modified_base 18: mod_base = OTHER; note = 2-fluoro-modified nucleoside
  modified_base 1: mod_base = OTHER; note = 2-O-methyl modified nucleoside
  modified_base 3: mod_base = OTHER; note = 2-O-methyl modified nucleoside
  modified_base 5: mod_base = OTHER; note = 2-O-methyl modified nucleoside
  modified_base 7: mod_base = OTHER; note = 2-O-methyl modified nucleoside
  modified_base 9: mod_base = OTHER; note = 2-O-methyl modified nucleoside
  modified_base 11: mod_base = OTHER; note = 2-O-methyl modified nucleoside
  modified_base 12: mod_base = OTHER; note = 2-O-methyl modified nucleoside
  modified_base 13: mod_base = OTHER; note = 2-O-methyl modified nucleoside
  modified_base 15: mod_base = OTHER; note = 2-O-methyl modified nucleoside
  modified_base 17: mod_base = OTHER; note = 2-O-methyl modified nucleoside
  modified_base 19: mod_base = OTHER; note = 2-O-methyl modified nucleoside
  modified_base 20: mod_base = OTHER; note = 2-O-methyl modified nucleoside
  modified_base 21: mod_base = OTHER; note = 2-O-methyl modified nucleoside
  modified_base 1^2: mod_base = OTHER; note = phosphorothioate linkage
  modified_base 2^3: mod_base = OTHER; note = phosphorothioate linkage
  modified_base 19^20: mod_base = OTHER; note = phosphorothioate linkage
  modified_base 20^21: mod_base = OTHER; note = phosphorothioate linkage
taacatccttggtacatattt

SEQ ID NO: 11604 - RNA, 21 nt, synthetic construct
  source 1..21: mol_type = other RNA
  modified_base 1^2: mod_base = OTHER; note = phosphorothioate linkage
  modified_base 2^3: mod_base = OTHER; note = phosphorothioate linkage
  modified_base 19^20: mod_base = OTHER; note = phosphorothioate linkage
  modified_base 20^21: mod_base = OTHER; note = phosphorothioate linkage
  modified_base 1: mod_base = OTHER; note = 2-O-methyl modified nucleoside
  modified_base 3: mod_base = OTHER; note = 2-O-methyl modified nucleoside
  modified_base 5: mod_base = OTHER; note = 2-O-methyl modified nucleoside
  modified_base 7: mod_base = OTHER; note = 2-O-methyl modified nucleoside
  modified_base 9: mod_base = OTHER; note = 2-O-methyl modified nucleoside
  modified_base 11: mod_base = OTHER; note = 2-O-methyl modified nucleoside
  modified_base 12: mod_base = OTHER; note = 2-O-methyl modified nucleoside
  modified_base 13: mod_base = OTHER; note = 2-O-methyl modified nucleoside
  modified_base 15: mod_base = OTHER; note = 2-O-methyl modified nucleoside
  modified_base 17: mod_base = OTHER; note = 2-O-methyl modified nucleoside
  modified_base 19: mod_base = OTHER; note = 2-O-methyl modified nucleoside
  modified_base 20: mod_base = OTHER; note = 2-O-methyl modified nucleoside
  modified_base 21: mod_base = OTHER; note = 2-O-methyl modified nucleoside
  modified_base 2: mod_base = OTHER; note = 2-fluoro-modified nucleoside
  modified_base 4: mod_base = OTHER; note = 2-fluoro-modified nucleoside
  modified_base 6: mod_base = OTHER; note = 2-fluoro-modified nucleoside
  modified_base 8: mod_base = OTHER; note = 2-fluoro-modified nucleoside
  modified_base 10: mod_base = OTHER; note = 2-fluoro-modified nucleoside
  modified_base 14: mod_base = OTHER; note = 2-fluoro-modified nucleoside
  modified_base 16: mod_base = OTHER; note = 2-fluoro-modified nucleoside
  modified_base 18: mod_base = OTHER; note = 2-fluoro-modified nucleoside
ttgtagactcaagataatttt

SEQ ID NO: 11605 - RNA, 21 nt, synthetic construct
  source 1..21: mol_type = other RNA
  modified_base 2: mod_base = OTHER; note = 2-fluoro-modified nucleoside
  modified_base 4: mod_base = OTHER; note = 2-fluoro-modified nucleoside
  modified_base 6: mod_base = OTHER; note = 2-fluoro-modified nucleoside
  modified_base 8: mod_base = OTHER; note = 2-fluoro-modified nucleoside
  modified_base 10: mod_base = OTHER; note = 2-fluoro-modified nucleoside
  modified_base 14: mod_base = OTHER; note = 2-fluoro-modified nucleoside
  modified_base 16: mod_base = OTHER; note = 2-fluoro-modified nucleoside
  modified_base 18: mod_base = OTHER; note = 2-fluoro-modified nucleoside
  modified_base 1: mod_base = OTHER; note = 2-O-methyl modified nucleoside
  modified_base 3: mod_base = OTHER; note = 2-O-methyl modified nucleoside
  modified_base 5: mod_base = OTHER; note = 2-O-methyl modified nucleoside
  modified_base 7: mod_base = OTHER; note = 2-O-methyl modified nucleoside
  modified_base 9: mod_base = OTHER; note = 2-O-methyl modified nucleoside
  modified_base 11: mod_base = OTHER; note = 2-O-methyl modified nucleoside
  modified_base 12: mod_base = OTHER; note = 2-O-methyl modified nucleoside
  modified_base 13: mod_base = OTHER; note = 2-O-methyl modified nucleoside
  modified_base 15: mod_base = OTHER; note = 2-O-methyl modified nucleoside
  modified_base 17: mod_base = OTHER; note = 2-O-methyl modified nucleoside
  modified_base 19: mod_base = OTHER; note = 2-O-methyl modified nucleoside
  modified_base 20: mod_base = OTHER; note = 2-O-methyl modified nucleoside
  modified_base 21: mod_base = OTHER; note = 2-O-methyl modified nucleoside
  modified_base 1^2: mod_base = OTHER; note = phosphorothioate linkage
  modified_base 2^3: mod_base = OTHER; note = phosphorothioate linkage
  modified_base 19^20: mod_base = OTHER; note = phosphorothioate linkage
  modified_base 20^21: mod_base = OTHER; note = phosphorothioate linkage
tgccgaacaatttttgtgttt

SEQ ID NO: 11606 - RNA, 21 nt, synthetic construct
  source 1..21: mol_type = other RNA
  modified_base 1^2: mod_base = OTHER; note = phosphorothioate linkage
  modified_base 2^3: mod_base = OTHER; note = phosphorothioate linkage
  modified_base 19^20: mod_base = OTHER; note = phosphorothioate linkage
  modified_base 20^21: mod_base = OTHER; note = phosphorothioate linkage
  modified_base 2: mod_base = OTHER; note = 2-fluoro-modified nucleoside
  modified_base 4: mod_base = OTHER; note = 2-fluoro-modified nucleoside
  modified_base 6: mod_base = OTHER; note = 2-fluoro-modified nucleoside
  modified_base 8: mod_base = OTHER; note = 2-fluoro-modified nucleoside
  modified_base 10: mod_base = OTHER; note = 2-fluoro-modified nucleoside
  modified_base 14: mod_base = OTHER; note = 2-fluoro-modified nucleoside
  modified_base 16: mod_base = OTHER; note = 2-fluoro-modified nucleoside
  modified_base 18: mod_base = OTHER; note = 2-fluoro-modified nucleoside
  modified_base 1: mod_base = OTHER; note = 2-O-methyl modified nucleoside
  modified_base 3: mod_base = OTHER; note = 2-O-methyl modified nucleoside
  modified_base 5: mod_base = OTHER; note = 2-O-methyl modified nucleoside
  modified_base 7: mod_base = OTHER; note = 2-O-methyl modified nucleoside
  modified_base 9: mod_base = OTHER; note = 2-O-methyl modified nucleoside
  modified_base 11: mod_base = OTHER; note = 2-O-methyl modified nucleoside
  modified_base 12: mod_base = OTHER; note = 2-O-methyl modified nucleoside
  modified_base 13: mod_base = OTHER; note = 2-O-methyl modified nucleoside
  modified_base 15: mod_base = OTHER; note = 2-O-methyl modified nucleoside
  modified_base 17: mod_base = OTHER; note = 2-O-methyl modified nucleoside
  modified_base 19: mod_base = OTHER; note = 2-O-methyl modified nucleoside
  modified_base 20: mod_base = OTHER; note = 2-O-methyl modified nucleoside
  modified_base 21: mod_base = OTHER; note = 2-O-methyl modified nucleoside
tagccgaacaatttttgtgtt

SEQ ID NO: 11607 - RNA, 21 nt, synthetic construct
  source 1..21: mol_type = other RNA
  modified_base 1: mod_base = OTHER; note = 2-O-methyl modified nucleoside
  modified_base 3: mod_base = OTHER; note = 2-O-methyl modified nucleoside
  modified_base 5: mod_base = OTHER; note = 2-O-methyl modified nucleoside
  modified_base 7: mod_base = OTHER; note = 2-O-methyl modified nucleoside
  modified_base 9: mod_base = OTHER; note = 2-O-methyl modified nucleoside
  modified_base 11: mod_base = OTHER; note = 2-O-methyl modified nucleoside
  modified_base 12: mod_base = OTHER; note = 2-O-methyl modified nucleoside
  modified_base 13: mod_base = OTHER; note = 2-O-methyl modified nucleoside
  modified_base 15: mod_base = OTHER; note = 2-O-methyl modified nucleoside
  modified_base 17: mod_base = OTHER; note = 2-O-methyl modified nucleoside
  modified_base 19: mod_base = OTHER; note = 2-O-methyl modified nucleoside
  modified_base 20: mod_base = OTHER; note = 2-O-methyl modified nucleoside
  modified_base 21: mod_base = OTHER; note = 2-O-methyl modified nucleoside
  modified_base 2: mod_base = OTHER; note = 2-fluoro-modified nucleoside
  modified_base 4: mod_base = OTHER; note = 2-fluoro-modified nucleoside
  modified_base 6: mod_base = OTHER; note = 2-fluoro-modified nucleoside
  modified_base 8: mod_base = OTHER; note = 2-fluoro-modified nucleoside
  modified_base 10: mod_base = OTHER; note = 2-fluoro-modified nucleoside
  modified_base 14: mod_base = OTHER; note = 2-fluoro-modified nucleoside
  modified_base 16: mod_base = OTHER; note = 2-fluoro-modified nucleoside
  modified_base 18: mod_base = OTHER; note = 2-fluoro-modified nucleoside
  modified_base 1^2: mod_base = OTHER; note = phosphorothioate linkage
  modified_base 2^3: mod_base = OTHER; note = phosphorothioate linkage
  modified_base 19^20: mod_base = OTHER; note = phosphorothioate linkage
  modified_base 20^21: mod_base = OTHER; note = phosphorothioate linkage
tataacaccatctaccttctt

SEQ ID NO: 11608 - RNA, 21 nt, synthetic construct
  source 1..21: mol_type = other RNA
  modified_base 1^2: mod_base = OTHER; note = phosphorothioate linkage
  modified_base 2^3: mod_base = OTHER; note = phosphorothioate linkage
  modified_base 19^20: mod_base = OTHER; note = phosphorothioate linkage
  modified_base 20^21: mod_base = OTHER; note = phosphorothioate linkage
  modified_base 2: mod_base = OTHER; note = 2-fluoro-modified nucleoside
  modified_base 4: mod_base = OTHER; note = 2-fluoro-modified nucleoside
  modified_base 6: mod_base = OTHER; note = 2-fluoro-modified nucleoside
  modified_base 8: mod_base = OTHER; note = 2-fluoro-modified nucleoside
  modified_base 10: mod_base = OTHER; note = 2-fluoro-modified nucleoside
  modified_base 14: mod_base = OTHER; note = 2-fluoro-modified nucleoside
  modified_base 16: mod_base = OTHER; note = 2-fluoro-modified nucleoside
  modified_base 18: mod_base = OTHER; note = 2-fluoro-modified nucleoside
  modified_base 1: mod_base = OTHER; note = 2-O-methyl modified nucleoside
  modified_base 3: mod_base = OTHER; note = 2-O-methyl modified nucleoside
  modified_base 5: mod_base = OTHER; note = 2-O-methyl modified nucleoside
  modified_base 7: mod_base = OTHER; note = 2-O-methyl modified nucleoside
  modified_base 9: mod_base = OTHER; note = 2-O-methyl modified nucleoside
  modified_base 11: mod_base = OTHER; note = 2-O-methyl modified nucleoside
  modified_base 12: mod_base = OTHER; note = 2-O-methyl modified nucleoside
  modified_base 13: mod_base = OTHER; note = 2-O-methyl modified nucleoside
  modified_base 15: mod_base = OTHER; note = 2-O-methyl modified nucleoside
  modified_base 17: mod_base = OTHER; note = 2-O-methyl modified nucleoside
  modified_base 19: mod_base = OTHER; note = 2-O-methyl modified nucleoside
  modified_base 20: mod_base = OTHER; note = 2-O-methyl modified nucleoside
  modified_base 21: mod_base = OTHER; note = 2-O-methyl modified nucleoside
taactataacaccatctactt

SEQ ID NO: 11609 - RNA, 21 nt, synthetic construct
  source 1..21: mol_type = other RNA
  modified_base 1: mod_base = OTHER; note = 2-O-methyl modified nucleoside
  modified_base 2: mod_base = OTHER; note = 2-O-methyl modified nucleoside
  modified_base 3: mod_base = OTHER; note = 2-O-methyl modified nucleoside
  modified_base 5: mod_base = OTHER; note = 2-O-methyl modified nucleoside
  modified_base 7: mod_base = OTHER; note = 2-O-methyl modified nucleoside
  modified_base 9: mod_base = OTHER; note = 2-O-methyl modified nucleoside
  modified_base 11: mod_base = OTHER; note = 2-O-methyl modified nucleoside
  modified_base 13: mod_base = OTHER; note = 2-O-methyl modified nucleoside
  modified_base 15: mod_base = OTHER; note = 2-O-methyl modified nucleoside
  modified_base 17: mod_base = OTHER; note = 2-O-methyl modified nucleoside
  modified_base 19: mod_base = OTHER; note = 2-O-methyl modified nucleoside
  modified_base 20: mod_base = OTHER; note = 2-O-methyl modified nucleoside
  modified_base 21: mod_base = OTHER; note = 2-O-methyl modified nucleoside
  modified_base 4: mod_base = OTHER; note = 2-fluoro-modified nucleoside
  modified_base 6: mod_base = OTHER; note = 2-fluoro-modified nucleoside
  modified_base 8: mod_base = OTHER; note = 2-fluoro-modified nucleoside
  modified_base 10: mod_base = OTHER; note = 2-fluoro-modified nucleoside
  modified_base 12: mod_base = OTHER; note = 2-fluoro-modified nucleoside
  modified_base 14: mod_base = OTHER; note = 2-fluoro-modified nucleoside
  modified_base 16: mod_base = OTHER; note = 2-fluoro-modified nucleoside
  modified_base 18: mod_base = OTHER; note = 2-fluoro-modified nucleoside
  modified_base 1^2: mod_base = OTHER; note = phosphorothioate linkage
  modified_base 2^3: mod_base = OTHER; note = phosphorothioate linkage
  modified_base 19^20: mod_base = OTHER; note = phosphorothioate linkage
  modified_base 20^21: mod_base = OTHER; note = phosphorothioate linkage
tcgatgaaaatgcagagcctt

SEQ ID NO: 11610 - RNA, 21 nt, synthetic construct
  source 1..21: mol_type = other RNA
  modified_base 1^2: mod_base = OTHER; note = phosphorothioate linkage
  modified_base 2^3: mod_base = OTHER; note = phosphorothioate linkage
  modified_base 19^20: mod_base = OTHER; note = phosphorothioate linkage
  modified_base 20^21: mod_base = OTHER; note = phosphorothioate linkage
  modified_base 1: mod_base = OTHER; note = 2-O-methyl modified nucleoside
  modified_base 2: mod_base = OTHER; note = 2-O-methyl modified nucleoside
  modified_base 3: mod_base = OTHER; note = 2-O-methyl modified nucleoside
  modified_base 5: mod_base = OTHER; note = 2-O-methyl modified nucleoside
  modified_base 7: mod_base = OTHER; note = 2-O-methyl modified nucleoside
  modified_base 9: mod_base = OTHER; note = 2-O-methyl modified nucleoside
  modified_base 11: mod_base = OTHER; note = 2-O-methyl modified nucleoside
  modified_base 13: mod_base = OTHER; note = 2-O-methyl modified nucleoside
  modified_base 15: mod_base = OTHER; note = 2-O-methyl modified nucleoside
  modified_base 17: mod_base = OTHER; note = 2-O-methyl modified nucleoside
  modified_base 19: mod_base = OTHER; note = 2-O-methyl modified nucleoside
  modified_base 20: mod_base = OTHER; note = 2-O-methyl modified nucleoside
  modified_base 21: mod_base = OTHER; note = 2-O-methyl modified nucleoside
  modified_base 4: mod_base = OTHER; note = 2-fluoro-modified nucleoside
  modified_base 6: mod_base = OTHER; note = 2-fluoro-modified nucleoside
  modified_base 8: mod_base = OTHER; note = 2-fluoro-modified nucleoside
  modified_base 10: mod_base = OTHER; note = 2-fluoro-modified nucleoside
  modified_base 12: mod_base = OTHER; note = 2-fluoro-modified nucleoside
  modified_base 14: mod_base = OTHER; note = 2-fluoro-modified nucleoside
  modified_base 16: mod_base = OTHER; note = 2-fluoro-modified nucleoside
  modified_base 18: mod_base = OTHER; note = 2-fluoro-modified nucleoside
tacaaaggccacgatgaaatt

SEQ ID NO: 11611 - RNA, 21 nt, synthetic construct
  source 1..21: mol_type = other RNA
  modified_base 4: mod_base = OTHER; note = 2-fluoro-modified nucleoside
  modified_base 6: mod_base = OTHER; note = 2-fluoro-modified nucleoside
  modified_base 10: mod_base = OTHER; note = 2-fluoro-modified nucleoside
  modified_base 12: mod_base = OTHER; note = 2-fluoro-modified nucleoside
  modified_base 14: mod_base = OTHER; note = 2-fluoro-modified nucleoside
  modified_base 16: mod_base = OTHER; note = 2-fluoro-modified nucleoside
  modified_base 18: mod_base = OTHER; note = 2-fluoro-modified nucleoside
  modified_base 1: mod_base = OTHER; note = 2-O-methyl modified nucleoside
  modified_base 2: mod_base = OTHER; note = 2-O-methyl modified nucleoside
  modified_base 3: mod_base = OTHER; note = 2-O-methyl modified nucleoside
  modified_base 5: mod_base = OTHER; note = 2-O-methyl modified nucleoside
  modified_base 7: mod_base = OTHER; note = 2-O-methyl modified nucleoside
  modified_base 9: mod_base = OTHER; note = 2-O-methyl modified nucleoside
  modified_base 11: mod_base = OTHER; note = 2-O-methyl modified nucleoside
  modified_base 13: mod_base = OTHER; note = 2-O-methyl modified nucleoside
  modified_base 15: mod_base = OTHER; note = 2-O-methyl modified nucleoside
  modified_base 17: mod_base = OTHER; note = 2-O-methyl modified nucleoside
  modified_base 19: mod_base = OTHER; note = 2-O-methyl modified nucleoside
  modified_base 20: mod_base = OTHER; note = 2-O-methyl modified nucleoside
  modified_base 21: mod_base = OTHER; note = 2-O-methyl modified nucleoside
  modified_base 1^2: mod_base = OTHER; note = phosphorothioate linkage
  modified_base 2^3: mod_base = OTHER; note = phosphorothioate linkage
  modified_base 19^20: mod_base = OTHER; note = phosphorothioate linkage
  modified_base 20^21: mod_base = OTHER; note = phosphorothioate linkage
  modified_base 8: mod_base = OTHER; note = 2-fluoro-modified nucleoside
tttatacactccagagatgtt

SEQ ID NO: 11612 - RNA, 21 nt, synthetic construct
  source 1..21: mol_type = other RNA
  modified_base 1^2: mod_base = OTHER; note = phosphorothioate linkage
  modified_base 2^3: mod_base = OTHER; note = phosphorothioate linkage
  modified_base 19^20: mod_base = OTHER; note = phosphorothioate linkage
  modified_base 20^21: mod_base = OTHER; note = phosphorothioate linkage
  modified_base 1: mod_base = OTHER; note = 2-O-methyl modified nucleoside
  modified_base 2: mod_base = OTHER; note = 2-O-methyl modified nucleoside
  modified_base 3: mod_base = OTHER; note = 2-O-methyl modified nucleoside
  modified_base 5: mod_base = OTHER; note = 2-O-methyl modified nucleoside
  modified_base 7: mod_base = OTHER; note = 2-O-methyl modified nucleoside
  modified_base 9: mod_base = OTHER; note = 2-O-methyl modified nucleoside
  modified_base 11: mod_base = OTHER; note = 2-O-methyl modified nucleoside
  modified_base 13: mod_base = OTHER; note = 2-O-methyl modified nucleoside
  modified_base 15: mod_base = OTHER; note = 2-O-methyl modified nucleoside
  modified_base 17: mod_base = OTHER; note = 2-O-methyl modified nucleoside
  modified_base 19: mod_base = OTHER; note = 2-O-methyl modified nucleoside
  modified_base 20: mod_base = OTHER; note = 2-O-methyl modified nucleoside
  modified_base 21: mod_base = OTHER; note = 2-O-methyl modified nucleoside
  modified_base 4: mod_base = OTHER; note = 2-fluoro-modified nucleoside
  modified_base 6: mod_base = OTHER; note = 2-fluoro-modified nucleoside
  modified_base 8: mod_base = OTHER; note = 2-fluoro-modified nucleoside
  modified_base 10: mod_base = OTHER; note = 2-fluoro-modified nucleoside
  modified_base 12: mod_base = OTHER; note = 2-fluoro-modified nucleoside
  modified_base 14: mod_base = OTHER; note = 2-fluoro-modified nucleoside
  modified_base 16: mod_base = OTHER; note = 2-fluoro-modified nucleoside
  modified_base 18: mod_base = OTHER; note = 2-fluoro-modified nucleoside
tcttatacactccagagattt

SEQ ID NO: 11613 - RNA, 21 nt, synthetic construct
  source 1..21: mol_type = other RNA
  modified_base 4: mod_base = OTHER; note = 2-fluoro-modified nucleoside
  modified_base 6: mod_base = OTHER; note = 2-fluoro-modified nucleoside
  modified_base 8: mod_base = OTHER; note = 2-fluoro-modified nucleoside
  modified_base 10: mod_base = OTHER; note = 2-fluoro-modified nucleoside
  modified_base 12: mod_base = OTHER; note = 2-fluoro-modified nucleoside
  modified_base 14: mod_base = OTHER; note = 2-fluoro-modified nucleoside
  modified_base 16: mod_base = OTHER; note = 2-fluoro-modified nucleoside
  modified_base 18: mod_base = OTHER; note = 2-fluoro-modified nucleoside
  modified_base 1: mod_base = OTHER; note = 2-O-methyl modified nucleoside
  modified_base 2: mod_base = OTHER; note = 2-O-methyl modified nucleoside
  modified_base 3: mod_base = OTHER; note = 2-O-methyl modified nucleoside
  modified_base 5: mod_base = OTHER; note = 2-O-methyl modified nucleoside
  modified_base 7: mod_base = OTHER; note = 2-O-methyl modified nucleoside
  modified_base 9: mod_base = OTHER; note = 2-O-methyl modified nucleoside
  modified_base 11: mod_base = OTHER; note = 2-O-methyl modified nucleoside
  modified_base 13: mod_base = OTHER; note = 2-O-methyl modified nucleoside
  modified_base 15: mod_base = OTHER; note = 2-O-methyl modified nucleoside
  modified_base 17: mod_base = OTHER; note = 2-O-methyl modified nucleoside
  modified_base 19: mod_base = OTHER; note = 2-O-methyl modified nucleoside
  modified_base 20: mod_base = OTHER; note = 2-O-methyl modified nucleoside
  modified_base 21: mod_base = OTHER; note = 2-O-methyl modified nucleoside
  modified_base 1^2: mod_base = OTHER; note = phosphorothioate linkage
  modified_base 2^3: mod_base = OTHER; note = phosphorothioate linkage
  modified_base 19^20: mod_base = OTHER; note = phosphorothioate linkage
  modified_base 20^21: mod_base = OTHER; note = phosphorothioate linkage
tcatcaggaggaagcttattt

SEQ ID NO: 11614 - RNA, 21 nt, synthetic construct
  source 1..21: mol_type = other RNA
  modified_base 1^2: mod_base = OTHER; note = phosphorothioate linkage
  modified_base 2^3: mod_base = OTHER; note = phosphorothioate linkage
  modified_base 19^20: mod_base = OTHER; note = phosphorothioate linkage
  modified_base 20^21: mod_base = OTHER; note = phosphorothioate linkage
  modified_base 1: mod_base = OTHER; note = 2-O-methyl modified nucleoside
  modified_base 2: mod_base = OTHER; note = 2-O-methyl modified nucleoside
  modified_base 3: mod_base = OTHER; note = 2-O-methyl modified nucleoside
  modified_base 5: mod_base = OTHER; note = 2-O-methyl modified nucleoside
  modified_base 7: mod_base = OTHER; note = 2-O-methyl modified nucleoside
  modified_base 9: mod_base = OTHER; note = 2-O-methyl modified nucleoside
  modified_base 11: mod_base = OTHER; note = 2-O-methyl modified nucleoside
  modified_base 13: mod_base = OTHER; note = 2-O-methyl modified nucleoside
  modified_base 15: mod_base = OTHER; note = 2-O-methyl modified nucleoside
  modified_base 17: mod_base = OTHER; note = 2-O-methyl modified nucleoside
  modified_base 19: mod_base = OTHER; note = 2-O-methyl modified nucleoside
  modified_base 20: mod_base = OTHER; note = 2-O-methyl modified nucleoside
  modified_base 21: mod_base = OTHER; note = 2-O-methyl modified nucleoside
  modified_base 4: mod_base = OTHER; note = 2-fluoro-modified nucleoside
  modified_base 6: mod_base = OTHER; note = 2-fluoro-modified nucleoside
  modified_base 8: mod_base = OTHER; note = 2-fluoro-modified nucleoside
  modified_base 10: mod_base = OTHER; note = 2-fluoro-modified nucleoside
  modified_base 12: mod_base = OTHER; note = 2-fluoro-modified nucleoside
  modified_base 14: mod_base = OTHER; note = 2-fluoro-modified nucleoside
  modified_base 16: mod_base = OTHER; note = 2-fluoro-modified nucleoside
  modified_base 18: mod_base = OTHER; note = 2-fluoro-modified nucleoside
ttttcgtctctggatgatgtt

SEQ ID NO: 11615 - skipped

SEQ ID NO: 11616 - RNA, 21 nt, synthetic construct
  source 1..21: mol_type = other RNA
  modified_base 1^2: mod_base = OTHER; note = phosphorothioate linkage
  modified_base 2^3: mod_base = OTHER; note = phosphorothioate linkage
  modified_base 19^20: mod_base = OTHER; note = phosphorothioate linkage
  modified_base 20^21: mod_base = OTHER; note = phosphorothioate linkage
  modified_base 1: mod_base = OTHER; note = 2-O-methyl modified nucleoside
  modified_base 2: mod_base = OTHER; note = 2-O-methyl modified nucleoside
  modified_base 3: mod_base = OTHER; note = 2-O-methyl modified nucleoside
  modified_base 5: mod_base = OTHER; note = 2-O-methyl modified nucleoside
  modified_base 7: mod_base = OTHER; note = 2-O-methyl modified nucleoside
  modified_base 9: mod_base = OTHER; note = 2-O-methyl modified nucleoside
  modified_base 11: mod_base = OTHER; note = 2-O-methyl modified nucleoside
  modified_base 13: mod_base = OTHER; note = 2-O-methyl modified nucleoside
  modified_base 15: mod_base = OTHER; note = 2-O-methyl modified nucleoside
  modified_base 17: mod_base = OTHER; note = 2-O-methyl modified nucleoside
  modified_base 19: mod_base = OTHER; note = 2-O-methyl modified nucleoside
  modified_base 20: mod_base = OTHER; note = 2-O-methyl modified nucleoside
  modified_base 21: mod_base = OTHER; note = 2-O-methyl modified nucleoside
  modified_base 4: mod_base = OTHER; note = 2-fluoro-modified nucleoside
  modified_base 6: mod_base = OTHER; note = 2-fluoro-modified nucleoside
  modified_base 8: mod_base = OTHER; note = 2-fluoro-modified nucleoside
  modified_base 10: mod_base = OTHER; note = 2-fluoro-modified nucleoside
  modified_base 12: mod_base = OTHER; note = 2-fluoro-modified nucleoside
  modified_base 14: mod_base = OTHER; note = 2-fluoro-modified nucleoside
  modified_base 16: mod_base = OTHER; note = 2-fluoro-modified nucleoside
  modified_base 18: mod_base = OTHER; note = 2-fluoro-modified nucleoside
ttttttcgtctctggatgatt

SEQ ID NO: 11617 - RNA, 21 nt, synthetic construct
  source 1..21: mol_type = other RNA
  modified_base 4: mod_base = OTHER; note = 2-fluoro-modified nucleoside
  modified_base 6: mod_base = OTHER; note = 2-fluoro-modified nucleoside
  modified_base 8: mod_base = OTHER; note = 2-fluoro-modified nucleoside
  modified_base 10: mod_base = OTHER; note = 2-fluoro-modified nucleoside
  modified_base 12: mod_base = OTHER; note = 2-fluoro-modified nucleoside
  modified_base 14: mod_base = OTHER; note = 2-fluoro-modified nucleoside
  modified_base 16: mod_base = OTHER; note = 2-fluoro-modified nucleoside
  modified_base 18: mod_base = OTHER; note = 2-fluoro-modified nucleoside
  modified_base 1: mod_base = OTHER; note = 2-O-methyl modified nucleoside
  modified_base 2: mod_base = OTHER; note = 2-O-methyl modified nucleoside
  modified_base 3: mod_base = OTHER; note = 2-O-methyl modified nucleoside
  modified_base 5: mod_base = OTHER; note = 2-O-methyl modified nucleoside
  modified_base 7: mod_base = OTHER; note = 2-O-methyl modified nucleoside
  modified_base 9: mod_base = OTHER; note = 2-O-methyl modified nucleoside
  modified_base 11: mod_base = OTHER; note = 2-O-methyl modified nucleoside
  modified_base 13: mod_base = OTHER; note = 2-O-methyl modified nucleoside
  modified_base 15: mod_base = OTHER; note = 2-O-methyl modified nucleoside
  modified_base 17: mod_base = OTHER; note = 2-O-methyl modified nucleoside
  modified_base 19: mod_base = OTHER; note = 2-O-methyl modified nucleoside
  modified_base 20: mod_base = OTHER; note = 2-O-methyl modified nucleoside
  modified_base 21: mod_base = OTHER; note = 2-O-methyl modified nucleoside
  modified_base 1^2: mod_base = OTHER; note = phosphorothioate linkage
  modified_base 2^3: mod_base = OTHER; note = phosphorothioate linkage
  modified_base 19^20: mod_base = OTHER; note = phosphorothioate linkage
  modified_base 20^21: mod_base = OTHER; note = phosphorothioate linkage
tgtgttgttatgatactggtt

SEQ ID NO: 11618 - RNA, 21 nt, synthetic construct
  source 1..21: mol_type = other RNA
  modified_base 1^2: mod_base = OTHER; note = phosphorothioate linkage
  modified_base 2^3: mod_base = OTHER; note = phosphorothioate linkage
  modified_base 19^20: mod_base = OTHER; note = phosphorothioate linkage
  modified_base 20^21: mod_base = OTHER; note = phosphorothioate linkage
  modified_base 3: mod_base = OTHER; note = 2-O-methyl modified nucleoside
  modified_base 5: mod_base = OTHER; note = 2-O-methyl modified nucleoside
  modified_base 7: mod_base = OTHER; note = 2-O-methyl modified nucleoside
  modified_base 9: mod_base = OTHER; note = 2-O-methyl modified nucleoside
  modified_base 11: mod_base = OTHER; note = 2-O-methyl modified nucleoside
  modified_base 13: mod_base = OTHER; note = 2-O-methyl modified nucleoside
  modified_base 15: mod_base = OTHER; note = 2-O-methyl modified nucleoside
  modified_base 19: mod_base = OTHER; note = 2-O-methyl modified nucleoside
  modified_base 1: mod_base = OTHER; note = 2-O-methyl modified nucleoside
  modified_base 2: mod_base = OTHER; note = 2-O-methyl modified nucleoside
  modified_base 17: mod_base = OTHER; note = 2-O-methyl modified nucleoside
  modified_base 20: mod_base = OTHER; note = 2-O-methyl modified nucleoside
  modified_base 21: mod_base = OTHER; note = 2-O-methyl modified nucleoside
  modified_base 4: mod_base = OTHER; note = 2-fluoro-modified nucleoside
  modified_base 6: mod_base = OTHER; note = 2-fluoro-modified nucleoside
  modified_base 8: mod_base = OTHER; note = 2-fluoro-modified nucleoside
  modified_base 10: mod_base = OTHER; note = 2-fluoro-modified nucleoside
  modified_base 12: mod_base = OTHER; note = 2-fluoro-modified nucleoside
  modified_base 14: mod_base = OTHER; note = 2-fluoro-modified nucleoside
  modified_base 16: mod_base = OTHER; note = 2-fluoro-modified nucleoside
  modified_base 18: mod_base = OTHER; note = 2-fluoro-modified nucleoside
tgtagtacactccattgagtt

SEQ ID NO: 11619 - RNA, 21 nt, synthetic construct
  source 1..21: mol_type = other RNA
  modified_base 4: mod_base = OTHER; note = 2-fluoro-modified nucleoside
  modified_base 6: mod_base = OTHER; note = 2-fluoro-modified nucleoside
  modified_base 8: mod_base = OTHER; note = 2-fluoro-modified nucleoside
  modified_base 10: mod_base = OTHER; note = 2-fluoro-modified nucleoside
  modified_base 12: mod_base = OTHER; note = 2-fluoro-modified nucleoside
  modified_base 14: mod_base = OTHER; note = 2-fluoro-modified nucleoside
  modified_base 16: mod_base = OTHER; note = 2-fluoro-modified nucleoside
  modified_base 18: mod_base = OTHER; note = 2-fluoro-modified nucleoside
  modified_base 1: mod_base = OTHER; note = 2-O-methyl modified nucleoside
  modified_base 2: mod_base = OTHER; note = 2-O-methyl modified nucleoside
  modified_base 3: mod_base = OTHER; note = 2-O-methyl modified nucleoside
  modified_base 5: mod_base = OTHER; note = 2-O-methyl modified nucleoside
  modified_base 7: mod_base = OTHER; note = 2-O-methyl modified nucleoside
  modified_base 9: mod_base = OTHER; note = 2-O-methyl modified nucleoside
  modified_base 11: mod_base = OTHER; note = 2-O-methyl modified nucleoside
  modified_base 13: mod_base = OTHER; note = 2-O-methyl modified nucleoside
  modified_base 15: mod_base = OTHER; note = 2-O-methyl modified nucleoside
  modified_base 17: mod_base = OTHER; note = 2-O-methyl modified nucleoside
  modified_base 19: mod_base = OTHER; note = 2-O-methyl modified nucleoside
  modified_base 20: mod_base = OTHER; note = 2-O-methyl modified nucleoside
  modified_base 21: mod_base = OTHER; note = 2-O-methyl modified nucleoside
  modified_base 1^2: mod_base = OTHER; note = phosphorothioate linkage
  modified_base 2^3: mod_base = OTHER; note = phosphorothioate linkage
  modified_base 19^20: mod_base = OTHER; note = phosphorothioate linkage
  modified_base 20^21: mod_base = OTHER; note = phosphorothioate linkage
tctttcacagacaaatcattt

SEQ ID NO: 11620 - RNA, 21 nt, synthetic construct
  source 1..21: mol_type = other RNA
  modified_base 1^2: mod_base = OTHER; note = phosphorothioate linkage
  modified_base 2^3: mod_base = OTHER; note = phosphorothioate linkage
  modified_base 19^20: mod_base = OTHER; note = phosphorothioate linkage
  modified_base 20^21: mod_base = OTHER; note = phosphorothioate linkage
  modified_base 1: mod_base = OTHER; note = 2-O-methyl modified nucleoside
  modified_base 2: mod_base = OTHER; note = 2-O-methyl modified nucleoside
  modified_base 3: mod_base = OTHER; note = 2-O-methyl modified nucleoside
  modified_base 5: mod_base = OTHER; note = 2-O-methyl modified nucleoside
  modified_base 7: mod_base = OTHER; note = 2-O-methyl modified nucleoside
  modified_base 9: mod_base = OTHER; note = 2-O-methyl modified nucleoside
  modified_base 11: mod_base = OTHER; note = 2-O-methyl modified nucleoside
  modified_base 13: mod_base = OTHER; note = 2-O-methyl modified nucleoside
  modified_base 15: mod_base = OTHER; note = 2-O-methyl modified nucleoside
  modified_base 17: mod_base = OTHER; note = 2-O-methyl modified nucleoside
  modified_base 19: mod_base = OTHER; note = 2-O-methyl modified nucleoside
  modified_base 20: mod_base = OTHER; note = 2-O-methyl modified nucleoside
  modified_base 21: mod_base = OTHER; note = 2-O-methyl modified nucleoside
  modified_base 4: mod_base = OTHER; note = 2-fluoro-modified nucleoside
  modified_base 6: mod_base = OTHER; note = 2-fluoro-modified nucleoside
  modified_base 8: mod_base = OTHER; note = 2-fluoro-modified nucleoside
  modified_base 10: mod_base = OTHER; note = 2-fluoro-modified nucleoside
  modified_base 14: mod_base = OTHER; note = 2-fluoro-modified nucleoside
  modified_base 12: mod_base = OTHER; note = 2-fluoro-modified nucleoside
  modified_base 16: mod_base = OTHER; note = 2-fluoro-modified nucleoside
  modified_base 18: mod_base = OTHER; note = 2-fluoro-modified nucleoside
ttttagcaaagggatttgttt

SEQ ID NO: 11621 - RNA, 21 nt, synthetic construct
  source 1..21: mol_type = other RNA
  modified_base 4: mod_base = OTHER; note = 2-fluoro-modified nucleoside
  modified_base 6: mod_base = OTHER; note = 2-fluoro-modified nucleoside
  modified_base 8: mod_base = OTHER; note = 2-fluoro-modified nucleoside
  modified_base 10: mod_base = OTHER; note = 2-fluoro-modified nucleoside
  modified_base 12: mod_base = OTHER; note = 2-fluoro-modified nucleoside
  modified_base 14: mod_base = OTHER; note = 2-fluoro-modified nucleoside
  modified_base 16: mod_base = OTHER; note = 2-fluoro-modified nucleoside
  modified_base 18: mod_base = OTHER; note = 2-fluoro-modified nucleoside
  modified_base 1: mod_base = OTHER; note = 2-O-methyl modified nucleoside
  modified_base 2: mod_base = OTHER; note = 2-O-methyl modified nucleoside
  modified_base 3: mod_base = OTHER; note = 2-O-methyl modified nucleoside
  modified_base 5: mod_base = OTHER; note = 2-O-methyl modified nucleoside
  modified_base 7: mod_base = OTHER; note = 2-O-methyl modified nucleoside
  modified_base 9: mod_base = OTHER; note = 2-O-methyl modified nucleoside
  modified_base 11: mod_base = OTHER; note = 2-O-methyl modified nucleoside
  modified_base 13: mod_base = OTHER; note = 2-O-methyl modified nucleoside
  modified_base 15: mod_base = OTHER; note = 2-O-methyl modified nucleoside
  modified_base 17: mod_base = OTHER; note = 2-O-methyl modified nucleoside
  modified_base 19: mod_base = OTHER; note = 2-O-methyl modified nucleoside
  modified_base 20: mod_base = OTHER; note = 2-O-methyl modified nucleoside
  modified_base 21: mod_base = OTHER; note = 2-O-methyl modified nucleoside
  modified_base 1^2: mod_base = OTHER; note = phosphorothioate linkage
  modified_base 2^3: mod_base = OTHER; note = phosphorothioate linkage
  modified_base 19^20: mod_base = OTHER; note = phosphorothioate linkage
  modified_base 20^21: mod_base = OTHER; note = phosphorothioate linkage
ttgtagactcaagataatttt

SEQ ID NO: 11622 - RNA, 21 nt, synthetic construct
  source 1..21: mol_type = other RNA
  modified_base 1^2: mod_base = OTHER; note = phosphorothioate linkage
  modified_base 2^3: mod_base = OTHER; note = phosphorothioate linkage
  modified_base 19^20: mod_base = OTHER; note = phosphorothioate linkage
  modified_base 20^21: mod_base = OTHER; note = phosphorothioate linkage
  modified_base 1: mod_base = OTHER; note = 2-O-methyl modified nucleoside
  modified_base 2: mod_base = OTHER; note = 2-O-methyl modified nucleoside
  modified_base 3: mod_base = OTHER; note = 2-O-methyl modified nucleoside
  modified_base 5: mod_base = OTHER; note = 2-O-methyl modified nucleoside
  modified_base 7: mod_base = OTHER; note = 2-O-methyl modified nucleoside
  modified_base 9: mod_base = OTHER; note = 2-O-methyl modified nucleoside
  modified_base 11: mod_base = OTHER; note = 2-O-methyl modified nucleoside
  modified_base 13: mod_base = OTHER; note = 2-O-methyl modified nucleoside
  modified_base 15: mod_base = OTHER; note = 2-O-methyl modified nucleoside
  modified_base 17: mod_base = OTHER; note = 2-O-methyl modified nucleoside
  modified_base 19: mod_base = OTHER; note = 2-O-methyl modified nucleoside
  modified_base 20: mod_base = OTHER; note = 2-O-methyl modified nucleoside
  modified_base 21: mod_base = OTHER; note = 2-O-methyl modified nucleoside
  modified_base 4: mod_base = OTHER; note = 2-fluoro-modified nucleoside
  modified_base 6: mod_base = OTHER; note = 2-fluoro-modified nucleoside
  modified_base 8: mod_base = OTHER; note = 2-fluoro-modified nucleoside
  modified_base 10: mod_base = OTHER; note = 2-fluoro-modified nucleoside
  modified_base 12: mod_base = OTHER; note = 2-fluoro-modified nucleoside
  modified_base 14: mod_base = OTHER; note = 2-fluoro-modified nucleoside
  modified_base 16: mod_base = OTHER; note = 2-fluoro-modified nucleoside
  modified_base 18: mod_base = OTHER; note = 2-fluoro-modified nucleoside
tgccgaacaatttttgtgttt

SEQ ID NO: 11623 - RNA, 21 nt, synthetic construct
  source 1..21: mol_type = other RNA
  modified_base 4: mod_base = OTHER; note = 2-fluoro-modified nucleoside
  modified_base 6: mod_base = OTHER; note = 2-fluoro-modified nucleoside
  modified_base 10: mod_base = OTHER; note = 2-fluoro-modified nucleoside
  modified_base 12: mod_base = OTHER; note = 2-fluoro-modified nucleoside
  modified_base 14: mod_base = OTHER; note = 2-fluoro-modified nucleoside
  modified_base 16: mod_base = OTHER; note = 2-fluoro-modified nucleoside
  modified_base 18: mod_base = OTHER; note = 2-fluoro-modified nucleoside
  modified_base 1: mod_base = OTHER; note = 2-O-methyl modified nucleoside
  modified_base 2: mod_base = OTHER; note = 2-O-methyl modified nucleoside
  modified_base 3: mod_base = OTHER; note = 2-O-methyl modified nucleoside
  modified_base 5: mod_base = OTHER; note = 2-O-methyl modified nucleoside
  modified_base 7: mod_base = OTHER; note = 2-O-methyl modified nucleoside
  modified_base 9: mod_base = OTHER; note = 2-O-methyl modified nucleoside
  modified_base 11: mod_base = OTHER; note = 2-O-methyl modified nucleoside
  modified_base 13: mod_base = OTHER; note = 2-O-methyl modified nucleoside
  modified_base 15: mod_base = OTHER; note = 2-O-methyl modified nucleoside
  modified_base 17: mod_base = OTHER; note = 2-O-methyl modified nucleoside
  modified_base 19: mod_base = OTHER; note = 2-O-methyl modified nucleoside
  modified_base 20: mod_base = OTHER; note = 2-O-methyl modified nucleoside
  modified_base 21: mod_base = OTHER; note = 2-O-methyl modified nucleoside
  modified_base 1^2: mod_base = OTHER; note = phosphorothioate linkage
  modified_base 2^3: mod_base = OTHER; note = phosphorothioate linkage
  modified_base 19^20: mod_base = OTHER; note = phosphorothioate linkage
  modified_base 20^21: mod_base = OTHER; note = phosphorothioate linkage
tagccgaacaatttttgtgtt

SEQ ID NO: 11624 - RNA, 21 nt, synthetic construct
  source 1..21: mol_type = other RNA
  modified_base 1^2: mod_base = OTHER; note = phosphorothioate linkage
  modified_base 2^3: mod_base = OTHER; note = phosphorothioate linkage
  modified_base 19^20: mod_base = OTHER; note = phosphorothioate linkage
  modified_base 20^21: mod_base = OTHER; note = phosphorothioate linkage
  modified_base 1: mod_base = OTHER; note = 2-O-methyl modified nucleoside
  modified_base 2: mod_base = OTHER; note = 2-O-methyl modified nucleoside
  modified_base 3: mod_base = OTHER; note = 2-O-methyl modified nucleoside
  modified_base 5: mod_base = OTHER; note = 2-O-methyl modified nucleoside
  modified_base 7: mod_base = OTHER; note = 2-O-methyl modified nucleoside
  modified_base 9: mod_base = OTHER; note = 2-O-methyl modified nucleoside
  modified_base 11: mod_base = OTHER; note = 2-O-methyl modified nucleoside
  modified_base 13: mod_base = OTHER; note = 2-O-methyl modified nucleoside
  modified_base 15: mod_base = OTHER; note = 2-O-methyl modified nucleoside
  modified_base 17: mod_base = OTHER; note = 2-O-methyl modified nucleoside
  modified_base 19: mod_base = OTHER; note = 2-O-methyl modified nucleoside
  modified_base 20: mod_base = OTHER; note = 2-O-methyl modified nucleoside
  modified_base 21: mod_base = OTHER; note = 2-O-methyl modified nucleoside
  modified_base 4: mod_base = OTHER; note = 2-fluoro-modified nucleoside
  modified_base 6: mod_base = OTHER; note = 2-fluoro-modified nucleoside
  modified_base 8: mod_base = OTHER; note = 2-fluoro-modified nucleoside
  modified_base 10: mod_base = OTHER; note = 2-fluoro-modified nucleoside
  modified_base 12: mod_base = OTHER; note = 2-fluoro-modified nucleoside
  modified_base 14: mod_base = OTHER; note = 2-fluoro-modified nucleoside
  modified_base 16: mod_base = OTHER; note = 2-fluoro-modified nucleoside
  modified_base 18: mod_base = OTHER; note = 2-fluoro-modified nucleoside
ttatgaatattttaaggcatt

SEQ ID NO: 11625 - RNA, 21 nt, synthetic construct
  source 1..21: mol_type = other RNA
  modified_base 4: mod_base = OTHER; note = 2-fluoro-modified nucleoside
  modified_base 6: mod_base = OTHER; note = 2-fluoro-modified nucleoside
  modified_base 8: mod_base = OTHER; note = 2-fluoro-modified nucleoside
  modified_base 10: mod_base = OTHER; note = 2-fluoro-modified nucleoside
  modified_base 12: mod_base = OTHER; note = 2-fluoro-modified nucleoside
  modified_base 14: mod_base = OTHER; note = 2-fluoro-modified nucleoside
  modified_base 16: mod_base = OTHER; note = 2-fluoro-modified nucleoside
  modified_base 18: mod_base = OTHER; note = 2-fluoro-modified nucleoside
  modified_base 1: mod_base = OTHER; note = 2-O-methyl modified nucleoside
  modified_base 2: mod_base = OTHER; note = 2-O-methyl modified nucleoside
  modified_base 3: mod_base = OTHER; note = 2-O-methyl modified nucleoside
  modified_base 5: mod_base = OTHER; note = 2-O-methyl modified nucleoside
  modified_base 7: mod_base = OTHER; note = 2-O-methyl modified nucleoside
  modified_base 9: mod_base = OTHER; note = 2-O-methyl modified nucleoside
  modified_base 11: mod_base = OTHER; note = 2-O-methyl modified nucleoside
  modified_base 13: mod_base = OTHER; note = 2-O-methyl modified nucleoside
  modified_base 15: mod_base = OTHER; note = 2-O-methyl modified nucleoside
  modified_base 17: mod_base = OTHER; note = 2-O-methyl modified nucleoside
  modified_base 19: mod_base = OTHER; note = 2-O-methyl modified nucleoside
  modified_base 20: mod_base = OTHER; note = 2-O-methyl modified nucleoside
  modified_base 21: mod_base = OTHER; note = 2-O-methyl modified nucleoside
  modified_base 1^2: mod_base = OTHER; note = phosphorothioate linkage
  modified_base 2^3: mod_base = OTHER; note = phosphorothioate linkage
  modified_base 19^20: mod_base = OTHER; note = phosphorothioate linkage
  modified_base 20^21: mod_base = OTHER; note = phosphorothioate linkage
tatctaccttcagttttcatt

SEQ ID NO: 11626 - RNA, 21 nt, synthetic construct
  source 1..21: mol_type = other RNA
  modified_base 1^2: mod_base = OTHER; note = phosphorothioate linkage
  modified_base 2^3: mod_base = OTHER; note = phosphorothioate linkage
  modified_base 19^20: mod_base = OTHER; note = phosphorothioate linkage
  modified_base 20^21: mod_base = OTHER; note = phosphorothioate linkage
  modified_base 1: mod_base = OTHER; note = 2-O-methyl modified nucleoside
  modified_base 2: mod_base = OTHER; note = 2-O-methyl modified nucleoside
  modified_base 3: mod_base = OTHER; note = 2-O-methyl modified nucleoside
  modified_base 5: mod_base = OTHER; note = 2-O-methyl modified nucleoside
  modified_base 7: mod_base = OTHER; note = 2-O-methyl modified nucleoside
  modified_base 9: mod_base = OTHER; note = 2-O-methyl modified nucleoside
  modified_base 11: mod_base = OTHER; note = 2-O-methyl modified nucleoside
  modified_base 13: mod_base = OTHER; note = 2-O-methyl modified nucleoside
  modified_base 15: mod_base = OTHER; note = 2-O-methyl modified nucleoside
  modified_base 17: mod_base = OTHER; note = 2-O-methyl modified nucleoside
  modified_base 19: mod_base = OTHER; note = 2-O-methyl modified nucleoside
  modified_base 20: mod_base = OTHER; note = 2-O-methyl modified nucleoside
  modified_base 21: mod_base = OTHER; note = 2-O-methyl modified nucleoside
  modified_base 4: mod_base = OTHER; note = 2-fluoro-modified nucleoside
  modified_base 6: mod_base = OTHER; note = 2-fluoro-modified nucleoside
  modified_base 8: mod_base = OTHER; note = 2-fluoro-modified nucleoside
  modified_base 10: mod_base = OTHER; note = 2-fluoro-modified nucleoside
  modified_base 12: mod_base = OTHER; note = 2-fluoro-modified nucleoside
  modified_base 14: mod_base = OTHER; note = 2-fluoro-modified nucleoside
  modified_base 16: mod_base = OTHER; note = 2-fluoro-modified nucleoside
  modified_base 18: mod_base = OTHER; note = 2-fluoro-modified nucleoside
tataacaccatctaccttctt

SEQ ID NO: 11627 - RNA, 21 nt, synthetic construct
  source 1..21: mol_type = other RNA
  modified_base 4: mod_base = OTHER; note = 2-fluoro-modified nucleoside
  modified_base 6: mod_base = OTHER; note = 2-fluoro-modified nucleoside
  modified_base 8: mod_base = OTHER; note = 2-fluoro-modified nucleoside
  modified_base 10: mod_base = OTHER; note = 2-fluoro-modified nucleoside
  modified_base 12: mod_base = OTHER; note = 2-fluoro-modified nucleoside
  modified_base 14: mod_base = OTHER; note = 2-fluoro-modified nucleoside
  modified_base 16: mod_base = OTHER; note = 2-fluoro-modified nucleoside
  modified_base 18: mod_base = OTHER; note = 2-fluoro-modified nucleoside
  modified_base 1: mod_base = OTHER; note = 2-O-methyl modified nucleoside
  modified_base 2: mod_base = OTHER; note = 2-O-methyl modified nucleoside
  modified_base 3: mod_base = OTHER; note = 2-O-methyl modified nucleoside
  modified_base 5: mod_base = OTHER; note = 2-O-methyl modified nucleoside
  modified_base 7: mod_base = OTHER; note = 2-O-methyl modified nucleoside
  modified_base 9: mod_base = OTHER; note = 2-O-methyl modified nucleoside
  modified_base 11: mod_base = OTHER; note = 2-O-methyl modified nucleoside
  modified_base 13: mod_base = OTHER; note = 2-O-methyl modified nucleoside
  modified_base 15: mod_base = OTHER; note = 2-O-methyl modified nucleoside
  modified_base 17: mod_base = OTHER; note = 2-O-methyl modified nucleoside
  modified_base 19: mod_base = OTHER; note = 2-O-methyl modified nucleoside
  modified_base 20: mod_base = OTHER; note = 2-O-methyl modified nucleoside
  modified_base 21: mod_base = OTHER; note = 2-O-methyl modified nucleoside
  modified_base 1^2: mod_base = OTHER; note = phosphorothioate linkage
  modified_base 2^3: mod_base = OTHER; note = phosphorothioate linkage
  modified_base 19^20: mod_base = OTHER; note = phosphorothioate linkage
  modified_base 20^21: mod_base = OTHER; note = phosphorothioate linkage
taactataacaccatctactt

SEQ ID NO: 11628 - RNA, 21 nt, synthetic construct
  source 1..21: mol_type = other RNA
  modified_base 1^2: mod_base = OTHER; note = phosphorothioate linkage
  modified_base 2^3: mod_base = OTHER; note = phosphorothioate linkage
  modified_base 19^20: mod_base = OTHER; note = phosphorothioate linkage
  modified_base 20^21: mod_base = OTHER; note = phosphorothioate linkage
  modified_base 1: mod_base = OTHER; note = 2-O-methyl modified nucleoside
  modified_base 2: mod_base = OTHER; note = 2-O-methyl modified nucleoside
  modified_base 3: mod_base = OTHER; note = 2-O-methyl modified nucleoside
  modified_base 5: mod_base = OTHER; note = 2-O-methyl modified nucleoside
  modified_base 7: mod_base = OTHER; note = 2-O-methyl modified nucleoside
  modified_base 9: mod_base = OTHER; note = 2-O-methyl modified nucleoside
  modified_base 11: mod_base = OTHER; note = 2-O-methyl modified nucleoside
  modified_base 13: mod_base = OTHER; note = 2-O-methyl modified nucleoside
  modified_base 15: mod_base = OTHER; note = 2-O-methyl modified nucleoside
  modified_base 17: mod_base = OTHER; note = 2-O-methyl modified nucleoside
  modified_base 19: mod_base = OTHER; note = 2-O-methyl modified nucleoside
  modified_base 20: mod_base = OTHER; note = 2-O-methyl modified nucleoside
  modified_base 21: mod_base = OTHER; note = 2-O-methyl modified nucleoside
  modified_base 4: mod_base = OTHER; note = 2-fluoro-modified nucleoside
  modified_base 6: mod_base = OTHER; note = 2-fluoro-modified nucleoside
  modified_base 8: mod_base = OTHER; note = 2-fluoro-modified nucleoside
  modified_base 10: mod_base = OTHER; note = 2-fluoro-modified nucleoside
  modified_base 12: mod_base = OTHER; note = 2-fluoro-modified nucleoside
  modified_base 14: mod_base = OTHER; note = 2-fluoro-modified nucleoside
  modified_base 16: mod_base = OTHER; note = 2-fluoro-modified nucleoside
  modified_base 18: mod_base = OTHER; note = 2-fluoro-modified nucleoside
ttaactataacaccatctatt

SEQ ID NO: 11629 - RNA, 21 nt, synthetic construct
  source 1..21: mol_type = other RNA
  modified_base 4: mod_base = OTHER; note = 2-fluoro-modified nucleoside
  modified_base 6: mod_base = OTHER; note = 2-fluoro-modified nucleoside
  modified_base 8: mod_base = OTHER; note = 2-fluoro-modified nucleoside
  modified_base 10: mod_base = OTHER; note = 2-fluoro-modified nucleoside
  modified_base 12: mod_base = OTHER; note = 2-fluoro-modified nucleoside
  modified_base 14: mod_base = OTHER; note = 2-fluoro-modified nucleoside
  modified_base 16: mod_base = OTHER; note = 2-fluoro-modified nucleoside
  modified_base 18: mod_base = OTHER; note = 2-fluoro-modified nucleoside
  modified_base 1: mod_base = OTHER; note = 2-O-methyl modified nucleoside
  modified_base 2: mod_base = OTHER; note = 2-O-methyl modified nucleoside
  modified_base 3: mod_base = OTHER; note = 2-O-methyl modified nucleoside
  modified_base 5: mod_base = OTHER; note = 2-O-methyl modified nucleoside
  modified_base 7: mod_base = OTHER; note = 2-O-methyl modified nucleoside
  modified_base 9: mod_base = OTHER; note = 2-O-methyl modified nucleoside
  modified_base 11: mod_base = OTHER; note = 2-O-methyl modified nucleoside
  modified_base 13: mod_base = OTHER; note = 2-O-methyl modified nucleoside
  modified_base 15: mod_base = OTHER; note = 2-O-methyl modified nucleoside
  modified_base 17: mod_base = OTHER; note = 2-O-methyl modified nucleoside
  modified_base 19: mod_base = OTHER; note = 2-O-methyl modified nucleoside
  modified_base 20: mod_base = OTHER; note = 2-O-methyl modified nucleoside
  modified_base 21: mod_base = OTHER; note = 2-O-methyl modified nucleoside
  modified_base 1^2: mod_base = OTHER; note = phosphorothioate linkage
  modified_base 2^3: mod_base = OTHER; note = phosphorothioate linkage
  modified_base 19^20: mod_base = OTHER; note = phosphorothioate linkage
  modified_base 20^21: mod_base = OTHER; note = phosphorothioate linkage
tttaactataacaccatcttt

SEQ ID NO: 11630 - RNA, 21 nt, synthetic construct
  source 1..21: mol_type = other RNA
  modified_base 1: mod_base = OTHER; note = 2-O-methyl modified nucleoside; note = 5' vinyl phosphonate
  modified_base 2: mod_base = OTHER; note = 2-fluoro-modified nucleoside
  modified_base 4: mod_base = OTHER; note = 2-fluoro-modified nucleoside
  modified_base 6: mod_base = OTHER; note = 2-fluoro-modified nucleoside
  modified_base 8: mod_base = OTHER; note = 2-fluoro-modified nucleoside
  modified_base 10: mod_base = OTHER; note = 2-fluoro-modified nucleoside
  modified_base 16: mod_base = OTHER; note = 2-fluoro-modified nucleoside
  modified_base 14: mod_base = OTHER; note = 2-fluoro-modified nucleoside
  modified_base 18: mod_base = OTHER; note = 2-fluoro-modified nucleoside
  modified_base 5: mod_base = OTHER; note = 2-O-methyl modified nucleoside
  modified_base 3: mod_base = OTHER; note = 2-O-methyl modified nucleoside
  modified_base 7: mod_base = OTHER; note = 2-O-methyl modified nucleoside
  modified_base 9: mod_base = OTHER; note = 2-O-methyl modified nucleoside
  modified_base 11: mod_base = OTHER; note = 2-O-methyl modified nucleoside
  modified_base 12: mod_base = OTHER; note = 2-O-methyl modified nucleoside
  modified_base 13: mod_base = OTHER; note = 2-O-methyl modified nucleoside
  modified_base 15: mod_base = OTHER; note = 2-O-methyl modified nucleoside
  modified_base 17: mod_base = OTHER; note = 2-O-methyl modified nucleoside
  modified_base 19: mod_base = OTHER; note = 2-O-methyl modified nucleoside
  modified_base 20: mod_base = OTHER; note = 2-O-methyl modified nucleoside
  modified_base 21: mod_base = OTHER; note = 2-O-methyl modified nucleoside
  modified_base 1^2: mod_base = OTHER; note = phosphorothioate linkage
  modified_base 2^3: mod_base = OTHER; note = phosphorothioate linkage
  modified_base 19^20: mod_base = OTHER; note = phosphorothioate linkage
  modified_base 20^21: mod_base = OTHER; note = phosphorothioate linkage
taacatccttggtacatattt

SEQ ID NO: 11631 - RNA, 21 nt, synthetic construct
  source 1..21: mol_type = other RNA
  modified_base 1: mod_base = OTHER; note = 5' vinyl phosphonate; note = 2-O-methyl modified nucleoside
  modified_base 3: mod_base = OTHER; note = 2-O-methyl modified nucleoside
  modified_base 5: mod_base = OTHER; note = 2-O-methyl modified nucleoside
  modified_base 7: mod_base = OTHER; note = 2-O-methyl modified nucleoside
  modified_base 9: mod_base = OTHER; note = 2-O-methyl modified nucleoside
  modified_base 11: mod_base = OTHER; note = 2-O-methyl modified nucleoside
  modified_base 13: mod_base = OTHER; note = 2-O-methyl modified nucleoside
  modified_base 15: mod_base = OTHER; note = 2-O-methyl modified nucleoside
  modified_base 17: mod_base = OTHER; note = 2-O-methyl modified nucleoside
  modified_base 19: mod_base = OTHER; note = 2-O-methyl modified nucleoside
  modified_base 20: mod_base = OTHER; note = 2-O-methyl modified nucleoside
  modified_base 21: mod_base = OTHER; note = 2-O-methyl modified nucleoside
  modified_base 2: mod_base = OTHER; note = 2-fluoro-modified nucleoside
  modified_base 4: mod_base = OTHER; note = 2-fluoro-modified nucleoside
  modified_base 6: mod_base = OTHER; note = 2-fluoro-modified nucleoside
  modified_base 8: mod_base = OTHER; note = 2-fluoro-modified nucleoside
  modified_base 10: mod_base = OTHER; note = 2-fluoro-modified nucleoside
  modified_base 12: mod_base = OTHER; note = 2-fluoro-modified nucleoside
  modified_base 14: mod_base = OTHER; note = 2-fluoro-modified nucleoside
  modified_base 16: mod_base = OTHER; note = 2-fluoro-modified nucleoside
  modified_base 18: mod_base = OTHER; note = 2-fluoro-modified nucleoside
  modified_base 1^2: mod_base = OTHER; note = phosphorothioate linkage
  modified_base 2^3: mod_base = OTHER; note = phosphorothioate linkage
  modified_base 19^20: mod_base = OTHER; note = phosphorothioate linkage
  modified_base 20^21: mod_base = OTHER; note = phosphorothioate linkage
tcatcaggaggaagcttattt

SEQ ID NO: 11632 - RNA, 21 nt, synthetic construct
  source 1..21: mol_type = other RNA
  modified_base 1: mod_base = OTHER; note = 5' vinyl phosphonate; note = 2-O-methyl modified nucleoside
  modified_base 3: mod_base = OTHER; note = 2-O-methyl modified nucleoside
  modified_base 5: mod_base = OTHER; note = 2-O-methyl modified nucleoside
  modified_base 7: mod_base = OTHER; note = 2-O-methyl modified nucleoside
  modified_base 9: mod_base = OTHER; note = 2-O-methyl modified nucleoside
  modified_base 11: mod_base = OTHER; note = 2-O-methyl modified nucleoside
  modified_base 13: mod_base = OTHER; note = 2-O-methyl modified nucleoside
  modified_base 15: mod_base = OTHER; note = 2-O-methyl modified nucleoside
  modified_base 17: mod_base = OTHER; note = 2-O-methyl modified nucleoside
  modified_base 19: mod_base = OTHER; note = 2-O-methyl modified nucleoside
  modified_base 20: mod_base = OTHER; note = 2-O-methyl modified nucleoside
  modified_base 21: mod_base = OTHER; note = 2-O-methyl modified nucleoside
  modified_base 2: mod_base = OTHER; note = 2-fluoro-modified nucleoside
  modified_base 4: mod_base = OTHER; note = 2-fluoro-modified nucleoside
  modified_base 6: mod_base = OTHER; note = 2-fluoro-modified nucleoside
  modified_base 8: mod_base = OTHER; note = 2-fluoro-modified nucleoside
  modified_base 10: mod_base = OTHER; note = 2-fluoro-modified nucleoside
  modified_base 12: mod_base = OTHER; note = 2-fluoro-modified nucleoside
  modified_base 14: mod_base = OTHER; note = 2-fluoro-modified nucleoside
  modified_base 16: mod_base = OTHER; note = 2-fluoro-modified nucleoside
  modified_base 18: mod_base = OTHER; note = 2-fluoro-modified nucleoside
  modified_base 1^2: mod_base = OTHER; note = phosphorothioate linkage
  modified_base 2^3: mod_base = OTHER; note = phosphorothioate linkage
  modified_base 19^20: mod_base = OTHER; note = phosphorothioate linkage
  modified_base 20^21: mod_base = OTHER; note = phosphorothioate linkage
tctttcacagacaaatcattt

SEQ ID NO: 11633 - RNA, 21 nt, synthetic construct
  source 1..21: mol_type = other RNA
  modified_base 1: mod_base = OTHER; note = 5' vinyl phosphonate; note = 2-O-methyl modified nucleoside
  modified_base 3: mod_base = OTHER; note = 2-O-methyl modified nucleoside
  modified_base 5: mod_base = OTHER; note = 2-O-methyl modified nucleoside
  modified_base 7: mod_base = OTHER; note = 2-O-methyl modified nucleoside
  modified_base 9: mod_base = OTHER; note = 2-O-methyl modified nucleoside
  modified_base 11: mod_base = OTHER; note = 2-O-methyl modified nucleoside
  modified_base 13: mod_base = OTHER; note = 2-O-methyl modified nucleoside
  modified_base 15: mod_base = OTHER; note = 2-O-methyl modified nucleoside
  modified_base 17: mod_base = OTHER; note = 2-O-methyl modified nucleoside
  modified_base 19: mod_base = OTHER; note = 2-O-methyl modified nucleoside
  modified_base 21: mod_base = OTHER; note = 2-O-methyl modified nucleoside
  modified_base 20: mod_base = OTHER; note = 2-O-methyl modified nucleoside
  modified_base 2: mod_base = OTHER; note = 2-fluoro-modified nucleoside
  modified_base 4: mod_base = OTHER; note = 2-fluoro-modified nucleoside
  modified_base 6: mod_base = OTHER; note = 2-fluoro-modified nucleoside
  modified_base 8: mod_base = OTHER; note = 2-fluoro-modified nucleoside
  modified_base 10: mod_base = OTHER; note = 2-fluoro-modified nucleoside
  modified_base 12: mod_base = OTHER; note = 2-fluoro-modified nucleoside
  modified_base 14: mod_base = OTHER; note = 2-fluoro-modified nucleoside
  modified_base 16: mod_base = OTHER; note = 2-fluoro-modified nucleoside
  modified_base 18: mod_base = OTHER; note = 2-fluoro-modified nucleoside
  modified_base 1^2: mod_base = OTHER; note = phosphorothioate linkage
  modified_base 2^3: mod_base = OTHER; note = phosphorothioate linkage
  modified_base 19^20: mod_base = OTHER; note = phosphorothioate linkage
  modified_base 20^21: mod_base = OTHER; note = phosphorothioate linkage
ttgtagactcaagataatttt

SEQ ID NO: 11634 - RNA, 21 nt, synthetic construct
  source 1..21: mol_type = other RNA
  modified_base 1: mod_base = OTHER; note = 5' vinyl phosphonate; note = 2-O-methyl modified nucleoside
  modified_base 3: mod_base = OTHER; note = 2-O-methyl modified nucleoside
  modified_base 5: mod_base = OTHER; note = 2-O-methyl modified nucleoside
  modified_base 7: mod_base = OTHER; note = 2-O-methyl modified nucleoside
  modified_base 9: mod_base = OTHER; note = 2-O-methyl modified nucleoside
  modified_base 11: mod_base = OTHER; note = 2-O-methyl modified nucleoside
  modified_base 13: mod_base = OTHER; note = 2-O-methyl modified nucleoside
  modified_base 15: mod_base = OTHER; note = 2-O-methyl modified nucleoside
  modified_base 17: mod_base = OTHER; note = 2-O-methyl modified nucleoside
  modified_base 19: mod_base = OTHER; note = 2-O-methyl modified nucleoside
  modified_base 20: mod_base = OTHER; note = 2-O-methyl modified nucleoside
  modified_base 21: mod_base = OTHER; note = 2-O-methyl modified nucleoside
  modified_base 2: mod_base = OTHER; note = 2-fluoro-modified nucleoside
  modified_base 4: mod_base = OTHER; note = 2-fluoro-modified nucleoside
  modified_base 6: mod_base = OTHER; note = 2-fluoro-modified nucleoside
  modified_base 10: mod_base = OTHER; note = 2-fluoro-modified nucleoside
  modified_base 12: mod_base = OTHER; note = 2-fluoro-modified nucleoside
  modified_base 14: mod_base = OTHER; note = 2-fluoro-modified nucleoside
  modified_base 16: mod_base = OTHER; note = 2-fluoro-modified nucleoside
  modified_base 18: mod_base = OTHER; note = 2-fluoro-modified nucleoside
  modified_base 1^2: mod_base = OTHER; note = phosphorothioate linkage
  modified_base 2^3: mod_base = OTHER; note = phosphorothioate linkage
  modified_base 19^20: mod_base = OTHER; note = phosphorothioate linkage
  modified_base 20^21: mod_base = OTHER; note = phosphorothioate linkage
tgccgaacaatttttgtgttt

SEQ ID NO: 11635 - RNA, 21 nt, synthetic construct
  source 1..21: mol_type = other RNA
  modified_base 1: mod_base = OTHER; note = 5' vinyl phosphonate; note = 2-O-methyl modified nucleoside
  modified_base 3: mod_base = OTHER; note = 2-O-methyl modified nucleoside
  modified_base 5: mod_base = OTHER; note = 2-O-methyl modified nucleoside
  modified_base 7: mod_base = OTHER; note = 2-O-methyl modified nucleoside
  modified_base 9: mod_base = OTHER; note = 2-O-methyl modified nucleoside
  modified_base 11: mod_base = OTHER; note = 2-O-methyl modified nucleoside
  modified_base 13: mod_base = OTHER; note = 2-O-methyl modified nucleoside
  modified_base 15: mod_base = OTHER; note = 2-O-methyl modified nucleoside
  modified_base 17: mod_base = OTHER; note = 2-O-methyl modified nucleoside
  modified_base 19: mod_base = OTHER; note = 2-O-methyl modified nucleoside
  modified_base 20: mod_base = OTHER; note = 2-O-methyl modified nucleoside
  modified_base 21: mod_base = OTHER; note = 2-O-methyl modified nucleoside
  modified_base 2: mod_base = OTHER; note = 2-fluoro-modified nucleoside
  modified_base 4: mod_base = OTHER; note = 2-fluoro-modified nucleoside
  modified_base 6: mod_base = OTHER; note = 2-fluoro-modified nucleoside
  modified_base 8: mod_base = OTHER; note = 2-fluoro-modified nucleoside
  modified_base 10: mod_base = OTHER; note = 2-fluoro-modified nucleoside
  modified_base 12: mod_base = OTHER; note = 2-fluoro-modified nucleoside
  modified_base 14: mod_base = OTHER; note = 2-fluoro-modified nucleoside
  modified_base 16: mod_base = OTHER; note = 2-fluoro-modified nucleoside
  modified_base 18: mod_base = OTHER; note = 2-fluoro-modified nucleoside
  modified_base 1^2: mod_base = OTHER; note = phosphorothioate linkage
  modified_base 2^3: mod_base = OTHER; note = phosphorothioate linkage
  modified_base 19^20: mod_base = OTHER; note = phosphorothioate linkage
  modified_base 20^21: mod_base = OTHER; note = phosphorothioate linkage
tagccgaacaatttttgtgtt

SEQ ID NO: 11636 - RNA, 21 nt, synthetic construct
  source 1..21: mol_type = other RNA
  modified_base 1: mod_base = OTHER; note = 5' vinyl phosphonate; note = 2-O-methyl modified nucleoside
  modified_base 3: mod_base = OTHER; note = 2-O-methyl modified nucleoside
  modified_base 5: mod_base = OTHER; note = 2-O-methyl modified nucleoside
  modified_base 7: mod_base = OTHER; note = 2-O-methyl modified nucleoside
  modified_base 9: mod_base = OTHER; note = 2-O-methyl modified nucleoside
  modified_base 11: mod_base = OTHER; note = 2-O-methyl modified nucleoside
  modified_base 13: mod_base = OTHER; note = 2-O-methyl modified nucleoside
  modified_base 15: mod_base = OTHER; note = 2-O-methyl modified nucleoside
  modified_base 17: mod_base = OTHER; note = 2-O-methyl modified nucleoside
  modified_base 19: mod_base = OTHER; note = 2-O-methyl modified nucleoside
  modified_base 20: mod_base = OTHER; note = 2-O-methyl modified nucleoside
  modified_base 21: mod_base = OTHER; note = 2-O-methyl modified nucleoside
  modified_base 2: mod_base = OTHER; note = 2-fluoro-modified nucleoside
  modified_base 4: mod_base = OTHER; note = 2-fluoro-modified nucleoside
  modified_base 6: mod_base = OTHER; note = 2-fluoro-modified nucleoside
  modified_base 8: mod_base = OTHER; note = 2-fluoro-modified nucleoside
  modified_base 10: mod_base = OTHER; note = 2-fluoro-modified nucleoside
  modified_base 12: mod_base = OTHER; note = 2-fluoro-modified nucleoside
  modified_base 14: mod_base = OTHER; note = 2-fluoro-modified nucleoside
  modified_base 16: mod_base = OTHER; note = 2-fluoro-modified nucleoside
  modified_base 18: mod_base = OTHER; note = 2-fluoro-modified nucleoside
  modified_base 1^2: mod_base = OTHER; note = phosphorothioate linkage
  modified_base 2^3: mod_base = OTHER; note = phosphorothioate linkage
  modified_base 19^20: mod_base = OTHER; note = phosphorothioate linkage
  modified_base 20^21: mod_base = OTHER; note = phosphorothioate linkage
tatctaccttcagttttcatt

SEQ ID NO: 11637 - RNA, 21 nt, synthetic construct
  source 1..21: mol_type = other RNA
  modified_base 1: mod_base = OTHER; note = 5' vinyl phosphonate; note = 2-O-methyl modified nucleoside
  modified_base 3: mod_base = OTHER; note = 2-O-methyl modified nucleoside
  modified_base 5: mod_base = OTHER; note = 2-O-methyl modified nucleoside
  modified_base 7: mod_base = OTHER; note = 2-O-methyl modified nucleoside
  modified_base 9: mod_base = OTHER; note = 2-O-methyl modified nucleoside
  modified_base 11: mod_base = OTHER; note = 2-O-methyl modified nucleoside
  modified_base 13: mod_base = OTHER; note = 2-O-methyl modified nucleoside
  modified_base 15: mod_base = OTHER; note = 2-O-methyl modified nucleoside
  modified_base 17: mod_base = OTHER; note = 2-O-methyl modified nucleoside
  modified_base 19: mod_base = OTHER; note = 2-O-methyl modified nucleoside
  modified_base 20: mod_base = OTHER; note = 2-O-methyl modified nucleoside
  modified_base 21: mod_base = OTHER; note = 2-O-methyl modified nucleoside
  modified_base 2: mod_base = OTHER; note = 2-fluoro-modified nucleoside
  modified_base 4: mod_base = OTHER; note = 2-fluoro-modified nucleoside
  modified_base 6: mod_base = OTHER; note = 2-fluoro-modified nucleoside
  modified_base 8: mod_base = OTHER; note = 2-fluoro-modified nucleoside
  modified_base 10: mod_base = OTHER; note = 2-fluoro-modified nucleoside
  modified_base 12: mod_base = OTHER; note = 2-fluoro-modified nucleoside
  modified_base 14: mod_base = OTHER; note = 2-fluoro-modified nucleoside
  modified_base 16: mod_base = OTHER; note = 2-fluoro-modified nucleoside
  modified_base 18: mod_base = OTHER; note = 2-fluoro-modified nucleoside
  modified_base 1^2: mod_base = OTHER; note = phosphorothioate linkage
  modified_base 2^3: mod_base = OTHER; note = phosphorothioate linkage
  modified_base 19^20: mod_base = OTHER; note = phosphorothioate linkage
  modified_base 20^21: mod_base = OTHER; note = phosphorothioate linkage
taactataacaccatctactt

SEQ ID NO: 11638 - RNA, 21 nt, synthetic construct
  source 1..21: mol_type = other RNA
  modified_base 1: mod_base = OTHER; note = 2-O-methyl modified nucleoside; note = 5' vinyl phosphonate
  modified_base 3: mod_base = OTHER; note = 2-O-methyl modified nucleoside
  modified_base 5: mod_base = OTHER; note = 2-O-methyl modified nucleoside
  modified_base 7: mod_base = OTHER; note = 2-O-methyl modified nucleoside
  modified_base 9: mod_base = OTHER; note = 2-O-methyl modified nucleoside
  modified_base 11: mod_base = OTHER; note = 2-O-methyl modified nucleoside
  modified_base 13: mod_base = OTHER; note = 2-O-methyl modified nucleoside
  modified_base 15: mod_base = OTHER; note = 2-O-methyl modified nucleoside
  modified_base 17: mod_base = OTHER; note = 2-O-methyl modified nucleoside
  modified_base 19: mod_base = OTHER; note = 2-O-methyl modified nucleoside
  modified_base 19: mod_base = OTHER; note = 2-O-methyl modified nucleoside
  modified_base 20: mod_base = OTHER; note = 2-O-methyl modified nucleoside
  modified_base 21: mod_base = OTHER; note = 2-O-methyl modified nucleoside
  modified_base 2: mod_base = OTHER; note = 2-fluoro-modified nucleoside
  modified_base 4: mod_base = OTHER; note = 2-fluoro-modified nucleoside
  modified_base 6: mod_base = OTHER; note = 2-fluoro-modified nucleoside
  modified_base 8: mod_base = OTHER; note = 2-fluoro-modified nucleoside
  modified_base 10: mod_base = OTHER; note = 2-fluoro-modified nucleoside
  modified_base 12: mod_base = OTHER; note = 2-fluoro-modified nucleoside
  modified_base 14: mod_base = OTHER; note = 2-fluoro-modified nucleoside
  modified_base 16: mod_base = OTHER; note = 2-fluoro-modified nucleoside
  modified_base 18: mod_base = OTHER; note = 2-fluoro-modified nucleoside
  modified_base 1^2: mod_base = OTHER; note = phosphorothioate linkage
  modified_base 2^3: mod_base = OTHER; note = phosphorothioate linkage
  modified_base 19^20: mod_base = OTHER; note = phosphorothioate linkage
  modified_base 20^21: mod_base = OTHER; note = phosphorothioate linkage
tttaactataacaccatcttt

SEQ ID NO: 11639 - RNA, 21 nt, synthetic construct
  source 1..21: mol_type = other RNA
  modified_base 1: mod_base = OTHER; note = 2-O-methyl modified nucleoside; note = 5' vinyl phosphonate
  modified_base 3: mod_base = OTHER; note = 2-O-methyl modified nucleoside
  modified_base 5: mod_base = OTHER; note = 2-O-methyl modified nucleoside
  modified_base 7: mod_base = OTHER; note = 2-O-methyl modified nucleoside
  modified_base 9: mod_base = OTHER; note = 2-O-methyl modified nucleoside
  modified_base 11: mod_base = OTHER; note = 2-O-methyl modified nucleoside
  modified_base 13: mod_base = OTHER; note = 2-O-methyl modified nucleoside
  modified_base 15: mod_base = OTHER; note = 2-O-methyl modified nucleoside
  modified_base 17: mod_base = OTHER; note = 2-O-methyl modified nucleoside
  modified_base 19: mod_base = OTHER; note = 2-O-methyl modified nucleoside
  modified_base 20: mod_base = OTHER; note = 2-O-methyl modified nucleoside
  modified_base 21: mod_base = OTHER; note = 2-O-methyl modified nucleoside
  modified_base 2: mod_base = OTHER; note = 2-fluoro-modified nucleoside
  modified_base 4: mod_base = OTHER; note = 2-fluoro-modified nucleoside
  modified_base 6: mod_base = OTHER; note = 2-fluoro-modified nucleoside
  modified_base 8: mod_base = OTHER; note = 2-fluoro-modified nucleoside
  modified_base 10: mod_base = OTHER; note = 2-fluoro-modified nucleoside
  modified_base 12: mod_base = OTHER; note = 2-fluoro-modified nucleoside
  modified_base 14: mod_base = OTHER; note = 2-fluoro-modified nucleoside
  modified_base 16: mod_base = OTHER; note = 2-fluoro-modified nucleoside
  modified_base 18: mod_base = OTHER; note = 2-fluoro-modified nucleoside
  modified_base 1^2: mod_base = OTHER; note = phosphorothioate linkage
  modified_base 2^3: mod_base = OTHER; note = phosphorothioate linkage
  modified_base 19^20: mod_base = OTHER; note = phosphorothioate linkage
  modified_base 20^21: mod_base = OTHER; note = phosphorothioate linkage
taacatccttggtacatattt

SEQ ID NO: 11640 - RNA, 21 nt, synthetic construct
  source 1..21: mol_type = other RNA
  modified_base 1: mod_base = OTHER; note = 5' vinyl phosphonate; note = 2-O-methyl modified nucleoside
  modified_base 3: mod_base = OTHER; note = 2-O-methyl modified nucleoside
  modified_base 5: mod_base = OTHER; note = 2-O-methyl modified nucleoside
  modified_base 7: mod_base = OTHER; note = 2-O-methyl modified nucleoside
  modified_base 9: mod_base = OTHER; note = 2-O-methyl modified nucleoside
  modified_base 11: mod_base = OTHER; note = 2-O-methyl modified nucleoside
  modified_base 13: mod_base = OTHER; note = 2-O-methyl modified nucleoside
  modified_base 15: mod_base = OTHER; note = 2-O-methyl modified nucleoside
  modified_base 17: mod_base = OTHER; note = 2-O-methyl modified nucleoside
  modified_base 19: mod_base = OTHER; note = 2-O-methyl modified nucleoside
  modified_base 20: mod_base = OTHER; note = 2-O-methyl modified nucleoside
  modified_base 21: mod_base = OTHER; note = 2-O-methyl modified nucleoside
  modified_base 2: mod_base = OTHER; note = 2-fluoro-modified nucleoside
  modified_base 4: mod_base = OTHER; note = 2-fluoro-modified nucleoside
  modified_base 6: mod_base = OTHER; note = 2-fluoro-modified nucleoside
  modified_base 8: mod_base = OTHER; note = 2-fluoro-modified nucleoside
  modified_base 10: mod_base = OTHER; note = 2-fluoro-modified nucleoside
  modified_base 12: mod_base = OTHER; note = 2-fluoro-modified nucleoside
  modified_base 14: mod_base = OTHER; note = 2-fluoro-modified nucleoside
  modified_base 16: mod_base = OTHER; note = 2-fluoro-modified nucleoside
  modified_base 18: mod_base = OTHER; note = 2-fluoro-modified nucleoside
  modified_base 1^2: mod_base = OTHER; note = phosphorothioate linkage
  modified_base 2^3: mod_base = OTHER; note = phosphorothioate linkage
  modified_base 19^20: mod_base = OTHER; note = phosphorothioate linkage
  modified_base 20^21: mod_base = OTHER; note = phosphorothioate linkage
ttgtagactcaagataatttt

SEQ ID NO: 11641 - RNA, 21 nt, synthetic construct
  source 1..21: mol_type = other RNA
  modified_base 1: mod_base = OTHER; note = 2-O-methyl modified nucleoside; note = 5' vinyl phosphonate
  modified_base 5: mod_base = OTHER; note = 2-O-methyl modified nucleoside
  modified_base 7: mod_base = OTHER; note = 2-O-methyl modified nucleoside
  modified_base 9: mod_base = OTHER; note = 2-O-methyl modified nucleoside
  modified_base 11: mod_base = OTHER; note = 2-O-methyl modified nucleoside
  modified_base 13: mod_base = OTHER; note = 2-O-methyl modified nucleoside
  modified_base 15: mod_base = OTHER; note = 2-O-methyl modified nucleoside
  modified_base 17: mod_base = OTHER; note = 2-O-methyl modified nucleoside
  modified_base 19: mod_base = OTHER; note = 2-O-methyl modified nucleoside
  modified_base 20: mod_base = OTHER; note = 2-O-methyl modified nucleoside
  modified_base 21: mod_base = OTHER; note = 2-O-methyl modified nucleoside
  modified_base 2: mod_base = OTHER; note = 2-fluoro-modified nucleoside
  modified_base 4: mod_base = OTHER; note = 2-fluoro-modified nucleoside
  modified_base 6: mod_base = OTHER; note = 2-fluoro-modified nucleoside
  modified_base 8: mod_base = OTHER; note = 2-fluoro-modified nucleoside
  modified_base 10: mod_base = OTHER; note = 2-fluoro-modified nucleoside
  modified_base 12: mod_base = OTHER; note = 2-fluoro-modified nucleoside
  modified_base 14: mod_base = OTHER; note = 2-fluoro-modified nucleoside
  modified_base 16: mod_base = OTHER; note = 2-fluoro-modified nucleoside
  modified_base 18: mod_base = OTHER; note = 2-fluoro-modified nucleoside
  modified_base 1^2: mod_base = OTHER; note = phosphorothioate linkage
  modified_base 2^3: mod_base = OTHER; note = phosphorothioate linkage
  modified_base 19^20: mod_base = OTHER; note = phosphorothioate linkage
  modified_base 20^21: mod_base = OTHER; note = phosphorothioate linkage
  modified_base 3: mod_base = OTHER; note = 2-O-methyl modified nucleoside
ttgtagactcaagataatttt

(The sequence listing continues in the following parts.)
